United States Patent Application Publication US 2018/0305689 A1 - sequence listing, part 43

SEQ ID NO: 586990 - DNA, 4001 bp, Homo sapiens
ggcagtactgttaatataaaaagcagaagtccaccaatcaaataaacaccaatccccagggtgctgttggctatctaatcctatcactaaacttaggagcagagggcagataagaaaataaagatatgagtacaacatactatagaatcaaactgctaatgagaacctgtgtcatgattctggaaatgtcatttgagtgctcagacaagctagacctcataaatcttacacagagatttataataacaatgtctcatttggggcacacaaaaatctactggagaagattaggaaaggattatttaacttggataattttttaaattaaacttttaactcttatttaaagacattttaatactgtaacgttagtgttaagaagcaataactttttcatgtttcacatttcaatacagaaaaaaatagattaaagatacatacaggttaaagtggggatccaagaatataggattaaggtggggaaaatgacagagtcatggaggaactggttcttcattggtcttcacaggaggatggggagtaggagagccaaagaagaatctacaggagctggtgcccgaatgtggtaagtgaggaaaaatggtagtctaagctggctcaaggtgggctagtgtctggaaaagtgaggacccatactaagtggaatgagaaggcattttctacatagtgaaatctctggtgaccactgagacttgagatgctctcttcagtgtggaaagatgggggaagaggaacgtttagcaacacaggaggtagatggtcaaaaaagcaactacatgccttaagaaaaaagttggaacaatgattcctacagtctttaggtcactaaagacctttaatgtcctctcactggttaaattcaagcaacacacacacattttaaaaattaatgattcctattacgtgtgaataaacctgaactttttttttgttttagtgaacataatttacactggcaaaatcgtccccaatcctccatatcaaatgagtatagaggtgggtgggtgagctcaaaggtcttttgcccctgtagttaaaagcctaaagaagtcttctgatcactgtggctgatagtaatacatctcagtattaatacagacaagtgactacctgtaatacaggtcttcgaaacatggcttctattttcttttcttacagtctaatctttaggcttttcctgaaggaaaaaaacaaaataagaaaaaaacattacctcttatggcaaaagtacaactcaccagtcctaaattcctaactatattcataatttttatgcactccaattttgtgaccacaacgtaccaacattcctgcacatctgatgaggattccttcctccctcccaaataaactcacacctgtatgtctttttggtcccaaataacttcctcttcctccaacccatcgacaaaattttgattctgagttaatcccacttccaatccactgtcttctcaaatttcattactatgcaagctcccttagagcagagatttgtatctgctttattcactgccattttctaaacttctaaaaaagttcttaatgcatagtaaggcctccataaatattagcatcaccaagggacttatatctgaaacctgttactgaaaaattactgccttcatctccgttaacaaagaccaagcagcgtagagacccccgggctagccagccacaccatagggagaggtggacaccctttaccgaagatggcgccaccacctgaaaaccgaggagaactggaaggaaatcacgcggtcctccgcacgactgatgaaagggccagacacctacacagaaacacctcccgacccacgcaggatcacgcgcagccaaaacacacgactccagcacttccttcgcgctggctatcccttcctccctcacctgacgatctaacccgagcagcccagccacgcaggggatcacttccggcgcacagggaacgcaaagctcgccagaggaaaaaggaaacagaaactccgcaacttgcgccttggaaatactgccggctagcgctgcgggaaacggctccccttaactctgaagttccgcgatcttctctttgtgcgcgggcggatggatcaacgccgccaagtggtgagtttggaaggtttcaagtttagaaggtttcaagtttagaaggtttcaagtttggaaagaaatgaaattatgtgatgaggtttctaactgggcccaggagggggcgaggtaggcaaaacagagactagctctgcctggagggaaaaaaaagcaacatttgtgaccagcctaggcgacatagtgagacctgtctctacaaaaaatatataattagctgggcgtggtggcgcgcgcctgtggtccaagcttctccggaggctgaggtcgggggatcgcctgagccctggaggtcgttgctgcattgagccgtgaacgcaccactgcattccagcctgggcaacagagcgaactctatctcaaaacaaaacaaaacaaaacaagaaaaagaaaaaaagaagaaaattaaaaaaaaaaagaaagaaaaagaacgtcccaggtctgttgaagcactaagaaaagcagaaaaagaaaggggagccagggaagggctggcaggctgtgcaatttaagggagcaccagaaaaactggcaatcaaataatatattaatgtaatattttaaaaagtaaaaattaatgcaggaaatccgggaggaacaaaataagagtcatgtgtaccttaacaacagggtaaggtctgaggattgcgtcattaggcgattttgttgctgtacgaacaccacagaatgtactttgacgacctagatggtggagcctggacacacctcggctctgtggtgtggcctgctgcttccaggctgcaaacctgacagcatggggctgtactgaataccgcagaccattgtaattcatggtaagtatctgtgtgtctaaacatatgtaaacatggaaaaggtacagtacaaatgcggtataaaagataaaaatggcacacctgtatggggcgcttaccatgaatggagcttgcggaactggaagttgctgtgggtgagtaaatgagtgagtggtggcccaacatgaaggtctaggacattattgtacccactaaacacttcataaacactgtacacttaggctacactcagtttataaaaaatacttttcttcctttaataaactttcactcactataactttataaatcttccaaatttttttacgttttaactgttttgtaataacaattagcttaaaacacacactgtaccactgtacaaaaatatttttcttatatccttattctacaagcttttttctacctttgctttttttctttttttttttaactttttagccattttttaaaaaaactaagacataaacacacacattagcctaggcctacacagggtcattatgatcaatctcagccttccacttccacatcttgtcccactggaaggttttcagaagcagtgacacacagggagctgtcatctcctataacagtgtcttcttctggaatccctcctgaaggacctgcctgaggctgttttacagttaacttttaaaaaataagttaaataataatataataaaaagtatagtaaatacataaaccagtgacatagtcattattaatatcaagtaacacatgagtaatacattgcattctgatgttttagcaggtatgatgtcactagacgataggaatttttcaactccattgtaatcttatgggaccacctttgtatatgcactgttgtatatgcagtctttttccaaaacatcattatgaagtgcatgactgtattaaaattttaactgaatacaggatccaagccagactggagcctgaggcacaaggaagaatatgcacccctgtgtatatgtgtacttatgtatttttaaaaattggggctaggaaggttagtggggggctggagggaaggtggggatggttaatgggtacaaa

SEQ ID NO: 586991 - DNA, 4001 bp, Homo sapiens
gcactccaacttgaatgacagagtaagaccctgtctctaactaaaaagaaaaaaaaagtgcataaaccatgagcttagagctcaaagagcattcacaccatgtaaccagtgtcccagaagcctctctcacgtccccttttcttgcagacttttagcaagggtctgatgcattgtgtgcactgtggactggttggttggggagagatgggaagctggtttagaggctgatgcagttgtccagactctaggccataggaggcagagaggaaggagagatgcgaaggatatgtgggagactgaactggcaggactgggctactcttggtgttgggggtcagggagctaggagcatccatttggctcccagccaccctgatggggactttgtaggaggcggcggtagagaggatggttctgtttgggctacactgagagtgggactgggggacatgggtgcttgtcccagaaggagctccccaccatccctccaaccccctcctctctctggctttacctgtgccctggtgtacaaagtctggttggggagaagatgaaagcctatctggatgcagacacagggatttcaacaccccattcatggggcccaggacagcccccagtggaataatcaccttttgtcctccttctgcctggactggggacagctgggagatgggagctgagaaccatgaggagggggaaagacacagtccagtctttgcttgttgtgggggggcacatagttatcttggcctccttttgcctcctggcctcagtgccacccacttctcaggctgctgggatactggccccccaggccagatcagcccccaccctggggacaggcaacttccagagaccctgccaggaatcctcagcttccccacctctatcccctgccacctcagcccaggcgtgagggagaaggacccccgatcctgatccccacagatttcaaatcccaggtgaccccagagccctctgccaagcctgcctcctaccctcccagctccaaggtgggcccctccagtctgctcctgcttcacgcccaagggaacactggcaagacaaggcttcatccctccctgtccttggtgattagggctcttgaaagccctcccatcccttcatatccctttcagagtccatctgttgcctacattttctacagtacagccggcagcctaacacagcggttcatattgcagcatcagctccaccatctcctagctgtatgaccttcaccttgcaaagcctcactgttctcatctgtaaaatggctttcgtgatccacttaccccttatcatttttgccaagttcaatgagcaaatgttttcacaaggcttagcccagtgtctggcccactctaggtgtggtagctattgttatcattactgtttctccatcgagactgcagacccttgagggtggaaaccagatctcattcagtggttgcccttggcacagggtggatactcaggaaatgtttgttgagtgactgaatcaaggtgatggctacagaatcatagaaaacagcagccagaaggggcttgggagattaacaaggacaatttcccatctgaccagtgggaaatggttgcctctctctctctctctctctctgtctcacacacacacacacacacacacacacacacacacatgcatgcacacgcacacacacacaaacactccagcaaaagtgaaggattcatacctgggggaatgttctgggctctttctgtcccttcttctacagtcaatccaagatcgaatcactttgtctgcccctggaagtttaggaggaggaaggatcttccaaatggaaatcaacacaggcgtttcttcttttctttccacagctggaaggtgagcagaggcaaagtccctgtccatggagctggctggtggccccagcctgtccccatccgaccttagggacagcaagaagcaaaggggagtggaggtggccggcaccagctggagcggccccagaaaaagggcacccaggtggaggcggagctatgtggttgggggaggcatggactctcaaggccaggcagcccctcctccccccacagcccccccaccccagggttcaggtttcaggaaggcctggataggtctccacccctttgcagggcagccaagcatcctgatctttggaggtagccctgatccagcccaggagtcccgcctgatgatgtcccgacccacatctcagctgagggtttggaaatggtcccaggagccacagtgtatggagtgggtttcccacatagacaggacctcacaacctcacttgggggctgctgattttgccttctttttttttcttttttcttttttttcagacagagtctctctctgtcacccaggctgctggagtgcaatggcacgatttcggctccctgcatcctccgcctcccaggcttaatcaattctcgtgcctcagcgcccgagtacctgggattacaggcatgcaccaccatgccaggctaattttgtatttttagtagagactgggtttctccatgttggccaggatggccttgaaatcctgacctcaagggatccgcctgcctcggcctcccaaagtgctgggtttacaggtgtgagccaccgcacccagcctaattttgccttcttgtgtagttcttttttttttttttgagatggagtttcgctcttgttgcccaggctggagtgcaatggtgtgatctcagctcacagcaacgtccgtctccccgagttcaagggattctcctgcctcagccttccaaagtgttgggattacaggcatgagccactgcactggccaaaaaaaaaaaatgttgagaagctcctgaggatcaaacaaattggggaccagtcccagctttttatggtgaggctgggaagactgaggccaagggaggaaaacaggtggcatgagtgtgggcccggcaggacttaatttcctgactcctggtcatgatgctgtttcctatttcttggaaaaagaaagtactagatgtaccaggcgaggtggctcatacctgtaatcccagcactttgggaggctgaggtgggcagatcacttgaggtcaggagttcgagaccagcctggctgacatggtgaaaccccgtctctactaaaaatacaaaaattagtcaggtgtggtggcgggtgcctgtaatcccagctactcgagaggctgaggtgggagaatcgcctgaacccgggaggtggaggttgcagtgagctgagatcgcaccactgcactccagcctgggcaacagagcaagactccatctcaaaagaaaaaaaaaaaaaaaaaagaaaagaaaatacttgatggaaggctgccatcaccatgctgcaaaatctccacgcccctgctgcccgcacctgtccttcctccctccctcctcccctggcctggggaagccccttccctgaagtccagattccattccttccgtcatctcagggacctctttccctccatctgcacatctatctgtcttccatgttcagctgctccttcccaatcagatttttcggttcctaagcaagctctcgtctttcccattaaagcaaacagtggccaggagtagtggctcatgcctgtaatcccaacacttccggaagcaaaggcaggaggatcgcttgagaccaagagctcaagaccagcctgggcaacatagggagaccccatctctataaaaaattagaaacatagccgggcatgatggtgcgcactgggctgtagtcagttacttgcaaggctgaggtgggaggatgacttgagcctgggaggttgagcctgcagtgagctatgattgtgccactgcactccagcctgggtgacagagagagaccctgttttaggggaaaaaaaaagaacgatgatgagttattgccacccacctatgagaatggttgaaaaaaaaatagttggtgatatcaaatgctagtgaggatatggagaaactgggttcctcacacattgctgat

SEQ ID NO: 586992 - DNA, 4001 bp, Homo sapiens
ggctcacgcctgtaatgccagcactttgggaggccgaggcgggtggatcacgaggtcaggagttcgacaccagcctggccaacatggtgaaactccatctctactaaaaatacaaaaattagctgcgcgtggagatgcacgcctataatcccagctactcaggaggctgaggcaggagaatcactggaacccaggaggctgaggttgcagtgagccaagatcgtgccattgcactccagcctgggcaacagggcgagactccgtctcaaaaaataaaaataaaaaaaatagcttagacctcttaattcatgatgaaatttttttggtaattttctaaagtagctttgcttgccaggccaaattcaatatacttagctagggagtctaagacacatataagctatcattattctaaatctccttttggcaaagtatttaccttaagaagcatttagactttagatgaaagttcttcaccaggaggtggtggttatcaaagagtctttgattagaatggaatccagctggcatggacataacaaaccttctccaccccatccgagctcatagagcattaagtcttaccactgccagcccaggcctatggctataatgctaaatgatggtggttttcttaatcatcagcctggtattaatggccagcaaggatatcatgtcagcaaattataagagcttggttacggctgggcgcggtggctcatgcctgtaatcccagcactttgggaggccaaagcgggcagactacttgaggtcaggagtttgagaccagcctggccaacatggtgaaaccccatctgtactaaaaatacagaagttagcagagcgtggtggcttgcgcctgtggtcccagctacaagggaggctgaggcaggagagtcacttgaatccgggaggcggaggttgtagtgagccaagattgcaccacttcactccagcctgggtgacagagcaagactccatctcaagaaaaaaaaaaaagagcttggttactcataatatgttggaagcatcacagtcctgataaagtgggatatctcattcttaagacgatggcattttagtggtgactttagttctgtttagtctagttctgcttattctgtgcagaaagcgtattgcttcattctaaaaaccccaaaatcctacagcatgtatcctatcaatatgacaactttcatatctttgattagaatcacatggctagaaaagggatttggaagtcattaaccagcagggaggtttatgccagcattacatagcagatggataaactgtaaacaatctgaatgtttcaaacttgcacaattttttggtgcaatcaaaatatagaaaattatgcagtcattaaaagtgctgctgagtgaatataatttaaagaagtatttctgatatattattaagcttaaaaagcaggatatgaaaatatatgcaatataatgccaaccatgtaagatcaaagatagagaaatggagagagatatattgggaaaggcagagaaaaaaaccaaactggaagaacatactccaaaatgttaacagtggttatctctgggaaagaggataactgtagctttatattttcctcttcatccttttccatattcctggattctccagaataagattgcattatttttaaaactaaacaacttttaaaagtagtttcatcaaagtatagtaaatgtattttatggaaattttcctagtgtacagtaaacatattatttaaaatgaaaaaaagatatcctacccagacagaagccctagagaagaacatcaggacaaatacgataacaaaataccaaagcaggaagctccctatggttccacaagagtcatccttccagcattcataatcctgatttggaatggcacaatttacaggtattgggggaggatctacctcccaaaataaggaaaaaaggtctcccatgatgactccttgctcagaaaataaaccatgcttaaagggataaagatgactgggaactacttcactccctctatgatgtatgacaatttccttggcaacctattatgacacatacttaagcaactgttctaggaactgacaaatgcttcttggacttctaagtttgtggaaggttattcaaattactcctctgaatgtttatgttattttcccccatacctcaatatggtgcattctgccttaattttttttcctaaaacttgtatatgctatattttcctatcttcacgtctaagtgtttaatgtatccactcattttaattcagtctcttttatatgtatcatgccattgcaaattatcatagacagttctaatgtattaccgatcaaactgtgttccctaaaattcatatgttgaagccctcacctccagtgtgactctatttggagacagggcctttaaggaggtaattaaagttaaatgaggtcataagggccctaatccaatacaattggtatccttacaagaagacagcaaggattcacgagcacagaaatcaaggtcacaatacaagggggccgtctgcaaggagacccgcctcaggagaaaccaaccctgctgacaatttgatcttagacttccagcctccaaaattatgaaaaaaataatttctgttgtttaagccacctgtctgtgatattgcgttatggcagccctaatacataatgctgtcatttggtcagtggtgttcttttttaagccttgaataaatgcacaacagcttatagattaagagggaaaaacacagatgtgcccgttatgaactactatgaactacatcaaatgcatacaatttcttcttaggaaagagtcacatatggagggggtgggaaaccggtattctaattttttttttttttttttttagcagggtctcactctgtcgcccagactggaatgcagtggcaccatcttggctcaccgcaacctcggcttcccaggctcaagtgattctcctgcctcagcctccagagtaattgggattacaggcgcatgccaccacgccctactaattttttgtctttttagtagagacagggtttcagcgtcttggccaggctggtctccatctcctgacctcgtgatccgcccgcctcggcctcccaaagtgttgggattacaggcgtgagccaccgcgcccggccggtattctaattttgattgcaccttgagccctttcactttgaacaattttccagttagttcatctctaaatctaaaactagagcaaaacaacattgctgctaaagcaatctaaaaatgataaaacttaacagctcttcaagagcacagcatacctgccgattttcattaatatacaataccacgtggtattaatcttaggatcattttaggaaaaactttggccattggacatacatgatgtaatccactagcttactgtggcatggcttaatgtttttattaggaggcacacttcagaacaagtccccaggccctgggtttctggctgtggactctaacgcgtcatctcctccaggaagctcgcgagagctggggctgggctggatgcgcctccttggggagcactgcatccacctcacctgccaccgaaatgcatctgtgggcctccgctggggttgagctcctctgggtaataaccaggaaggtcttattttctatatccgtgcgcctggctcagcggcacacttgtaggtatttgtgctaaataaaacaaagctcaaccttttcctcaggatgagcagctcttccaaaaaatacatacgaaaatgtgttattatttttaacctcaaaaccactagcaacttcaataaaacaaattttgggtgtgcttgttattgctgcaccctattaaacagattaagaatttaggccgggcgcggtgggccacgcctgtaatcccaaaaggcggtgggaggccagcaggcgtttgggaggctgaggcgggcggatcccttgaggttaggaaatcgagaccagactggccaacatggcgaaaccctg

SEQ ID NO: 586993 - DNA, 4001 bp, Homo sapiens
ggagcagccaagactgcccttcaggtaccagctgccccttcacagacacatttccagcctggatcagcacctcctcgggtcccatagtcacctggaccttgaggagatgcagagtggaaaagggggctggggctctcttcctcccctgtccagcctcctccctgtggctgccccatctccctccctcacccgctgacagtgtccaggctgggggcagcggtccccgggtgttaggtggacagcccaggtggagtccgcagcacccgccagcaggtaggtgcagcggcccaggaagtgatagtggcggccatcaaaggtgcggtagtggaagcccgaccaggaggcacaggtggccgagggacgctggtgctggctccagagctggcccacagcccctgccaggggctgcaggagggctggagaagaggcactgcctgggagagacacaccaactgtgagcctctgagtgtgaggcagaggtgaagggtgaggacacagggctcccggcacagcgggaggcaggcagacaggacatggtcactctagtgggccagggagccagtatgggccctgtagaagggcccagagcacaagaactccacatgggagtgcctggggaggcggaaggggtgatggccaggactgtgcctgtctggcaggctggagtctgtggacccacctggcaggtgtcggctggagcagctgcggcaggcctgggagctgccatcccaccagctttgtccccagggccgggcgcagcactcctccaggcttcctgctgaggcattagctgagcctgcctgtagctggcactgccacatggcaaagcagtggccttcaggactggctttggcaagggctgcggtaggtggggaggatggggcagacccaggcagtgaatatggggtagcctggagctctcagcccagccctggttctctgcctgaaaccacagatctgagctagcatcccctgcccaggactcccagaaggtaccgcgtccccaaacgcactcaggtgcttaccctcagtgcagtgggcgcccccccagcctgggcaacaagtcctcactgtccggttccacttggcaggccgggtttctggaggtctgcacccaccaagcaggtggaaacggggaggagatgttagcgttcagcccagtcccaccctggggaggcctggggacattcagttttgtcagctactctaatcacatcatttccccggccttaatttccccacatacaaagtgagaataatgttgggagggcagaccacggggattgggagcgggggttgggtagaaggagcaggcttcgggcctctccctgtcctgcccaccgtagcgcgcactcaccccccaccctaatctcacacgctccacccttctccaggcccactgcaaacctacttcccaaatgcctgcttcctccagagcctccccactctcaggatgtccggcctgtcactcctttcctgcctggcagacagcccaggctctcacccttactcacttgtagataggacagagcccaggcgctggggaccgggtaagccccgagcggccactccagggcaggtccagccgccagcccaggcggctgtaatggtcgaggctggcacagggtaccaggtcctcctgacggggtgccacttcctcctccacacggatggtctctgtccactcacaccaccgcctgcccatgatggggaaccacagctgctgccaccattccctctgtcaccaaaagccctgtcctatgacaccactcccaggggtggttattgaagtaaggaggatgctaaggtagggagagacactcatgggaagtggcgggggtggagggaggatcccgggggtggggggcacggagtctgatgccccagagggtccctgggcatgcggcagaaggaggacccttgtcagaggggtccagggtgggctgcttacccgtcagccagggcccacgccatcccaaagaggagggcagggagtagcatggtgccctcacccccagggcacctttggggaacgtgaggcttgggctcaagagaggcaatgctgcagagagggcagagaggccagcggtgctctctcctgccccacgcagcctccccgcagcccagtggccagttctgggggctgtggggggctttattccagtctcatgccccagggcaccagctgcccacaaccggattggacctgccacaccagcccctcagaggccagctctccctggaaacagtctccttcctgtccccttccagtgcatctgtttccctttgtgtgtgtgtgtgtgtgtgtgtgtgtgtgtgtgtgtgtgtgtgtgtattttcacactctcaggcactaccacaaattaacatggggctctgggcaagccaccctccatttctgggcctcaatttccttcccagtaaaaatttcagggacttcccagggatgcacaaataggtctcagactccagtaattctttgaaattgtatgtgcacatttttctgaagacagttctatacttttattagattctcaagagggccatgaccccatgaaaaggttaagagctcctgggctaaacgactgatggggtcttccagccttgaacttctgcctggatgatgctcccctgcctcccgcccctctcttgcccaaactgaggagtcgggggcagtgagtgggagcacttctagggtagctggggttcctgagtgtgtggagatgcgtgggcaacatgtacccttttctccagggtccagtttcttgctggggatgattatgtgtggctggttgggcccaccctgtctccttcttcgagggtctcctagagtctctggggtctagaactggggagcctatgctgaggaatgagaggaccctctggaaggagtgggcgggggagccagctcccccagccctggggcagagctaagccggatgaaataatccgagaatccggctgggaggggcagtgacaggctccacaggggaatccggggtccaccctggtcccagcagagctctgagcacacccggacacccgggctggaatgcagcctggctccgactccacacccctcggtctcctaaacctgatatccctccgagtatcctgtagagtcattccacctaggggaggaagggggctgctgttaaccagagctgggccgggctctccttctcctgggttcaccattggtcccagggccaaaaaagggcccagagtgagtctctcagggggtcacggatgactgggatcaactcctgctctggagtcctcagaaagagccacacgcacacccagacacccccctttcctgttttacacacatgcacactctcactgtaagtctcacaacaccggcacaggtgctcggccacaccccagcacgcacagtgacacatgctactccaggtgctcccttcatcctggaggcagaggagccttcacagctgagcccgagtgatgggcgctcttccaggcactcatccttgtggtgggctgtggtagcaggagctcaagggccattcacaccctccccttcccagcctcactcagctctggattcaaaccggggctgatcaggcagcactgggattgggaagagacccgagttgcagtcaccctttcccgtaaaggggcagaagggaggaagctggaacccaggggtttggagaaagttcatggagaggagaccgggaactaacagtccagacttcagcatctccggagctttcaggagtgggcgcagcgggaacaaggccaaggagaaacctcgtaacctgggcagggagggcgagtggagtcccctgaggagctggggctgagggctgagggctgagggctgccctccacatctaactccaggtggtgtccgggccagcaggccccccagcaatcgtctcccgcccatagagccctcccctctctgcagccccctcccagaccctcccccggaccccgccctcagaatctccgcccagccccgtcccagcctt

SEQ ID NO: 586994 - DNA, 4001 bp, Homo sapiens
tacaagaaataaaatgtgttctttaaaaattacccaatctgtggtattctgttacagcagcacaaaacagactaacactgttaccaacaaatacgtaattccattaaaacatatattcaaacaacttcttaaaggtatagaactttgagaccagaaggtatcctggagacatacttgtctaaagcgaagaagacaatattgcgacaagcagccatccaaaaagatgaaaagcgagaaagccatggtctttccgatgacagactcaaaagggctgagcagcacctattcaaatggtgagacaattctagagtgctgaatcctatccgcctcccagggacacgatcccgagggatactacaaaacaaatgtaaatatgaacatgagttcaagttagtaatcaaaatacttaagttagtatctgaaaggtacaagtttcctaacaaaatgagtacattatctcaagcgttttaaaaagcgttttaatgcagctaaacacctgaggaaaatgcatttccagacttgcactcccagagtatggagattaacaagggaagatatatatgtgtacatatgtatatatcttcaggactgtaagaatttcccagtactgtgaaattaaaatttaaaacaaaaacaaaaacactctaccttgaaatttccagatttaaaggactgtaacccttagctcgaaatttactttgtgtttcggaactctctggagtgttaaggctcgtgtgttttctttgcgggtgtttttttaacgactcagtgggctggctccaagtttgtgaagatcctgttaattacctcctgcatttaccaccgaccaaggatgggaggcacgcggcacttgctgagcatatgtagctttacagggaagggagacgagcaaagatcactgaaaactgcaaccgaaaccctcagaaattccagctctcccctcttccctccggtcccttcgacaatccatttggtgacctgacacgtcatccatacactcccaagagtgccttcgggaacccctctccccactacccaaccagagagacagccccacgcccggcaagacgcaactccgggccacggagggcgccgcccggacagcccggccgggtcagggggcttcgccgccgagcaccctccggcagccgccctcgggcctccgcggccgggcgggagggcgcctccccgaccacacttcggccgcttggcacccacagccgggagggcgtgaggaaggactcggtctaactccggggaaccctcggagttccggcgcagacacccgagggggtgtcctgggaactccttcgcccgcgacacccgttcttctccgtctcccgaccaccagcgacgcagcagggcggctgccggcccggcccggcccgccttgcgggctgtgcgcggcgcagctcttcctccgcggggccgtgaaggccaccggccgcccccgcgcgcccagctgcccggccccgccgcctaagccgccgcgttgctggcgggtagccgcgggcctccggtgcgcgggccccggcgcgtccccgagcgcgcgcctggccgcggccccgcgcgagttgcactaactttccggggcgggggaggggtgggcgccgcgggcccggctcccaggccttacctgtgctcaagttgtcgttgattttcaaaggcacccgcaggatgtagaccaggaatagcacgatgaagaaccacacggtccacagatacgtccaagaccaaactatgcaggacttgagctgctccagaaagcccgtggccgcttcagccatgtttcagcgctcctctctgctgccgcggctcttggtgtctgccgggatgattcaccggcccggaggcgcagctcgcgccgccgccgccgccgcggcccgggcgcccccggagcccgcccgccgccggggacgcgggctcggcgggaaatcgcgcgggccgcgggcgcgccggcttttccttctccagccttattgctaactctctaaaggtccctacaagtggctttcgtggagcgatcacgtggcccctgccccctcgcgttctgggtccatttatatttattatgctaatatttagaaagagaaggccaagtggcgcgccgaaggaaacgcctcaggcagttacaacccgcataagttgagcgtttaccacacgccaggcgctgctccacgatccgtacaatctcatttaacccctgcaacaattccccactacgatcctctttctataggtagggaaactgaggctcacagcagctgcgtagtttaccttaaggtggaaccaaaattcaattgcagtggtgtattctggggtccgaggtcttaaaccctactctgctcccttatcaggattcaggctcagggaatgaataaacccgggacagctaggagaagggaggaggtgcgctcctgtcgccggctagtaggcctgaagataaatcactctattcagcaagatttgggtggcagatgctatttacctttgttctgtctctttgaagcagcgcagggattttccagagaaatcttgacagatgaatgtttatcctccaggttttttggtgatcagaggtcaaactattctcagcctgtttttaatataaacaattctctgggataattttgactgtgaaacggccacctctaacagaaagtccattttaaacattgttttgttgtttttgttttgttttgactgtgctgaataaaatgtttcttttattctaaaatgttttctcagctgaaattttcaagtctgtttctgtccgtaagtgatttgactttctatgtattagatggtaatgaggaaattgcaggttttccagtctacatctatttttaaaattctgagcataaagaatattttattataaattgttttgcttacttgtataatagtttccttcataattaaataagctcctttaacttttcacatatagggcctattacggcatacataatggatggaactactcttaaatttttactaattccagcctctctcggctactgtttcttcctcacatttgatctactacagtgagatccaggccagaataagtgaaattggcacacatagactttctttatagttatttatggcagcacatgaccaaatgatttttgtgtctaacactgatacatggaatctcagtaaaataaaacaatattgtcaccagtaaaggatcgtgactgcaggttgtccaggttcttggcgttttgaacaaagaattggacaaaacacccagagaagcgacaaaagaacgaaagcagggatttattgaaaacgaaagtacactctacattgtgggagcgggcggagcagcggctcaaaggccgaatacagaatcttcttgggtccaaatacccccaagaagtttccctttggcaactcatgctcatctcacgtaaatgaagtggtagcccgcaatcagtctgactggttgcagaaagcagccaaccagaggctgaaatgaagatacaaaggtaacactcctgtgcaaacatctgattggttgcaaaaaacaaccaatcagaggctgggatgtacttaatgaagttatgcttctatgcaaacgaagactcgcccacagtctgattagttgtggacaacaaccattcagaggctggagtgaagttacaaagttgcaaatgaagattggacccgcagtcagtctgattggttacagacagccaatttcccatctactaggcagaaaaggtcaaaggtagcctctggtccttttgttacttaggcgtggaaagttagggttttcctttcaatgtagttcaaggaagtccttagtttccctgcctccagaacctagtctcctgcctcaacatgagtacatgaaccacctattttatgtgatgattaaataacccaccagattctctgcgagtcactgaattaggatattgactacttaatttaaatgaacatccggaggcctggctttttgctgtcaatgaacttcaatgaatggacat

SEQ ID NO: 586995 - DNA, 4001 bp, Homo sapiens
ctgacctaaggcatcaagggattaagcacaacaacaccccagaaactggccagcaggtttggagttgctctccaaaagctgaggaagtcacacaccagggtagcttcagacacatctctctctagaggctgtggaagtgcaaactgcctactgcaaggaaatttaactcataggtattttctttaaaaaaaaaaattgcacactgggtgtggtagatcatacttgtaatcccagaactttaggcggctgaggcgggaggactgcttgagcccagtagttcaagaccaatctgggcaacatagcaagaccccatctctacaaaaaataagcaaaaactagctaggtgttgttgcgcacacctgtggtcccagctactcaggaggctgagacaggaggactgcttgagcccagcagtttgagaccagccttggcaacatgagacacacccaaaaaaaaaaaaacaaaacccaagcaaggtacacaccagggcagcttcagacacagccctctctagaggcttcagaagtgtaaactgcctgctgcaagggaatttaactcataattaaaaaaaaaaaaaaaaaggcaaggtgcccagggtggctcaaacctggaatcccagcactttgagcagctgaagcaggaggactgcctaaccctacgagttcaaaatcagtctgggcaatatagcaagatcctgtctctacgaaaaaaccaaaccaaaaccaaaaaaactagccaggtgtggtggtgcacctgtagtcccagctactcggcagaatgaagcgggacgatcgcctgagcccaggaggtcgaggctgcagcgagctatgactgcaccactgcactccagcctgggaaacagagcgagactctgtctcaaaaaaaaaaaaaagtaatgacaaataaataaaataaggcaaagagtggacctaaagcaccaagggattacagacaccagaaactgggcagtgggtttggaattgctctccaaaagccgaggcgtggtgcacagtgctcccgcctataatcccagtactttgggagggcgaagcgggagcatcgcttgggtccaggaattcaagatcagcctgggccacatagcaacgccctgtctctaaaaaaaaaaaattaaatggaaaaaaaaaaaaaagccaagcaaggcagacagcagggcagcttcagacgcacccctctctggaggcttcggaagtataaaccgccctctgcaagggaacttacaggttttttaaaatgaaataaaaaaaataaagaaagaaataagaaaaaaaatacaagaagaccccaggctttcgtttccagaggactagcacctgattccacctggaatggaacaggaggctcttaaggatttgggggtggaggcgccatgagaatagggctggaaacgcaaaaggaggaaaggcaggtgcgcgtttcctatttttccagaaggtaaaaatatctacgactgcccctggggtaagcggctccaggataaagagccttccaagcgcttaagagaatggactctcagtctatggaggcctggggagaggattctccagctctgtggcggaggccattggggcacggcccgggaaggctcctagtgtcagggccgggagggtcgcgagagggcctattcttgggtcaaggagaaacctgtcagagcctggaagagtgacttctggccgagcagggttcagggaaggtccccacctcaggtccctcgggtgtctctggccaccccaccttccacacaggcgcccgccgctgcccttccgggggcgaaagattccagaaaagcgcgggaacgtacaagacacgctgtgcgcaagcgcaatcccaacggctcgcccagggccagtagctatcgcgaggtttggaagtgtgcgagctgatgcgcgccacgtttgagtcacgccgctccacagcctcgtgtggcctcaagctctcaggcgtcctgccctctcacgtgggcttgggcacgcgggcggcccgctttagccccgcccccacccaggtcccacccccgctaccctcaatctcctactccattgggcgggttttggaccagactgctagtaacccctttaatctggcttctcaattgccataggctaggttccacccaggccccgccttttgagccggatcgccacgcccccgagggagaccacgcccctatttcaccaacctcctgagtgccagccgggtcccgcccccctgccgagcttccgcgctacattggcttaatttcttccttgcccccgcccctgaagccggctccgagccattattggcggggccccgcctcgggccccgccccctgtccggctccccgctcccattgtctcggcagatgccgcctggtccagctatcgtgctcggtattcagttttccggagcagcgctctttctctggcccgcggagcggtcccgcggccgagtaccggattcccgagtttgggaggctctgctttcctccttaggacccactttgccgtcctggggtggctgcagttatgtccgcgctgcgacctctcctgcttctgctgctgcctctgtgtcccggtcctggtcccggacccgggagcgaggcaaaggtcacccggagttgtgcagagacccggcaggtgctgggggcccggggatatagcttaaacctaatccctcccgccctgatctcaggtgaggagaaagaggaagactagagaattgggggtggggggcgggggcggggcctcctcatctcacaataactctcttccttttcagagtgaccgttatactaatcttttcatcccacagtaatgtctgttctcctcctgtaacttccttaccgggatcacaataaccctcctatgcaaagaatagcgctcttactccatccccaccccaggaatcccctcctcctaattaacaccccctatgtgtttctttcttcacagccatgttctcctcgctgtttctattagccccttctatgagaatactttattgctcaccaagtaaccccacccttccaagccccattcttcatcccctagaagctgttctccaagtccctcgaggtctggggtgtggacattggggagggtcacctgaggacactctgaccactgacttggccctcagggcagctgttaaatagatgatcccgtggctaatgggagtgaacttgggatgggtcaggagacaataaggtaggggataggttcaggtagggaagagggtgcagacaatagaaaagagaccaggcaggtagaagagaaggcatagtccccagagataggcgggaaatggaagggattttaggatatcacttcccaccattccttcacgtctcctctgtccaggtgagcacctccgggtctgtccccaggagtacacctgctgttccagtgagacagagcagaggctgatcagggagactgaggccaccttccgaggcctggtggaggacagcggctcctttctggttcacacactggctgccaggcacagaaaatttgatggtgaggacctggggtccccaaactcagcttcacagctcctctcggtgcttaggaccccagcaaggctcctgtccccactccttactccatctgtgaagactccatcccctcccagcccgcccaccccccagactctgtctccagggccctgccctcccccattccctgtctgccccatctctgagagttactcagtttctgattcacttgtcttttctcttctctcccatctcctcctgcctctgcctgttcacttttctccccattctttggcctgacctgccttccacctgttccctgcatttgctgcagagttttttctggagatgctctcagtagcccagcactctctgacccagctcttctcccactcctacggccgcctgtatgcccagcacgccctcatattcaatggcctgttctctcggctgcgagacttctatggggaatctggtgaggggttggatgacaccctggcggatt

SEQ ID NO: 586996 - DNA, 4001 bp, Homo sapiens
aaataaataagacaaagagctgacctaaggcatcaagggattaagcacaacaacaccccagaaactggccagcaggtttggagttgctctccaaaagctgaggaagtcacacaccagggtagcttcagacacatctctctctagaggctgtggaagtgcaaactgcctactgcaaggaaatttaactcataggtattttctttaaaaaaaaaaattgcacactgggtgtggtagatcatacttgtaatcccagaactttaggcggctgaggcgggaggactgcttgagcccagtagttcaagaccaatctgggcaacatagcaagaccccatctctacaaaaaataagcaaaaactagctaggtgttgttgcgcacacctgtggtcccagctactcaggaggctgagacaggaggactgcttgagcccagcagtttgagaccagccttggcaacatgagacacacccaaaaaaaaaaaaacaaaacccaagcaaggtacacaccagggcagcttcagacacagccctctctagaggcttcagaagtgtaaactgcctgctgcaagggaatttaactcataattaaaaaaaaaaaaaaaaaggcaaggtgcccagggtggctcaaacctggaatcccagcactttgagcagctgaagcaggaggactgcctaaccctacgagttcaaaatcagtctgggcaatatagcaagatcctgtctctacgaaaaaaccaaaccaaaaccaaaaaaactagccaggtgtggtggtgcacctgtagtcccagctactcggcagaatgaagcgggacgatcgcctgagcccaggaggtcgaggctgcagcgagctatgactgcaccactgcactccagcctgggaaacagagcgagactctgtctcaaaaaaaaaaaaaagtaatgacaaataaataaaataaggcaaagagtggacctaaagcaccaagggattacagacaccagaaactgggcagtgggtttggaattgctctccaaaagccgaggcgtggtgcacagtgctcccgcctataatcccagtactttgggagggcgaagcgggagcatcgcttgggtccaggaattcaagatcagcctgggccacatagcaacgccctgtctctaaaaaaaaaaaattaaatggaaaaaaaaaaaaaagccaagcaaggcagacagcagggcagcttcagacgcacccctctctggaggcttcggaagtataaaccgccctctgcaagggaacttacaggttttttaaaatgaaataaaaaaaataaagaaagaaataagaaaaaaaatacaagaagaccccaggctttcgtttccagaggactagcacctgattccacctggaatggaacaggaggctcttaaggatttgggggtggaggcgccatgagaatagggctggaaacgcaaaaggaggaaaggcaggtgcgcgtttcctatttttccagaaggtaaaaatatctacgactgcccctggggtaagcggctccaggataaagagccttccaagcgcttaagagaatggactctcagtctatggaggcctggggagaggattctccagctctgtggcggaggccattggggcacggcccgggaaggctcctagtgtcagggccgggagggtcgcgagagggcctattcttgggtcaaggagaaacctgtcagagcctggaagagtgacttctggccgagcagggttcagggaaggtccccacctcaggtccctcgggtgtctctggccaccccaccttccacacaggcgcccgccgctgcccttccgggggcgaaagattccagaaaagcgcgggaacgtacaagacacgctgtgcgcaagcgcaatcccaacggctcgcccagggccagtagctatcgcgaggtttggaagtgtgcgagctgatgcgcgccacgtttgagtcacgccgctccacagcctcgtgtggcctcaagctctcaggcgtcctgccctctcacgtgggcttgggcacgcgggcggcccgctttagccccgcccccacccaggtcccacccccgctaccctcaatctcctactccattgggcgggttttggaccagactgctagtaacccctttaatctggcttctcaattgccataggctaggttccacccaggccccgccttttgagccggatcgccacgcccccgagggagaccacgcccctatttcaccaacctcctgagtgccagccgggtcccgcccccctgccgagcttccgcgctacattggcttaatttcttccttgcccccgcccctgaagccggctccgagccattattggcggggccccgcctcgggccccgccccctgtccggctccccgctcccattgtctcggcagatgccgcctggtccagctatcgtgctcggtattcagttttccggagcagcgctctttctctggcccgcggagcggtcccgcggccgagtaccggattcccgagtttgggaggctctgctttcctccttaggacccactttgccgtcctggggtggctgcagttatgtccgcgctgcgacctctcctgcttctgctgctgcctctgtgtcccggtcctggtcccggacccgggagcgaggcaaaggtcacccggagttgtgcagagacccggcaggtgctgggggcccggggatatagcttaaacctaatccctcccgccctgatctcaggtgaggagaaagaggaagactagagaattgggggtggggggcgggggcggggcctcctcatctcacaataactctcttccttttcagagtgaccgttatactaatcttttcatcccacagtaatgtctgttctcctcctgtaacttccttaccgggatcacaataaccctcctatgcaaagaatagcgctcttactccatccccaccccaggaatcccctcctcctaattaacaccccctatgtgtttctttcttcacagccatgttctcctcgctgtttctattagccccttctatgagaatactttattgctcaccaagtaaccccacccttccaagccccattcttcatcccctagaagctgttctccaagtccctcgaggtctggggtgtggacattggggagggtcacctgaggacactctgaccactgacttggccctcagggcagctgttaaatagatgatcccgtggctaatgggagtgaacttgggatgggtcaggagacaataaggtaggggataggttcaggtagggaagagggtgcagacaatagaaaagagaccaggcaggtagaagagaaggcatagtccccagagataggcgggaaatggaagggattttaggatatcacttcccaccattccttcacgtctcctctgtccaggtgagcacctccgggtctgtccccaggagtacacctgctgttccagtgagacagagcagaggctgatcagggagactgaggccaccttccgaggcctggtggaggacagcggctcctttctggttcacacactggctgccaggcacagaaaatttgatggtgaggacctggggtccccaaactcagcttcacagctcctctcggtgcttaggaccccagcaaggctcctgtccccactccttactccatctgtgaagactccatcccctcccagcccgcccaccccccagactctgtctccagggccctgccctcccccattccctgtctgccccatctctgagagttactcagtttctgattcacttgtcttttctcttctctcccatctcctcctgcctctgcctgttcacttttctccccattctttggcctgacctgccttccacctgttccctgcatttgctgcagagttttttctggagatgctctcagtagcccagcactctctgacccagctcttctcccactcctacggccgcctgtatgcccagcacgccctcatattcaatggcctgttctctcggctgcgagacttctatggggaatctggtgaggggttg

SEQ ID NO: 586997 - DNA, 4001 bp, Homo sapiens
aaaaatatatacacaataaattactgcaatgatttcataaccaaaacaaagcagaaagttggctagagtttatgagtatcactaaaagaaaacaagactctgcagtacacaaattatctttcccttgcctgcctgtaaggctcacatgggatacaagatgatccaatccctgtacacctctccagtgtcacctctgaccactgtctcctcacctcaccctcccctaggttcactcagctccagccacacgggcttccctctgtccctggaacatgccaagttcattcttcctttagctcctttacactgtttatatctgcctagaaacttccagcccattttctcatggctgactcagctaaacattcagctatcacccaaaatgtcacctcgtgttacctccttagggaggtcttccctgaccatcccatttctccatacaacccagtcactctcaaactctctacccagtagtatcttttctgacatttattcctatctaaacttgtctctttgatttacatgtttattatattctccaacaaaagttaaagtctttgagggtatgggccttatctaaattgctcactactcaatctctaaaacctaaaacaatgagtggcatagacaatcactcaggcaaactgtccattgaataaatccaaatgatgttaatcaccatccttctgtgaacataagtaaggtaatatccctcagaggctgtttcatttcatttctttcatgcagttttaggcaatgcaataatgcagttttaaaagaccaatgtttgagacagttagattttaaagacagtgacttctacacgacaacatattgtatgttttcattttatgaacatgaataatccaccaccttatcagaatccatcaataaaacaaggataccataagtcgttttgtgagatcctgcttctagaaagaggcgtatgggtagatatggtatacagacgggaattacctttcagaattcttcctaacaaggaaatgtggcaaactggactaattccagtaaagatttaattagacccgttacttggttaccttgctaaacttatccaaactagtactgtgtcaagtgatgaattcagtgattccatctgtgaaatagaagacaaatgacacagtgaacaaagaaaagttccacaatgtccacccatgtttgaactaaaagagagggggaaaaatccctaaccctaaatcaaaagtattcaagcaactaagatttcaaacaatggcgagatatctacgagtaggtgaagcagttaactgaaaccacagggagaacattcatgattcgtgctttctttcttttttttttttttgaacacgacttttctcaatgaatagaagagactcacaaccgcctgtgtctggacaacccacgcattacacccagtcaccaattcttggtccttcttgggggcccatggcgccagcccggggccgaccccaccggggactcctcagggtccgcaggctggaggaatgaggacactcccgctacctatatccatccctgaatcccggcccacgccgtgggagcagcggggctcagcattctgcaacttcactcttgtgtccattatgagcacagcctgcctcgcccctcctcctcccctggaggctcgcgcaggactcaggaaacagaacaggaccaggatatggcctccgtccgcgggtcccctgtacgcccccatgtaagtcatctgacccaggagactcagttttccaacctgtcaaataggggaacgagaaacccagcctaccttaacgggtggttcctggccggccgccccaggctggcccgggaactgcggatccgcggtcgcgccccggcctgaggggcggggcttggcggggcgtgaccgggacccagtccagcggacaacgcgcagcccaccgcccgcacccagcagccccgggacctccggcccgtgacgtcagcacgctgacgtcgacgcacacagctcgcatctcgctcgagggaccaaagacccgactggttcctgagtgcctccatagaggagccaacctattggccagatgacatgtcaatcttctactgaccagtaaacgacgcgggaaggagggagagggcgagccggtctgcctgtaggaatgggtgggaaatctgggcatccagctttgaaacacggagctggttggactttcccgcattgtgcatcgcacggtttaacaagcgcccgcttcctcttcgtccgcgtttctgcgccttccgcttcccttcagttattcggtgggggtttatgctccagctcgtgggaaaatgtcatggaaatgggtttcagggcctcttgggcacctcatgctgagccctccaggaataaaaacagggcataccatttctatgtcggtactcagctcaagagtcacctcttctaactctcacttcccccagacctatttaggataccttttctcagcgctcctagttcataactaacatctctaagcggtagtcacatttaattatatctatatgtctgttttcacacgaagttaggcaccttttattgttttatttaaaatttaattaaacttttctcccaacggatgctacacttattcacatttttagaagtacagaggtatacagtgaacattctttggatccccatttcattatttgtatatttttccaaagtcattctaagtaccgttattaattttaaattacacaagtaagattttgtccatgcgaaaaaaaaaaaaagcttaaacgttacaattatgcttatatcccttttaggccctaattacaaacccagtctgtagatgatgactcctagttcctgtgcatttgcaagtgtagatgttacttttttacacttagcattgaaatctttccatatctgtatataaatctacctcattctctgaaaatgctgcatgtcctcagaaccaatatgtgtatatatatacatacataattaatgtaccattcccccaccctcacgtttgtttattaatattattatgagaagcaatggtaccataaatatatatgtagatgcctttttgtacttaggtccaagtatttctctagagtgcagataccaacaagagaatgtactggatcacagagtttgcacgatgtaaatccttaatagatttcactgatttgctcccctgagtagttgttttaacttacattcccactgctagtatttgagcaatttttccctgtatcctcgccaatactgataaaatacaatttaaaaaaattttataaactgatagatgtgaaaaccttttaaagcataacacatatacaaaataagtgtaataatcataagtgcttgtcttagtgacagtgtgaacaaacttgtgtaaccaccgcctcacagcaaaattttaaatgtttaccagcaatttagaagctttcctcatgctcagtcttagtcattatacccctacacacagataggcacaattctgaatcctaccacccaattagttttgcctgcttctgaatgtttataaatagtcatacataatacgcactcttatgtggctctttttgcttaatactatatttgtaagattgatccatattcaagaatataatagtttcattttcatttttgtatataattctaaaatttacttgcctattctactgttgtttgacattagattatttaaagtttggggtaattacaaatgacgctgctatgaatattcttgtacctgtcttatgatgcacatagttacacatttgattttggaagatccctggaagtagtgttactatgcacagggtatatattcaatatattcaacattaatagacactgccaaatagtttttaggttttactaatttatacatgccctagtcgtgaatgaaaatttcagttactctgcatctttgccaacacttactatactcatttgtgttttgtgttcttcctttttcttttcctttttaaatgttatacattctggtgaatatgtagag

SEQ ID NO: 586998 - DNA, 4001 bp, Homo sapiens
ggtccaatcacctcccaccagaccccagctccctcactgggggttacatttcaacatgagatctgagggagagacacagctccaaaccatatcaccaacataatagtttgtggggtgggggagggaggtgctaggaatggaagtgtcacctactataatcaaatgtaagaaataattcactatgtttagaagatcttttaactttgagggttgcagtatcgtaaggatgctaacaaatccacctacatttattcaatatgaattcattaactatattgtgaacaacaatgtaaggcaggaggaatgcaaagttaaatgagataaagcctctgctctgaaaaaccttgaggtctaggagagaaggcaggcatttcaactgcatggtagagcgatgtatcctagaggaggataaagttttacaggcagatggtggcatgggaagggaagtagaggaaaaggctcagcgctgtcttctagacccagtcctggggtagctagcaggttggcagtgtttgctgactgatggccactacaaacggagtctgggtggaaaaccagagtggccctggagagttacccagccatttgtctgcatggtaaggagaccacactcaagagcaaagccaaggaaaagcccatgacagtgaggaagcttgttgactgtgtggcccacagtcaactctatgcccataagccaggaaaataaactatgagtcaaataaatttgttggtttccatcagacattaaccaaaatgaaatttaagttctacagtaaaatcttttcataaaaagaaaaataacagaaaacaacctggtgttaaaatgttaggaactccagaattcgacccaaagttctctttcacccccttttaaaaaaagtgaagcatatttctaatgcgactgctgttttgctgtaccaggatggctgccctggtgttcctaaatgttggcacagcccaacttactcatgtttatgtcccgcagttgagaatatgaagaaacccaatgcctggaatacactgtgggttgcattgcatttccaaccttttatactttcaagtgcacacttgttttacatttaactaagtgaagtcgagttttttgtttttttttttcactgggctgtttttaagcattgctttccctctgtgcttaacattcatgttaaatgaataaccttttattacacgtcaggatgtggagggaaatgtattttacaaaagtaacaaagtaagaaatttggaagtgtacaaaaaatttatgtctacaaacaccttccagtggatttgaccagaattacatatttaaagccttgattgactattttggagggaacctgaaccccacccagatcctgaaagagtagggccagtgttctaaggactaaaaatgaaaacctctgttaccaggaaacccgaagacgagaagtagcacgattttaagtactgtgcaccagtcattcgtcaatgcacagcaaactctggcaactttgccacgttaaaaaacttgccatcaaaatccaacctgagcacaaacttaataatctaccacaaccttaagcccctagcgaaaaggcttcctgtgagtccctggctctccccaacccccggcccggccacaacccagctgggctggaaggcagcgcgccccagagccgcgcataagcggagaattgagcagcgctcgcccaggagggccgctgtccaggtcacgagaaggcttgcgacccgctacacccctcccaagactgggagcgggcgcccagccttgcagggacacgcgggcggactcgaggagcaaacggccagtgagaacgattcaagggactcacccactcttcgccttagcttgaccgtgagtctcggctgccgctgctgcccagaggtgcgggccccacgcggcgcctgagcctccagagcgcggagcctccaagccagctgcaggccccgcctccttgtccgttgcgcgtccagcgccacctgctggcgccccgcgtccgcagggttccggaacgtccttggaggctaagactccccaagtcgcactccggcctctcccagtttcctctcaaatgccgtctgccctgcacctgaggtccgtttcgcgccctccaacccctcgccttttgtttaatctccactaaggaacgtttgtgcatttctctagagcagtggttctcagactttagcgtgtataagattacccgggggcttattaaaacaccgattgttgggctgtccgcccacagtttccggttcagtatgtctgggatggggtctgagattctcatttgtaacaagttcccatgagatatggaagcattcccagatcacactttgagatagaccgtttagagcttacaaaccctcccacacgttagcttatttatttttattttatttttattttttttgagacggagtctcagtctgttgcccaggctggagtgcggtggcgcgatcttggctcactgcaacctccagccccgggttcaagcgattctcctgcctcagcctcccgagtagctgggattacaggcgcctgccactgtgcccggctaatttttgtattttcagcagagacggggatttcaccatcttggccaggctggtcctgaattcctgacctcgtgatccacccgcctcggcctcccaaagtgctgagattacaggcgtgagccaccgcgcccagccaccttatttaaaacctaacagccggtcctgaagtggctgtgattgacagtttgaggaatccgaagctgaatttctgagagtgacttgctccctgaattgttcaaattgtgtacctttaatcgcacaaaccctgctccccagccgaaaaaaaaacccttaaaccccatgtttactccgtccctcccttccttgccttagcttttaagtgcagcttcccatatcctagctcaatgaagtattccaaacctaaagtaaagttaactgttaatattccaaggttttagaaaaagacaacttgagcaggggatttacttctctccgttggaaccagcctcaagatagggtctgagacatgaattgcaaaattctggggatttggtatacaacattctcaggactaagctgagtagaaaacacaaaggaaaataaacgcgcaaccacattttccatgattgttttttattcactgctagggcaccgaagactgttcatgttttttttttttttttttttttttttttacttttttttttttaattattattatttttttttattgatcattcttgggtgtttctcgcagagggggatttggcagggtcataggacaatagtggagggaaggtcagcagataaacaagtgaacaaagttctctggttttcctaggcagaggaccctgcggccttccgcagtgtttgtgtccctgagtacttgagattagggagtggtgatgactcttaactagcatgccgccttcaagcatccgtttaacaaagcatgttttaatataagtattttctgtagtcactgactttccttggattagtttaaagccctttgaagcttaaattaccgtggactgacaccttgtggtggaaatagaatcttacacctgttgtttctagtgaaactagaaaataatttaaaagttttagaaaagaaatctgtgtaatctttgtatgtgtagcacagactacaaagaattaagactttttaactaagcattgttgagttttaaaagtgatcatgggtcttaaatggtcagacaaaacgatatgcttttattgtttaacatttggtagaacaaaggtcattctgtttttcacaatctattttccatatgaaaagggcaaagagttattattgtgttaacataataatatatattcatatgaatatggctatatagcaagctgcacttaaaactgcttttccttttctaattaaaacatttaaaatcaaaccccaaatatttttgttttataattagactttagcaattttatttctgcacttcttataaaag

SEQ ID NO: 586999 - DNA, 4001 bp, Homo sapiens
cgatcacctcccaccagaccccagctcccgcactgggggttacatttcaacatgagatctgagggggagacacagctccaaaccatatcaccaacttaatagtttgtggggtgggggagggaggtgctaggaatggaagtgtcacctactataatcaaatgtaagaaataatccactatgtttagaagatcttttaactttgagaggtgcaggatggtaaggatgctaacaaatccacccacatttattcagtatgaattcagtaactatattgtgaacaacaatgtaaggcaggaggaatgcaaagttaaatgagataaagcctctgctctgaaaaaccttgaggtctaggagagaaggcaggcatttcaactgcatggtagagcgatgtatcctagaagaggataaagttttataggcagatggtggcatgggaagggaagtagaggaaaaggctcagcgctgtcttctagacccagtcctggggtagctagcaggttggcagtgtttgctgactgattgccactacaaagagtctgggtggaaaaccagagtggccctggagagttacccagccatttgtctgcatggtaaggagaccacactcaagagcgaagccaaggaaaagcccatgacagtgaggaagcttgttgactgtgtggcccacactcaactctatgcccataagccaggaaaataaactatgagtcaaataaatttgttggttttcatcagacattaaccaaaatgtaatttaagttctacagtaaaatcttttcataaaaagaaaaataacagaaaacaacctagtgttaaaatgttaggaaccccagaattcgacccaaagttctctttcacccgcttttaaaaaagtggagcacatttctaatgcgactgctgttttgctgtaccaagatggctgccctggtgttcctaaatgttggcacagcccaactgactcatgtttatgtcccgcagttgagaatatgaagaaacccaatgcctggaatacattgtgggttgcactgcatttccaaccttttatactttcaagtgcacacttgttttacatttaactaagtgaagtcgagttttttgggtttttttttcactgtgctgtttttctttttaagcattgctttccctctgtgcttaacattcatgttaaatgaataaccttttattacacgtcaggatgtggagggaaatgtattttacaaaagtaacaaagtaagaaatttggaagtgtacaaaaaatttatgtctacaaactccttccagtggatttgaccagaattacatatttaaagccttgattgactattttggagggaacctgaaccccacccagatcctgaaagagtagggccagtgttctaaggactgaaaatgaaaacctctgttaccaggaaacccgaagacgagaagtagcacgattttaagtactgtgcaccagtcattcgtcaatgcacagcaaactctggcgactttgccacgttaaaaaacttgccatcaaaatccaacctgagcacaaacttaataatctaccacaaccttaagcccctagcgaaaaggcttcctctgagtccctggctccccccagcccccggcccggccacaacccagctgggctggaagacagggcgccccagagccgcgcataagcgaagaattgagcaccgctcgcccaggagggccgccgtccaggtcacgagaaggcttgcgacccgctacacccctcccaagactgggagcgggcgcccagccttgcagggacacgcaggcggactcgaggagcaaacggccagtgagaacgattcaagggactcacccactcctcgccgtagcttgaccgtgagtctcagctgccgctgctgccgggaggtgccggccccacgcggcgcctgagcctccagagcgcgaagcctccaagcctgctgcaggccccgcctccttgtcagttgcgcgtccagcgccacctgctggcgccccgcgtccgcagggttcgggaacgtccttggaggctaagactccccaagtcgcactccggcctctcccagtttcctctcaaatgccgtctgccctgcccttgaggtccgtttcgcgccctccaacccctcgccttttgtttaatctccactaaggaacgtttgtgcatttctctagagcagtggttctcagacttcagcgtgtataagattacccgggggcatattaaaacaccgattgttgggctgtccacccacagtttccggttcagtatgtctgggatgaggtctgagattctcatttctaacaagttcccatgagatatggaagcattcccagatcacactttgagatagaccgtttagagcttacaaaccctcccacacgttagcttatttatttttattttattttatttttttttgagacggagtctcagtctgttgcccaggctggagtgcggtggcgcgatcttggctaactgcaacctccggccccgggttcaagcgattctcctgcctcagcctcccgagtagctgggattacaggcgcctgccactgtgcccggctaatttttgtatttttagtagagacgggggtttcaccatcttggccaggctggtcctgaactcctgacctcgtgatccacccgcctcggcctcccaaagtgctgagattacaggcgtgagccaccgcgcccagccaccttatttaaaacctaacagccggtcctgaagtggctgtgattgacagtttgaggaatccgaagctgaatttctgagagtgacttgctccctgaattgttcaaattgtgtacctttaatcgcacaaaccctgctccccagccgaaaaaaaaaacccttaaaccccatgtttactccgtccctcccttccttgcctcagcttttaagtgcagcttcccatatcctagctcaatgaagtattccaaacctaaagtaaagttaactgttaatattccaaggttttagaaaaagacaacttgagcaggggatttacttctctccgttggaaccagcctcgagatagggtctgagacatgaattgcaaaattctggggatttggtatacaacattctcaggactaagctgagtagaaaacacaaaggaaaataaacgcgcaaccacattttccatgattgttttttattcacagctagggcaccgaagactgttcatgttttaatataagcattttctgtagtcactgactttccatggattagtttaaagccctttgaagattaaattaccgtggactgacaccttgtggtggaaatagaatcttacacctgttgtttctagtgaaactagaaaataattttaaagttttagaaaagaaatctgtgtaatctttgtatgtgtagcacagactacaaagaattaagactatttaaccaagcattgttgagttttaaaagtgatcatgggtcttaaatggtcagacaaaacgatatgcttttattgtttaacatttggtagaacaaaggtcattctctttttcacaatatattttccatatgaaaagggcaaagagttattattgtgttaacataataatatatattgatatgaatatggctatatagcaagctgcacttaaaactgcttttccttttctaattaaaacatttaaaatcaaaccccaaatatttttgttttataattagactttggcaattttatttctgcacttcttataaaagttttttttgcccaatattttagtgtggagaataaatagagtatgttccaaagtgaaatgattaaaagtgtgagatttatcaattagtttgtagatattataaaagcaacacaatattcgattaagaaaaacatgttactaaaaagcttttattgagtcgccagcagttagtatcacagatgaactagctgcagtttttgcatacaaataacctgtaatttgaggtatgagataaagaaaaaaaatttttgtggggggggcgggtaatacaatgccagagcatctcaga

SEQ ID NO: 587000 - DNA, 4001 bp, Homo sapiens
cttgggagctttccatatactgttccatctctatagcagaataattcactcagcccttgttaaatttattttgtaatattttatataattgtttctttactgtttactatttcccccattggacaataaactgcacgagggaagaaccatgtttgtcttgtccgtgatcactgcctccacattggctggcagtgtaactaaggatgcaataaaaattctttgttatggaatacatcaaaaaaattcaggacaaaaagacatgtaataattctctagatcagatttctctttttgctgaaaacacatgtgggcccttaaggggtaggtgatttatcaatgttattgttatgttaatgtctcagttacctcaatgtcctggtttctggcccagcagggataaatacatctcctgatgtcctatgtcctttatcacgcctgcagtcttactctttcacatttttggtgtatcttctttctcacttttctaactcatttacaatcctttctttaaaaatttgtcttcacctgtcctgttttttcagtactaaaatacaactatgttcattcaccacattttccatagcaccagtacaataaaaagtgacttggataaagcttttcatttccttactgcacaatttgctcaagttgtcattctcaatattgtctcatttccccataccctgacagagtgactagctaagaggcagagagtgcagccatcccaatggcagcacacatagttactctttatgtttctaaacatcctgcaaattatttaggacgggtgttttgttttgttttgttttgcttttccattaaatagcctctaagctttgaagcaaccaagagagaatcggagtaaaaaaattatagggttaaagaaagaaaaaataaacagatcaataaaatgaagaaataataaagtggagaaaaggaaggatggggaggtggtttagaaaacaaaaagggttccaagcagcggggctgttaaaaggaccagaatctaagtcaggaggttgggggtgggggtgggggtggggcaggagtctgaattctttttctcctatactgatgagcgataattaactatggcctggactgtctttccatctaaaaaactaactgcccgaggagtaaaaactgacaccaatccttctccacggggtgggagagataataaatggaaatcttccaacaaaaatgctctttatctctctgctctattttaagagcaagatttttagggcataattttcaacaagttttggctgaggctgaacacagggttcaaagataatttaggacagtcaaagaagaggccaattactttctaacagaaatggcctaaacaccacgattacattactgggaaataaaccaaatgactgctagaaatacctgttcgcaaagcagcactgcatgatcttccatgaaatgccctgcatcaacccaaagtagcagggagactatcaagggggcgaaagtaacctgcctgtcctttcctgctgggacacatcctacctgggacaatgtctccttgccttctttctcctgggcccaacctcaggacttgcccttagctctaggaaccaagaggaggaggagggggaatcagtggaacagacacccttctccacccttctcactttccaccttaaggtgccaggagatgagggaccccgcagctcagggcggacgcccggtgagggcgcagaatcggggaggatggatgcagcgcgtggcgcagactgcatcttgaccctcaactccgccgccgctaccttctttcgcgctcctccccgacccgctcacctccgcgccccccgcgccctccacgccgggcaggggcgagccttgcagctccccgggagcggcgccgactccccaagggcccacccgggggccagggcctacggactgcacctccgactggcggttgcagggtggctgccgcggcggtcgcactccagctgcttccccgcctacccaagctggatcgcgaacagccaggggagaaggaaggagggaggcgcgcggaggccggcttggcagcgacgcgccgctaggggctgcgtgcccggacagctcgtggcgccgagggcccgaggaacgctgactggagtcgggaagagccgtggagcgcggggaggagtcggggagctcggagggggcgggggtgtgtgaagggagccgggctgtgtggagggagctgggaagggcccagagcaccgagggggagccagcagtgagtgcactggggagctccacacacgcggctccgcagctttgcgcgcccttctaccgcgagcggctgagtatccgcctggctcccctgcggggttcctccgtggtcttccggagattctttctgaagcagctttagaatagtcaagcctatttttctactccatttctttttgtaatgtggggtcacctttccgctctagaaattgcttttcttacgcgattcccaccccaactctcgccaagggccctggttctcatctccccagtcttagcttctgacaagcctccaagaaactgcgcttttttcttttgtaagtgttcttttgcctcatgtttaccctatcccaaacgtcttttgactagactgtgtccttggaataaaatgttcggaaatgccctttcatgaaaactccctcggataggaggaccctcacagaccctggactgcagagattattctgttgactttgaccttcactctagctggtgccgcgcgagctttggtgtgggggaaaggaaggttaggccgtgagtcaggagacctgtgttcctgcgaaagccatttaccttctggggccgcaatggctttgaatgtttcaggggatcccctgagagcacctttggctctgggtttctgtaaattttctccctgcggattaccaagtaaaagtaccttttatcttttgtgtagaaggtgtcagtagaagaagcaagagatctttattcccaaatataaaatcaacttaccaaaaattctcaaatttggggaaatttttttcatacattagtaaagtaccatttcaacaaattaagtttaaaaattatccctctaggtggtttattaaccagaccaaaaaaacccaacaacaacaacaacgagaggggggtcttagatcgatcactggggcactgcactttcccctttgtagtccatacacagattaacctttgtaaatgctgctttggaaatacatcctttgtttgacttgaaatgtaacccctcccctaccgccaaatattattaaggtttaaagtttaggcagaagctaaggttttaacgatgtgtcagggtgtggaaccatcgacagctggtagaatactttccattttggttactggaaacaagtcattaaatctaatatcaattttaataatttcacttcaacaaaactgtcaaataatgagattcgtggagttttttctagtagttcctctggagaacttgtggagaaaattcatgaatcttagcagttaacggaaagtatattgcttttccatatattttaaaaaactatagaattatataacttccccacggggatattaaaagaaattgcactttctaacttctataaccataaattatcatgtaaaacatgtaggtaagccatatattttaaatatgtttaaaagctctcttaacatgggctttgactattgagaaaatagataaagtaatgtgaaatcccttttcctaaatgagaatcagtgagtcaacaatttgcagcttccaaaagggatatctctttttcatgcttgaactattaaaataaacaaatatctttgatgggaaatctaatgttaccaaatgtgttccagaagactgttggtgttaatgcaaagcatgattcctttaacttccatggtaactaattttatcattgtttttcagctggagatgcagagtatgaaaatgattttgcaagacttttccaggtcatgaggtgctctctgagaaatctcttctgttc

SEQ ID NO: 587001 - DNA, 4001 bp, Homo sapiens
gagactcagcctcaaaacaaaaacaaaaacaaacaaaaacaaaaaacaactatgtcatttatagaaagttttgtcttcatagtgtaggggtgaaagagcaggcctaagcttctgcaatcactttgattctctgagtctcaatttcctttgttaaacagcaaacaaataggttatacttgactctggtggtagtttccaacactaaataagtcttgaagctgtgtaataatggtaatatcaccaccctatatttaacacttcaacttcgggagctcaatctaaaagtctgtgtcaatgacatcgttttcttgaatgggcatttgacttgctgtacacatttaatacttgagaatgtattattttgatagggaattcagttacattcagctggacagcctcttaaggttttcagtttagaaggatttcctgaacattcctgaagctgaatggcacctgttgtgctatgttacttttgaaaaatagaacctaatttgtttcacacataaatagggcatttattattggatgacagcaactctgaaagggctgtccacagaggttttgatgacatttcacaacctgcagatttggagaggctatcaagaaaacataattctccagggccatgaggtggggtggtgtaatcttcactttgtaagcccacatctgaacatctcttcttcattgtctctcctgcaaacacccagctcctttgaagctcatggtacttcaccataccctctccctgtccttactgctgtcctcactgctgtcctctactgacttctagtttattccttatgactgcagactctggctcccagtatatacatggtcatcctctctaccctaatagctatcatgtttttcctggactttatcattcaagtggatgaaccattcaacttcaggggctcttatttccttgacttactcattggagacaatgaatttttgcctctaccccacctcagtcactcactgcctgaaatctccaagcactgtctccaggacttccaataatcttagtttaaatattcacactgataattctaaacagcaaaagaaatctgatccgttgacctctacctctctaattgcttaatatcctgcactctccttcagcctgctctggtttctctttaaaccgaggctagatttgtagtcactcccttaaaaagatcctcagctctcttactctccatcatatctgcttggcaaaactctagtcctggacccagctatccattttctctgtatctgtatccacgttggtgaaggttgctggagaaaaaccagaaaactgagctcattagtttcaccttaaattaacaatcaccaattttacctatcaaagaccagtctatccacttatgtcctggagagcctccctttttgcttcccaaggggatatggttatgacctctttctgtgacatctcaaacttcacaggttcaaacctgaactttttccacccagagctggtcccattcgcctggaaatgtgtaaatgccaccattatccaccagttgctccaatcagaaaattgggagtcattcttaagtccttgctgaccctcacttttgacataaaatcctgcaccaattcctgttctccaacatatttcataaatccctctccaccaataccaggctagtccaggtgtctatcatctcacctgaactctgcaaacatttcctaatgggtcagcctactttctcttttgaccctttccaaacatctccacagcagctaaaatcatcttaaaatgtaaatcgtcataaaatgtctctccttaaaatcggtgctccttgtacttagaactacagccatcttcctgactatcacgtaaaaggtcctgaatgagttagtccccgcttcccctctctaaccttatctgtatattgtccacccacagcattctcttctagaaagagaaaacaacaaccactttatgtaccttgggagctttccatatactgttccatctctatagcagaataattcactcagcccttgttaaatttattttgtaatattttatataattgtttctttactgtttactatttcccccattggacaataaactgcacgagggaagaaccatgtttgtcttgtccgtgatcactgcctccacattggctggcagtgtaactaaggatgcaataaaaattctttgttatggaatacatcaaaaaaattcaggacaaaaagacatgtaataattctctagatcagatttctctttttgctgaaaacacatgtgggcccttaaggggtaggtgatttatcaatgttattgttatgttaatgtctcagttacctcaatgtcctggtttctggcccagcagggataaatacatctcctgatgtcctatgtcctttatcacgcctgcagtcttactctttcacatttttggtgtatcttctttctcacttttctaactcatttacaatcctttctttaaaaatttgtcttcacctgtcctgttttttcagtactaaaatacaactatgttcattcaccacattttccatagcaccagtacaataaaaagtgacttggataaagcttttcatttccttactgcacaatttgctcaagttgtcattctcaatattgtctcatttccccataccctgacagagtgactagctaagaggcagagagtgcagccatcccaatggcagcacacatagttactctttatgtttctaaacatcctgcaaattatttaggacgggtgttttgttttgttttgttttgcttttccattaaatagcctctaagctttgaagcaaccaagagagaatcggagtaaaaaaattatagggttaaagaaagaaaaaataaacagatcaataaaatgaagaaataataaagtggagaaaaggaaggatggggaggtggtttagaaaacaaaaagggttccaagcagcggggctgttaaaaggaccagaatctaagtcaggaggttgggggtgggggtgggggtggggcaggagtctgaattctttttctcctatactgatgagcgataattaactatggcctggactgtctttccatctaaaaaactaactgcccgaggagtaaaaactgacaccaatccttctccacggggtgggagagataataaatggaaatcttccaacaaaaatgctctttatctctctgctctattttaagagcaagatttttagggcataattttcaacaagttttggctgaggctgaacacagggttcaaagataatttaggacagtcaaagaagaggccaattactttctaacagaaatggcctaaacaccacgattacattactgggaaataaaccaaatgactgctagaaatacctgttcgcaaagcagcactgcatgatcttccatgaaatgccctgcatcaacccaaagtagcagggagactatcaagggggcgaaagtaacctgcctgtcctttcctgctgggacacatcctacctgggacaatgtctccttgccttctttctcctgggcccaacctcaggacttgcccttagctctaggaaccaagaggaggaggagggggaatcagtggaacagacacccttctccacccttctcactttccaccttaaggtgccaggagatgagggaccccgcagctcagggcggacgcccggtgagggcgcagaatcggggaggatggatgcagcgcgtggcgcagactgcatcttgaccctcaactccgccgccgctaccttctttcgcgctcctccccgacccgctcacctccgcgccccccgcgccctccacgccgggcaggggcgagccttgcagctccccgggagcggcgccgactccccaagggcccacccgggggccagggcctacggactgcacctccgactggcggttgcagggtggctgccgcggcggtcgcactccagctgcttccccgcctacccaagctggatcgcgaacagccaggggagaaggaaggagggaggcgcgcgga

SEQ ID NO: 587002 - DNA, 4001 bp, Homo sapiens
ctccacattggctggcagtgtaactaaggatgcaataaaaattctttgttatggaatacatcaaaaaaattcaggacaaaaagacatgtaataattctctagatcagatttctctttttgctgaaaacacatgtgggcccttaaggggtaggtgatttatcaatgttattgttatgttaatgtctcagttacctcaatgtcctggtttctggcccagcagggataaatacatctcctgatgtcctatgtcctttatcacgcctgcagtcttactctttcacatttttggtgtatcttctttctcacttttctaactcatttacaatcctttctttaaaaatttgtcttcacctgtcctgttttttcagtactaaaatacaactatgttcattcaccacattttccatagcaccagtacaataaaaagtgacttggataaagcttttcatttccttactgcacaatttgctcaagttgtcattctcaatattgtctcatttccccataccctgacagagtgactagctaagaggcagagagtgcagccatcccaatggcagcacacatagttactctttatgtttctaaacatcctgcaaattatttaggacgggtgttttgttttgttttgttttgcttttccattaaatagcctctaagctttgaagcaaccaagagagaatcggagtaaaaaaattatagggttaaagaaagaaaaaataaacagatcaataaaatgaagaaataataaagtggagaaaaggaaggatggggaggtggtttagaaaacaaaaagggttccaagcagcggggctgttaaaaggaccagaatctaagtcaggaggttgggggtgggggtgggggtggggcaggagtctgaattctttttctcctatactgatgagcgataattaactatggcctggactgtctttccatctaaaaaactaactgcccgaggagtaaaaactgacaccaatccttctccacggggtgggagagataataaatggaaatcttccaacaaaaatgctctttatctctctgctctattttaagagcaagatttttagggcataattttcaacaagttttggctgaggctgaacacagggttcaaagataatttaggacagtcaaagaagaggccaattactttctaacagaaatggcctaaacaccacgattacattactgggaaataaaccaaatgactgctagaaatacctgttcgcaaagcagcactgcatgatcttccatgaaatgccctgcatcaacccaaagtagcagggagactatcaagggggcgaaagtaacctgcctgtcctttcctgctgggacacatcctacctgggacaatgtctccttgccttctttctcctgggcccaacctcaggacttgcccttagctctaggaaccaagaggaggaggagggggaatcagtggaacagacacccttctccacccttctcactttccaccttaaggtgccaggagatgagggaccccgcagctcagggcggacgcccggtgagggcgcagaatcggggaggatggatgcagcgcgtggcgcagactgcatcttgaccctcaactccgccgccgctaccttctttcgcgctcctccccgacccgctcacctccgcgccccccgcgccctccacgccgggcaggggcgagccttgcagctccccgggagcggcgccgactccccaagggcccacccgggggccagggcctacggactgcacctccgactggcggttgcagggtggctgccgcggcggtcgcactccagctgcttccccgcctacccaagctggatcgcgaacagccaggggagaaggaaggagggaggcgcgcggaggccggcttggcagcgacgcgccgctaggggctgcgtgcccggacagctcgtggcgccgagggcccgaggaacgctgactggagtcgggaagagccgtggagcgcggggaggagtcggggagctcggagggggcgggggtgtgtgaagggagccgggctgtgtggagggagctgggaagggcccagagcaccgagggggagccagcagtgagtgcactggggagctccacacacgcggctccgcagctttgcgcgcccttctaccgcgagcggctgagtatccgcctggctcccctgcggggttcctccgtggtcttccggagattctttctgaagcagctttagaatagtcaagcctatttttctactccatttctttttgtaatgtggggtcacctttccgctctagaaattgcttttcttacgcgattcccaccccaactctcgccaagggccctggttctcatctccccagtcttagcttctgacaagcctccaagaaactgcgcttttttcttttgtaagtgttcttttgcctcatgtttaccctatcccaaacgtcttttgactagactgtgtccttggaataaaatgttcggaaatgccctttcatgaaaactccctcggataggaggaccctcacagaccctggactgcagagattattctgttgactttgaccttcactctagctggtgccgcgcgagctttggtgtgggggaaaggaaggttaggccgtgagtcaggagacctgtgttcctgcgaaagccatttaccttctggggccgcaatggctttgaatgtttcaggggatcccctgagagcacctttggctctgggtttctgtaaattttctccctgcggattaccaagtaaaagtaccttttatcttttgtgtagaaggtgtcagtagaagaagcaagagatctttattcccaaatataaaatcaacttaccaaaaattctcaaatttggggaaatttttttcatacattagtaaagtaccatttcaacaaattaagtttaaaaattatccctctaggtggtttattaaccagaccaaaaaaacccaacaacaacaacaacgagaggggggtcttagatcgatcactggggcactgcactttcccctttgtagtccatacacagattaacctttgtaaatgctgctttggaaatacatcctttgtttgacttgaaatgtaacccctcccctaccgccaaatattattaaggtttaaagtttaggcagaagctaaggttttaacgatgtgtcagggtgtggaaccatcgacagctggtagaatactttccattttggttactggaaacaagtcattaaatctaatatcaattttaataatttcacttcaacaaaactgtcaaataatgagattcgtggagttttttctagtagttcctctggagaacttgtggagaaaattcatgaatcttagcagttaacggaaagtatattgcttttccatatattttaaaaaactatagaattatataacttccccacggggatattaaaagaaattgcactttctaacttctataaccataaattatcatgtaaaacatgtaggtaagccatatattttaaatatgtttaaaagctctcttaacatgggctttgactattgagaaaatagataaagtaatgtgaaatcccttttcctaaatgagaatcagtgagtcaacaatttgcagcttccaaaagggatatctctttttcatgcttgaactattaaaataaacaaatatctttgatgggaaatctaatgttaccaaatgtgttccagaagactgttggtgttaatgcaaagcatgattcctttaacttccatggtaactaattttatcattgtttttcagctggagatgcagagtatgaaaatgattttgcaagacttttccaggtcatgaggtgctctctgagaaatctcttctgttccctaaagtagtaagtgactcaactgaagcgaagcaataattattaaatggatctctagtggcctaggggcattaacacatttttttcctttgaagttattatacaattaaataactttagagtggtagttcccaaaatgtgtgactttaggcactagtttgcctaaatgctgct

SEQ ID NO: 587003 - DNA, 4001 bp, Homo sapiens
gtaatgcagagtgaccactccaagtttctttgaatataaaattccataacaaatgaccttatttttcttaaaattgttcacacatagtgcaaggcctggggtttttaatttattaacaatcttaaaaagtctgtttagttccttctaaacaacagttagcgagctttagtaaggcagaagtctggaaattgttcttcagctaggggccaggccttgtacacctggtttctgaacaatgtgaacttcaacaatgtgaacaacgtgaacctcagtggaactgtaaacgttaccaaatagaaaaactgctatgacccaatttctctgtacacatgtaccatttactttacagccttggagcctgataaataggaagtgtctcatcctgttttctgggttggcagtgtttgccatgcaggtagaatacatgcaggtcaaatctcatattgtgctaaatcacagcattctgaaaaacttgggaccttgcaaaaggccatatctcagaaaagttactgcttcaaataaatgtgccattttacaaaattatacctactgtatcagaaaaaaaaaatgttctctcatgtgagtgacatttatatgactgccatttgtagggaataggacattctcacatagcaaggctgaagaatggttttgaaagctgagagtattctctgaatgataaatgtggcagaactttaagatgctcctgtgggaagagactcttcccccgacaactggagagtttccttataaaaatggaacatgcattattatgaaaaaagtaaccactgaattatagttgtagcattaaggagattttctatgtatttcaaacttgcaggcatctttagtcacggcttttcaccttgttagagttgaactttctggatcatctggcccagtagccagccttttattttacatctgtggaaactgaggctgagataatgaggttctagttattatagaactaggaatagtattcttcctcccctcccccattctctatccaattcactttctcagctcactgcaacctccacctcccaggttcaagtgattttcctgtctcagcctcctgtgtagctgggattacaggcacctgccaccacgcctggctaatttttgtatttttagtagagactgggttgcactatgttggccaggctggtctcgaactcctgacctcaagtgatccatcggccttggcctcccaaagtgttgggataacaggcttgagccaccgtacccagcctcagtacaccaatcttttaaagaaagttcctaaattaccatctagaggtgggaaaaagaataataaaattctgtctctggacaaacaaacggaactgaggctttatttactcttcacaataaattatattctgaacaatcttcctccagaaaaataacctttaaattgcaagaggaaatttaaatcaagataaaaaaatggaagtggttgcaggtatcaggacaaatttttagtgcctggtcaagaagcagcctcggatctgagaccttggagactgactgctaaagccacattcttccagcctactttttgatgggcgccccaagagtgcgccaatccagaagtaagatgcagagaagaatctaaccccttaattttccccctttgggcttgtctgcaccctggggtagggatgagccttaaactccaggaagttagaagcttgctgaatcgcggagcagcctcaggtgactttcctctaaagtgatgccggggcgcggcggggagtttgcaagcacctgttcttcagtgcgatgggctggggagtggggtcctagcagcagggactggaggtgagctgaagcagataagggacgggagccttgtggcgaaaagtgacccacctgagggagaggcgcttccaaggaggaagcgtccagcgccaacggtgcgcgccgcgggccgggcgggtagagggaagtttcgccgcgcctgcagctcagcgctgtggcttgtggctctcgctgctataagaagccagagaagggcgggacggtctgctggatttcgcaagagaagcggaaaagaacttgtttcctggaagagttcaagctgagaatcccagcagctggaaggaccggaacttctatactgcggtgctgctgatggtgccgctgacccccgggaagcggggattttaagggttacacccgagcccttggcatctgtgcatcccagggtgattgaggtttggagaggtctaggaatccccctttcctaaaggagcaagaaggatctctttgagtagctgagaaaacagcacctggactaggcttctaggcaattcttttgccatcttgtctcagtttatagaaaaggtggtatctttcccctccgcctggaagccatgggttcttatggggctcataacttggaagatcttgagttttcaggtcttaatttaggtagattaaagaaataaaacaaatgaaagagggatcgggataccttatgatatacatgcaaatgtgtctttctacagagaaggtcaaaaaccacagccctggttgtttaagattgaaataatcctgataaactatggggcaaagcatccatacactcccaaactctgtaatctaaatcccagagtcttcccaatgatctccactcagccatgggtcttaaattccacagcatacgcttgccaagctccagaggcccggccacatgggaggcctgttcctcccatggaaaggggttgttgagtcaaccttccctttgtctggattgcaactctcctcatagcttcttgtggggttggtcagaccccatgtctttcaagaggtcttttcttagccattagttgcaattaatattttctttctctatacagtagtttatacttttagcacagcaattaagacaatttgcctttcaaaagagttattatcatgtgtgtgtgtcttgtcctggactgcagtcttcgagggatgacaccctagttttttcagtctggaattttccataacacctagcaaaatgcattacttaacaatggggatttattctgaggaatgcctcattaagcaatttattaaatatattctgaggaatgtctcatcaagcaatttcgtcattgtgtgaacatcatagagtgcacttacacaaacctagatggtatcacctactacaggcctaggctagatggtatatagccgattgctcctagtctacaaacctgttcagtatgctacttttctgaatactgtagtcagttgtaacacaatggtaagtatttgtgtatctaagcatagaaaaggtatagtaaaaatgtggtataaaagataaaaaatggtatacctgtatggaacacttaccatgaatggagcttacaggactggaagttgctctgggtgagtaagtgagagagtgtgaaggcctaggatattactatacactactgtagactttataaacactacatttaggctatgctattataagaaatatttttcttccttcaatagtaaattacccttagctttctgtaacatttttactttttaaacttctaagttttaaaaaactttttgagttttgtaataacgcagcttaaaacacatattgtacagtgtgtacaaatagtttttgtctttatatccttattcgataagcttttgtcccgtttttaaaagttttaatttttttgctaaaaatgaagacacaaacacacatattagcatagacctacacagaatcaagatatgtgatatcactgtcttccacctgtatgtcttttgttactgaaaggtcctcaggggcagtaacatgcatggagctgtcttctgtggtagcaatgcctttttctggaatatctgctgaaagaccttcctgaggctgttttacagttaactttttaaaaaatacaagtagaaggagtacactcaaaaataatttaaaaggtacatataataaatacataagccagtaacatagctatttattatcattatcaagtattatatac

SEQ ID NO: 587004 - DNA, 4001 bp, Homo sapiens
tcacgagtagctgggattacaggcgcccaccaccaggcccagctaattattgtatttttggtacagacggggtttcaccatgttggccaggctggtctggaactcctgacctcaggtgatccacccgcctcagcctcccaaagggctgggattatgggcgtgagccactgcgcccggccagttttccttttttcaggtaataggggttacttcagaatgtttggaatgtcgacaaattagaatacacagctaagtcacagctcccttcatcttttgtcacaaagtatgcacagatccagtcaactagggcctagcagtgaagtaaatcttgttcctgaaaggtgtttttccttttgttaacatttaggaataagtaagactttgttaaggtaggattccaccctccctacacccccaccccccaaaaaaaactatttccaaaagttaccttaatatgtgtaaggcagtgtgtttttaacattataaccaatgttacattgtttgcctttccaagaccccagctgaaggctgttccaactgtcaggccctttcccattacaacatggtgctattttgcaaccatgacaaatgctggcaataatgcgaacatttactgaacgccatgtggcaagcccagtggtatgcgcttgacaagcatggcatcttcaggccacctctgaggtaggtactgtcatcattatacgattttacggatgaggaaagtgaggctggagagtctaacccctccaaaggcaaacacagcaagaagggcacgaatatgaactcaggtctgcccccaaagccagagtatttaacaacttcttcaaactgttctcaaggaagagtcgccaaaccccacaaaaatcactcgatcacccctcttcagcatacaaaatgtaaagcatccgaacagcctgcacctgcaactttacagaccaagttgtaagctctctctactcccacaaaaaaagggtgggctagcgtggggtggggggagaaggcaagaatcggttcccagcaaagtaaaaagcgagaaaagggccaagcgcccacgaaagaaaccaatctaaactcgaagcaaagggacctaaatgctttagaactaaaacggcagaaaaccaaccaagaaaacgaaaatgaattcagcagaagaccgacacaaggtaacagagcgccggtgcaaaggaagcggtcacaacggatgctgtattttattaaaaccacacaggcagaccaagaaagtcgcaagagttgaaggaaaaatgcaaagtcggctccacagacctctggttttcagacccgctgctcggggtgaaaggcagagcgcggcccgcaccttctctcgttaaatagccattcgaaacgccacagagaacgaaagggctgaggaaagtgtccgcgcctccgggaccgccatcgagttaccaccactcgcttgctgggcgcggcgcgtggagggggcgctggtgcgactcggctgccctacttgccgtcggcacccaagtttgtgccaagtcacaacgcgcgttatcggcagcagcaacgccacttcagcctcgccgccgcggcgccggcacttatcggcgcccacgtcccgccccgcgcgtccgggaaggttccgcgccgggccccgcccgtcctcacctgcccagctcccggcccgggcacaggctgtagccgtcctggaagggctcggtgcgcaccacggcgcgtatctctgtcagcagcccgcgggcctggggcggcggcggcggccggcacggcccgctcagaccccggcctgcccggcccgagcctgaggtggcgcctggggaggagccgccgctgcctggcttctccaaagggatcatggtgttcaggcccgcttctttcctggccgcctgttcactccgagcagccggagggtcacggacccgcccccggctcctagtgccggtccgcggagccttcaaacacccgctctccccagcgcggcgctcggactgcggcaggcagactaccggtagctcgggcccgccccgcgccccgcgaccggccccgcccccgtgaccgccccgcgcctgccctgcaccctgcttctggccccggccaacccctccccacgtccgccccgcgcccgaccccgccccggcctcactccgtggccgcccgccccctcgctgagctcccgcggggtcctgagcgcccgatgcctcacgcgcgccctctgcagctcagggggagaaggtgcagctttcgggacggcccggaggctggaggcgactcacagcaccaccctttggccaggacagcctactgcgttagcagagttgcgcacctgttgagcgtctgagagtcacaaaagctgaccttcggttaataaaaggcatttgagctgtaagcgggacttcacgtggtgaggaggggaggggtctggaggcacttcggttaataaaaggcatttgagctgtaagcaggacttcacgtggtggggaggggtgatgagatcctgatctccgtacactgggagaggggtctggaggcagagttgtataaatattattaaccctgcacaccggccctatgaaatagacactattatattgtctgtagtcgtctctatatttactttcgaggtcctctcatccggtcttacgactttaattaccatctatatgctcatgactacagaatttgtatctctagcttccaaatattccctgaacttcagactggtgtatttgactatgcatttggcatctccacttacatgtcaaattagcatctcagacttaacatacacaaaagtaagttgctgattggtcttcatgaatgcactcctacccagctttccccgtctcagttttcttcatctccttccttctagctgttcaggccaaaaatcttgggatgagcattgattcctctctcatgctcatctccagtttgtcagtaaaccctcttgtcttttccttcaaactagatgcggcgtttgatcacttctctctatttccaccttaccaccatggcctgagccatcgttatctcttacctggattattgtgatagtttactaactggaccacctgcttccatccttctttctccctaatgtcgcatagttcattttcaaggcaatgagagtgatcttttaaaaatcgaaaccaaatcacaccactgctctactcagactgtctcagtggagttttgcttctggcactgatatactagtttatttgtgttcaatattctcactaagaaaaaatagaaaagttgacaaaagttaaaaatttcctctcccagcaaggacttggatgactgaaatcctggaaagataggcagctcagaaagccaccacttttcccatgaggtatttgatgattttaaagccatggctgaaagagtgagaaagtaagcagagctttcagtcatctcatggggttggggagacaaaaaaaaaattggagtttaggacctatttatgatgaggggctggtaagcaactaggctttcagctgggactccgaagagctataccctaggggtgtggatgaacgggaaatagacccaagggctgaaaaccagcttcaaatggcaacagtaaatattctctctggggaaaaaaagcatcattcagagcaacacattacccatataatattttatacaccatgtctgaaacttaatttaaacaaaggacacagaattgtcttaaaaactaagggaaaaagaaaacagaaataaacacacagaagatccagatattaaagtttaaagacagattttaaaataattctgttaaatatcttcaagaaattaaattgcaagataaagagttttcagcagagaactggaaactccaaagaagaatacaatggaattttggaattggagaaaaaaacacactaactaaaactactacagaattatgggcttaataacagatgagatacaacttaagcaagaattagtgaagctaataagcaaaacaaaatatgaaaaatgacatacaagagatatga

SEQ ID NO: 587005 - DNA, 4001 bp, Homo sapiens
gggggaggtgaggggggatatcaaccagtttgctatttacctgggcccaaaatgttactgcatcttctatgtgacttccaaccacatcttccactaaaatcaaatcacaatacaaggaaaattagaaattaatcagtatcatctagctcttacaccccaaaataatttttagtgtcagtacctttatcgtaatgtgtatcttcatccatttgaacaattcctgaaaaactagaacaataccttaaattagattacaataatccaccattaataatgaatgaagactaaactacatcatgttcaattcttacaaatgttttgtcctaaatgcagttatcaaaattcaaactctatattaaaaatgagctcaatatttccttcactaactaattcttttgagtattttgtagtagatgcaattttatcatatataatctctatccttaaaattatctctagccaaacttttacaaacttatactgaactcatatacattttgatcacttacataaatcaatactttgaaacaatgtacatattctttttttagaaaatatcctcccataaaaaggacttccacaatgtaaacaaagagaaacattacaagtaatagaacaaatgctttaaactggtagtctattttatgtaaaaggcacggtggttactatttttgaagattccgtgggattaaagactgcaaaaatacctaaaattttgcctattacttcaaaaataattttaattacataatattatactttatcaaatgcaaaaatattccaaaataaatgtacactatgtaattttatctgtaatatactaaaatactgcactttccattcataagtgttgaaggaaaattaaaacacagattttttatgggtttttttttttttccccccaaacgaagtcttgctctgtcgctcaggctggagatcttagctcactgcaacctccaccccccgggttcaagcaattctcctgcctcaccctcccaagtagctgagattaccggcgcgtgacaccacgtccagctaatttttgtatttttagtagagacggggtttcaccatgttggccaggctggtcttgaactcctgaccttgtgatttgcccacctcggcctctcaaagtgccgggattacaggcctaagccaccgcaattttttaagagctttaaaagttgtctaggaacaccactatactaaagtttcaaatgctctctcattatgaaaaggaaaacattaactcctcatcacagaaaaataaaattttaaaaatggattactttgtcacaacttaattttttaaaaaaatttttcgtaagtggcatgaaaatgtctccaaagcaagggttcttttctactggtcaaaaagcagtttttaaattcaactgactgaaaagctgtaataacttttagggagactatatattcccacggaaagcattaaggcttaaattcagtaaaagttaaaattactttggaaatctctccacacactccaagaagctacttctagagtagtttttaaatcttattttaaaatgacttgccctgattatgaaggcactgatgccgtacccactttctgcaaacagagatcacaaaatagtacgtccaaatctccacttcgtgatgaaaatttggaagaaacgggtacacgtagctctctgacacttattttataagggattttgaaacttaaatggcacagaattttcgagaaggggaagagagtgtggaggctgcgtgaccgcgtcttcatggagatcattcaggccggaggtcttttcgagccactttcgcctgcctgcatgcactcaaaaactggggcatctggcacccctctggggtggcgggcggctagaaggtgacagaaaaccctgaaatgggcctcgtcccaggattggagacttaaaacgcaagcagcgacgaaaatagtccttgaagcggccaccactgcacgtaccacaaaaactactactgacctcacactttccgttgcggaagctctagaagagtgaccctggacccacatactggactttcggccctccgcccgccgtagcacacgtgcagcggcttaccgcgtgagcttcgaccgcaagggccccacactgcgcctgcgtgcacagcgctgcgccatcatccggtgttagcgggagtcacgtggcagccacggcctgccgcctaggaagaagcgtgcgggagccgcctgacgctggctgctgccgacccccaggcactgaggctgcgccctggtgatttataggccggggtggggtctagggccagttcctttcgcaaggcttcaagctgtgactttagaggtgacgtaggatttcgtggtctttcctaatctgttcacgtggatttaaattttagaaacacccaaattagaagaaccccgacattctatttacacgatggaagagagaaaataactttggtaactgaaaatgtgtttttcagattggtagctttacaagcgttggtcaactaatccttagattccacagctctctgtagtattacaactttttccacaatcttaagaagaaaaaattagttgtctgcttctttgcagatattacactttgtggcaaaccttacacaacaattgaaaattatctccggttaatttttaacagcttgaaggttaaagtacaataaactgcagatatcaaaagtgcataatttgttaagggtgaacatatgtatacactgttgaaatcacctccacaattaagataaacttttccatcacctcaaagtttcctcatgcccggttgtaatacctgactcctcccagctcccgttctgctttctgtcaccatatattagtttgcattttctagaattttacgataatagaatcatacagtatgaacatttaatctagcttctttccaatagcataattattttgattgataaatttcgtcctatgtgtcaagagtttgttgggttttattgctgttactattccactgcatgaatataacacaatttgtttatctaccttttaataggtgtttggactgcttccagttttgaattgtttcaaataaagctgctattgtgtgcaagtctttgtatggacatatgttttcatatctcatgggttagtacctaggagtggaatggccaagtcatagaattgtatatgtgcttaaaaaattgccgcatagttttacacagttgtactattttatattcccaccagcgggtttcagagttctagttgctctatatcctcaccatcatttgatatggtttgtgtttttaagtttaaacattcatgtataaatgtttaaagtggtatctccttgtgattttaatttgcatttatttctctactaactaaaaatgttgagaaacttttcttatgtttattttccatccagatcttcctaaatgaggtgtccaagctttttcctgttttctaactgaatttattattgagttttgacagttctttatatactgtggataaaactccttcaggtttgaaaatattttctcccagtctacagctgtctttttgttttctaaaaagggtacttcaaagaacaaaagtttttaatttcaataaagtctaatttatcggttttgtcttatggttcatgcttttgtgttgtatgtaaggaatctccgactagcctggttcacaaaagttttcttctatattttcttccagaaattttacatgttcaagctttacattttgatatatagtcctttttgagtttatttttataacatgtgaaacaatcaaattttattttattgcatatggatatctaatttttccagcatcatttgtttaaaacactgtcatttgtctattgaattgtctttgcactattgtcagagatcaattaaccatacatacgcaagtctatttctggattctctgttctgttacactgatctatttgctttctttagactaataccacactgtcttaattacggtagttttatttcatgcgatc

SEQ ID NO: 587006 - DNA, 4001 bp, Homo sapiens
aaataatttttagtgtcagtacctttatcgtaatgtgtatcttcatccatttgaacaattcctgaaaaactagaacaataccttaaattagattacaataatccaccattaataatgaatgaagactaaactacatcatgttcaattcttacaaatgttttgtcctaaatgcagttatcaaaattcaaactctatattaaaaatgagctcaatatttccttcactaactaattcttttgagtattttgtagtagatgcaattttatcatatataatctctatccttaaaattatctctagccaaacttttacaaacttatactgaactcatatacattttgatcacttacataaatcaatactttgaaacaatgtacatattctttttttagaaaatatcctcccataaaaaggacttccacaatgtaaacaaagagaaacattacaagtaatagaacaaatgctttaaactggtagtctattttatgtaaaaggcacggtggttactatttttgaagattccgtgggattaaagactgcaaaaatacctaaaattttgcctattacttcaaaaataattttaattacataatattatactttatcaaatgcaaaaatattccaaaataaatgtacactatgtaattttatctgtaatatactaaaatactgcactttccattcataagtgttgaaggaaaattaaaacacagattttttatgggtttttttttttttccccccaaacgaagtcttgctctgtcgctcaggctggagatcttagctcactgcaacctccaccccccgggttcaagcaattctcctgcctcaccctcccaagtagctgagattaccggcgcgtgacaccacgtccagctaatttttgtatttttagtagagacggggtttcaccatgttggccaggctggtcttgaactcctgaccttgtgatttgcccacctcggcctctcaaagtgccgggattacaggcctaagccaccgcaattttttaagagctttaaaagttgtctaggaacaccactatactaaagtttcaaatgctctctcattatgaaaaggaaaacattaactcctcatcacagaaaaataaaattttaaaaatggattactttgtcacaacttaattttttaaaaaaatttttcgtaagtggcatgaaaatgtctccaaagcaagggttcttttctactggtcaaaaagcagtttttaaattcaactgactgaaaagctgtaataacttttagggagactatatattcccacggaaagcattaaggcttaaattcagtaaaagttaaaattactttggaaatctctccacacactccaagaagctacttctagagtagtttttaaatcttattttaaaatgacttgccctgattatgaaggcactgatgccgtacccactttctgcaaacagagatcacaaaatagtacgtccaaatctccacttcgtgatgaaaatttggaagaaacgggtacacgtagctctctgacacttattttataagggattttgaaacttaaatggcacagaattttcgagaaggggaagagagtgtggaggctgcgtgaccgcgtcttcatggagatcattcaggccggaggtcttttcgagccactttcgcctgcctgcatgcactcaaaaactggggcatctggcacccctctggggtggcgggcggctagaaggtgacagaaaaccctgaaatgggcctcgtcccaggattggagacttaaaacgcaagcagcgacgaaaatagtccttgaagcggccaccactgcacgtaccacaaaaactactactgacctcacactttccgttgcggaagctctagaagagtgaccctggacccacatactggactttcggccctccgcccgccgtagcacacgtgcagcggcttaccgcgtgagcttcgaccgcaagggccccacactgcgcctgcgtgcacagcgctgcgccatcatccggtgttagcgggagtcacgtggcagccacggcctgccgcctaggaagaagcgtgcgggagccgcctgacgctggctgctgccgacccccaggcactgaggctgcgccctggtgatttataggccggggtggggtctagggccagttcctttcgcaaggcttcaagctgtgactttagaggtgacgtaggatttcgtggtctttcctaatctgttcacgtggatttaaattttagaaacacccaaattagaagaaccccgacattctatttacacgatggaagagagaaaataactttggtaactgaaaatgtgtttttcagattggtagctttacaagcgttggtcaactaatccttagattccacagctctctgtagtattacaactttttccacaatcttaagaagaaaaaattagttgtctgcttctttgcagatattacactttgtggcaaaccttacacaacaattgaaaattatctccggttaatttttaacagcttgaaggttaaagtacaataaactgcagatatcaaaagtgcataatttgttaagggtgaacatatgtatacactgttgaaatcacctccacaattaagataaacttttccatcacctcaaagtttcctcatgcccggttgtaatacctgactcctcccagctcccgttctgctttctgtcaccatatattagtttgcattttctagaattttacgataatagaatcatacagtatgaacatttaatctagcttctttccaatagcataattattttgattgataaatttcgtcctatgtgtcaagagtttgttgggttttattgctgttactattccactgcatgaatataacacaatttgtttatctaccttttaataggtgtttggactgcttccagttttgaattgtttcaaataaagctgctattgtgtgcaagtctttgtatggacatatgttttcatatctcatgggttagtacctaggagtggaatggccaagtcatagaattgtatatgtgcttaaaaaattgccgcatagttttacacagttgtactattttatattcccaccagcgggtttcagagttctagttgctctatatcctcaccatcatttgatatggtttgtgtttttaagtttaaacattcatgtataaatgtttaaagtggtatctccttgtgattttaatttgcatttatttctctactaactaaaaatgttgagaaacttttcttatgtttattttccatccagatcttcctaaatgaggtgtccaagctttttcctgttttctaactgaatttattattgagttttgacagttctttatatactgtggataaaactccttcaggtttgaaaatattttctcccagtctacagctgtctttttgttttctaaaaagggtacttcaaagaacaaaagtttttaatttcaataaagtctaatttatcggttttgtcttatggttcatgcttttgtgttgtatgtaaggaatctccgactagcctggttcacaaaagttttcttctatattttcttccagaaattttacatgttcaagctttacattttgatatatagtcctttttgagtttatttttataacatgtgaaacaatcaaattttattttattgcatatggatatctaatttttccagcatcatttgtttaaaacactgtcatttgtctattgaattgtctttgcactattgtcagagatcaattaaccatacatacgcaagtctatttctggattctctgttctgttacactgatctatttgctttctttagactaataccacactgtcttaattacggtagttttatttcatgcgatcgtagaagcaatttgtcagcatctacacacacacacacacacacacacacacacacagagcctgctgtgattttgattgggatcacattgaatgtatacaccaatttgaggagaatggacatcttagctatattgagtcttctgatccatgagcacagta

SEQ ID NO: 587007 - DNA, 4001 bp, Homo sapiens
aattctttcaagtctacacaaacactcatatgcccaagggcacctttctggagaggagcgttcaaaggatacttactcgccaacggtgcacgcgacgtccccactcccgggacagcagtcacccggcttcgtgcgccggagtggggatcgcggttcctgtctgggtcagaaaacagacctggcacctcgttacaggggtggggaccaatcgcggccctgtccctggccgccacagccaatggggatgcgtggtgacgggccaatgggcgtgtgggcagtggaagaaacagtgttacaagttgtccgaaggcgacagaaaagggaggagagagaagagggaggggcggggctgactcacctcgcagggtcgcgaggggtcagggaggggaccctcgcgtcagtaatcagctcgggggctccacacagccttcatgtgtcctcagaggactaagtagatgccctccagctggttccactcacctggcactgggccccagttttctcatctctcaaatggggcaatgccaccagcttacagggttgtcctgagggttacggaaaaccccttagataaaggaatcaaaataccaggctcgctgcctcaagcgaaaacatgagaaaacggcatgaaggaaataaacgcataaaagggagaaagggaaatagcattttaaataaggcaggaagaaatagaggatggggggagaaaatggggtggagagaagggacctttaatagctcagattaaaatatcaagaataagagagaaaaggggttcactctgggtagtaggaagtaggtattctttcagtttggaaaaaaaattcatttttccttcccaaatatagatgtactctcgtttaggcttctttttgcttgtatgcttatatcctgcaatatttcgtgatgctcatgatcccactatatctggttgacactggtgggggtactagcgaggccctacacatttggtagcagatgcaggacaaagccccttgaagtgcccggctcagggccagtgcacggtgcaagaagcatggctccgcccaggcgcccccttgctgccatctgatgggtgagctccttcactcctgaggcaggggtgaaacaggggtcacaggcttagcaggcgtagcaggggattctggattagaatccacctcgcagggactgagaggactatcaacgagccgctacggaaagcacgcagtagggtacctgggaggcttagacactcatgaagtttgacgtcagtgagatgatgtcccacatataaagaaaccgtcacataaaaacagaaaaaccttccagtaagggtcaattctcattctccccttctagcattttttttttcctgagacaggttctcgttctgtcgcccaggttggagtgcactgcagcctcgaattcccgggctcaagcgattctcctgcctcagcctcctgagtagccgggactacagccccgcaccaccacaccatgctaatttttaatttttttgtagagacaggcctttctaggaaaatttaaaatgttcatttcactccaaaattctgcttgggtcgctgccccatttctggctgtcacgcagcccttgacctagggtcgctcagggctttaaggaaattgtcaccaccccactccacccccactccctgacttttctctcctgggcctgcccacacctcccaccaccaacctcccaccaccagccctacctgccgtgttgctggggacctaggggtttgtgaagctctgtcttggggagccttatcctcgcaccaagatgacacagagtggtttggaaactgacctctgacctgcctcaacctttcatgtagtcaccccacctcccgccccaaccactgccacacacacaagcagatgtgcacccagaaaaaatgtagtcctggggggaaagttactaagaagcttatttacctgccacagcctgatttcttgattgaaaaagaggatcttgtccacatcaatcttccccatagctgcaaggcagaaggctctgccatgaacactgggggcctcctggtggcctctcactagctctggatatgaagagttatccctggtaacacccacacacaccaccaccctctgaccttgaccccttcctcccagtagcaaaacttttgccctaaaatacactccctccccaccacaggaacatagatcctgtccagaaatgccctccccctacaataacatagatccttctctgaaatattcctccagcaacatagattctgccctgaaattcctccagcacagtggcatagatcctgtcttgaaatactccaccccagcagagatcctgccgggaaatattctccttctctcccagttggagaacatgccctccttgcagatccagctcaacacccaggaagccttccaagatccctgcattcataccaactcgggatggccacccctttttgcgccccttggcctaactttctggtagaaggaataaccctctgaatttattctccttgttagtgtccatccatttcatgaaataaaaggccgggacttcaggctgtattatctttttatcccccaattaaaatgagagtgatggatcctatactgagactttactgtgctcagcatcctcagggacaactctgtgaagagtcttctccccaggctcagagagggccagggacttgctcaagatcttctctctggtcctctgcactccatgcccccttggggggcatttggtcccttaaatatcaactaccttaggacagagagatatatgcaagattttgtaacttttagaacaaaaaaccctcagctttgagctgaggtctgcagatggtggctcccaggaaagaatgaaaaaggcagagacacaatggagggatgcactctctgactgcagtcaggggctcccagcacttctgccaagatgagcctgagacacaatcctagataggcttttgctcaccgtgtcctttgcatggggctagacattggcttccaagggaccctgcagatacagtaaactcctttatggggagcattgctgggtcagtatggctgggcacttcctgctataggagggcagatgtatgaccccatcaagacatgtcccagggtgagagtccccaccctccccagacctccatagtgaaaattcccaaagactcatactgtcatcacaactcagcagcaacttccaagggactgcttttggagtttctattttaagggtttaatgtataagtgaaagtgcttcaaaatgtagaaagagctgtagaaatactgataaagaaggttgaaacttgtgaataaaagtacattctttgtgttagcttctcagtggtttgacagggaacttctgctatagggagtcacaatttatttcactataaagattaaagcctgctttcattcactcagttaatagacctaacctattgtgcttgagattcactgagaaaatacatgggcctcttaatgtttcaccatcaaaatgggcaaactattgctgtgaaagattgtttcttttgtggataaaattgattgtagatcctcaaacgggctcaatttagatggcactttaagctagagatactaagtcaataggtatttcagtgcactatcgtcatctgtttcattatatttttctctaattcatgttagaatttattttgtttccttttagggaatgacctttacagtttttataccactcagtttagttatttttcagaaggacaggggatttgcagatgtgataagattcacttcttttttgattatatgagaatattgggccatcccaatgttgggctactttgggatggaagggagagtttagtttcttgggtggggttgtgtgtggagtaggaacgaatccttggaaccagagggtttaatagttcaaggacgtaggatcaggaacatggaaactgcatggtccgatgatgaggcagctccttagcaactccaagagcctgctggggcagtct

SEQ ID NO: 587008 - DNA, 4001 bp, Homo sapiens
tctggacactgcaaagtactggcaaaagcaaaggactgtactctcagagcctttgcctgaagaagacttgacaggtggggaacagattgcaactttagaagggagacccaggcagagacttttattccccccatagaacatatcattctgaaattattttatttatttactcacaatttgtctccccatgggcgaagaccctatcttgttcactgatatatccctggcacctaaaacagtggctggcagaaagtcctcgataaataattgttgaattaatgaatggctcatctccccaaaaaaacatttgaacgagaacaatgtctctgtgggggaaggaggtacagggtgccctaaaagaccagactcatcttgaagtagggagggagatgatgtggcgggtatcatctagcaagacaggagggctgagctctctgcctctgcaaggtggtgactttgggccagtcttttcatctccatttctaccttgaaaaaaaatgaatggattcctcctactctacctacatcaaaatgtaaagcatacatgaaatcactttggaaactgaaatgctattcaaatggtaaggcaaggtctgggatgccaaaaacctggtttctagtaccagctctgccacttgatgatgatgatgatgatgatgatagcaatatactaagagttactatgtactgactaattacatgcattgtgcctgcactgtgccaaacattttatagtcaattatctcattttgactttatcacaaccttctgaggtaggcagtgttaatctcatcttacagatgaagaaactggagctcagagaggttccgtaatgtgccgaaaatcacacaggtagtaaatgatagggctaggagtcaaaacctggtctgactactccaaagtctggtgttcttgaccaccaactatgccagatgtctgatcttgggcaagtcactcctcttttttttaggtctgtaaaatgaaagggttataccagatgatatctgcagaccctgccacatctgatattttgtcgtctattctgatccccgctcagatccaactgatgggaactgcctcaatgaggggatagggaagtgataataattcaacgctttcatcttcatagatagggtttcttttttcaggagaggaggaagagatcgaaatattcacactcctatctgtatcctgcgactgctccctccagatagccactccaggactgcccctgcctgaatcccgtctcgctcagccctcacaggcaggggcctgatgtccgcggaaggcgctcccgaaacggcctaagacttacggggggaaggggacgggcagggaacgggcagaagtccctcggctggcccaggggcccgccgcaggcagcctgggagggggactgcggttgccccactcgccaatcctgctttcctgcggctgagctccagcctcccacccctcaagccagtcacttaacctctccgctcctgttcccccgtctataaactgggatcggaatttctgcttcagggggctgcagcgattaagtgagataaatatttggaaagtatctggtccgctcaataccgcgctcatcttcgcgcagcgggggaaagccagagggctagaaagcccccaacccgcggcaggagacgggcggacactggtccgggccaaagagcccagagttcagccgctaggaccccgcaggcgcccactgcgcggggctgatcgagcgcgccgagggctccggggccgaggccgaatcacctcagccgccgcttcccgccggcgggcgtctccgggccccagccgaagctttccgggctcctcacctctgactcccgccgctggcttcggaacgcttcgcggcccttgggcgccgcctgcttccctttgccgccgccgttgccattgccatttgcgggcgggcccccggtcccaggcgcggcggggtcctccatgctgctggtcagcggctcccctcagggttcagctcgctttgccggaggcgaccctaccgccgcgcgccgggagccaggccccgccccctccacctctattggttacggcagctcgccgcaaccccgccccgcgaggcgattggctgctcgaccggccggagcgggactcgaggaggtgggggctcaatgaagagatttttgaggggatctttttagtcctgcggcattgctggcggacggagactcctaggttagctacaggctccacacctcgcgaaagctgggccttgagatcaggcgggttatctctgtgctcctcactcggtgtctctcagctctcacccccgtccctgtagcgaccttttccggagctctagtctccgcctactgctccacagcagtctccgtttccctgttaccaccgacccggccccccatatcccggctcctgcacacgtcccatatcccgcttagtctcaggggagggatggcaccgccaggtggccagggacatcgcccgaaacgagggactcgctgtctctggaagctgagaattctcagcgtttttctgaagagaacgcatctcgcccggagctagggcttggctgggagactggaggtctaagggtgggatgggggagtttttccatcactgaaattggtggtgccctcgagggctgctcctgtcatctgcccttctctgctgtagggggcctcttcctcatggtgtgtaaatgttgagggtagagcaagcccccaccctcacctgctcgccagtcctttctttccttcctctctcttagatgcttcctaagggctcattgttactgggggcaaaagaggctgtttgatctgccctctcctgaatttaaaaagtagcttgtagtaaatatttagacagtctggcttggtaatagaagccccaaagacgtaggctcaggggaacaggtgggaccaaatcgctgtccccagcctggttgctttaggaagggtctgggggattgttgaactgagcttggtgccaggcactgcagtaagcgctttccaaatatcacatcatacctctccccgacagggtgtttttacgaatccaatgttactgatgaagaaaccggcacttgcagattcctccctgcggtttccaaggtatcatattctatcttgtctcagggtcttgcctatgctgttctctggaggagactgtcttctgttctcctggttgattccttttctctcataaagattctagttagttgtcacctcctcctcctccacaaagctttccttttagccctcaactcattcaggttgtgttggtgtcaaaccagttctgcctagatccaaaatcctaacattttccacgatatacccaaagcaaagggcctagaggaattactccaccttcccataccttagggacaaccctgtccctttcttaacatctctctctctctctcacttttccctttgccagttcataggcgacagaacaaggcaagtttgagagcactctttggagctttttgggttttctcaccctggtccaatatctccttactgtaccttcacatcttccttttcctcttccagtcccactcctctccccacccacatataggctcctagcgagtaagaccaaatttagctcatttttgtatgcccctaatttatgtacgtttaacgcagcgtttcacagtctctgtactattgacaattggggctgaatatttattgtagggggctgtcctgtgcatcgtaggatgcttagcagaatacctggcctctcttcactagatgccagtagtatcctcccgctagtgcgacaaccaaaaatgtctcggggcggggggctgggtgtggggggtggggagtgtggcgtttacagaactgaattgatatgaatttccaagaaagtccctggctcaaggcctgaactacttgactttggatttttttcagggtataatttgttaaactcttaaaaatttacaccctgctttaaagttcacaacccacgccttgctcatcactgcttcagtg

SEQ ID NO: 587009 - DNA, 4001 bp, Homo sapiens
tgggggtgtctggagcggaagcctcagaccattcaaagcaaagcctggcttcaccatctaatcagggggcgaggaggtagtaacagagacagacatcagagcaaaaagatctgggttcaaacgcttcacaaccccagctccactggctgtcccccagtgtcagccaggcctgagtctgactatcttcagggatgaggcaaagcccttttctaccacccctccctctagcaggcaagccgtgtttcttttgtgcctcagtttccccttcagctagggggatgaaggctgacatgccagaggctattatcctatgtaggggcccatggttcccctgaccacttggttcccacacacaccctcaggtaacctaccaggcgcctaaacatcagcacattacaccacacagccatccgtcaccaggaaaacactcattctgactcaacggagctcaggaaacttgagggcaaccacaggggccgcgggggaagtgtttagagcccatatgcgacttgagggaccatcttcttcctttgaaacctcatggggtttacaccaggggctgggcgctcggccaggaataacaggtctggaggcaaagtggaggccgtggtgccagagcaagtgggggacatgaaggcaggggagcccaggtcccggctccaggatgcccaggaggcaaccatgacataatggggcagacaggctccaactcagggagcctctgggtggagaagacaagccgtggggtcaaatgcccaaaggacacttgacattttccataggaggggaccttagggttctagttcctagcccagggagcggggtggggggtgctcccagggatcagcaggcagggctgccagccaggtggccagccaggggaccagatgaccagatgagactcaatctagtcttgagccttgatccaccccccctccccgacacacccagagaggcttcatttccgtcgctgtcctccactcccggtcaccatcctcctgggctcctcatccctaagggcagaggccaggggaaggggacccacgcaggctgcaggggtctctgggctgggagaaggtgggctctgactcagaacgtttgtgcatcctcctactccccccaaaccccgccccaggagccacaccccaggggtttcccagatacaggtagaaaaatagatccaagtcgcaaggaaccctgaagggtctggaaacgccagccagtgctgcccgaaagcccgaaggtggataggtggaccgggggcgggtgtgacgcccccccccccatacctggggcgggcagtggatccctactgcgaccaagcagagggggagccacaggtgatgggagccacaggtgaccagggtggcccgaggaggccgccaccacccgacgatcaggtttccgcagcgcgccccgcagcggggccccgcgcaggggaccggcaccggcccaccgcggtcccctcgtctgtctacaccaaggaggttcccaccgcggtcccctcgtctgtctacaccgagggggcacgggaggtcagagatgaggggcagtgagggggccagagaaagggcctgctctgcgggagggggaagaggtcccgccaccaaaaccccatcataccctccgaaccccccaaatcaagagggccccgaaaagtttatccaggaccccggactccagccgaccgtccacgtgtcagcgcggccgagctcacgcgagcctgaccccgagtgggtccgaggggcggaacccggaggggggtcgaggtccctggctcgccccgctcccttcagccctggctgggggcgcaggagcggccaccatcctggccgcgggagccgggcgggaagtgtccggcgcgttggcgctggcggcgggcggcgggcggccgcgcgctggggccggactcaccgtgcggagctcctgggttcggtccttcatgctcccgggagtggcagcggcgccggctgcagccgtgtgagccccgcatgcgcgacggccgccccgcggctgcgcagcgccagcccggccccgccccggcccccgggaccccggccccgccccaccccgcccgggccccgcccagaccccgcccagaccccgccccaccccgcacgagcagccccgtggggatcgaagccctggggtctcgtcctggacgttccgcacgcgtgatcgctcccggggatgggtccccagagaccctgctgcctcctctgccccagccctgtctcgttttttatttattatttttggagacagggtctcgctctgtcgcccaggctggagtgctgtggtgcaatcatagctcactgcagccttgagctcctgagctcaggcaatcctcccgcctcagtctcctgggtggctgggactagagttgctcgccactactcctgaataattttcaaatattttgtagagacagggtcttgctatgttactcaggctggtcttgaactcctgtcctcaagcgatcctccctcctcccaaagctctgcgattacaggcgtgagccaccgtgcctggcttccagcctcttcccgacttagcagctcagcatccctgtcccagaatccggtcctcatcctcagatcccttcacttccccagaatttgctgaaggttgtaactccctccttcatttcattaccttgggacctcctgctctcccttctgttccccagccaaaaacctcctggagagttccagtctgggagcctccacccttcccccttgctcccatcatccagtagggactcaggcactggcctcttctttccctaggatttctcagttcacagctctgatgctgcgtgacccacccctttttcctgcaggatgaaggaactcctctatctttttatgtttgtttgtttgtttgattatttatttatgagatggagtttcactcttgtcgcccaggctggagtgcagtggcgctatctcagctctgcctcctgggttcaagcgagtctcctgcctcatcctcccaagtagctgggattacaggtgcccaccaccacgcccggctaattttttgtattttttagtagagacagggtttcaccatgttgagcaggctggtctcaaactcttgacctcttgattctcccgcctcggcctcccaaagtgctgggcttataggcgtgagccaccgtgcccggcctattttttttttttttttttgagacggagtctcactctgttgcccagtctggagtgcagtagcacgatcttggctcactgcaacctccacctcccgagttcaagcaattctcctgcctcagcctcccaagtagcttgagattacaggcacccacaaccacgcctggctaatttttttgtatttttagtagagaaggggtttcaccatgttgtccaggctggtttcgaactcctgacctcaagtgatctgcctgcctcagcctcccaaagtgctgggattacaggtgtgagccactgcacccagccaggaactactctatctttgggaaagagatttgagttatggcccccctctcctcctttccctgcatccccaatcctgaactctggctctaggcctgaggttctattttctcttttttcgtttttgtaaagacggggtctcctcatgttgcccaggctggtctcaaagtcctagcctcaagcgatcctcctggcttgggcttccaaagcactgggattacacttggccaatgtaggttctattttctatctagaagcctggggcctggcttcctctaggactcatgggaaaacctgtggaggagtgggagtggggaggccagtcaacagcagatgttcttttgaaggtccctgccagcatcttgttgcaacagtggtctcgcacacacccccataagcccgctgtgccctccaccacccccagctgtcacttctgtggcccacaccctcttgacctgaagccaagcacatcccttcccttccccaggactgccaaagcattggagctctggagccaatccagccccc

SEQ ID NO: 587010 - DNA, 4001 bp, Homo sapiens
gacactgcttgccctaatgtccccactccaaaataaatgatctattcactgtcccctgaatactggcctatgcttattttttcccgctaggattttatttggccttttttctcctcctttcctgtctaaacatttcccattgttaaatgctcaggccctagtgcccctcctttgagaattctgattccaaggcaagggatctttccctcctctggagttgaatgttccattgagaaacacctactcttccagcatgtctcagcttatctgctgtgtgtgtgtgtgtgtgtgtgtgtgtgtgtgtgtgtgtgtgtgtgtgtgtgtgtgtgtgtgtgtgcgcgcgcgcgcgcgcgcgcttttgagccggagtttagctcttatcacccaggatggagtacaatggcacaatcttggctcacagcaacctccacctcctgggttcaagggattctcctgcctcagcctcctgagtagctgggactacaggcacacgccaccatgcccagccaatttttgtatatttagtagagatggggtttcgccacattagccagtctggtctcaaactcctgacctcaggtgatctgcccgccttgacctcccaaagtgctgggattacaggcataagccaccacacccggctttttttttttttttttttgagacagagtctttctccgtcgcccaagctggagtacagtggggttatctcggctcactgcaacctccctccacctcccgggttcaagcgattctcctgcctcagcctccggagtagttggggctacaggtgtacaccaccacgctgggctaatttttgtatttttagtagagatggggtttcaccatgttagccaggctggtcatgaactcctggcctcaagtgatcggcccgcctcagcctcccagagtgctgggattacaggcatgagccaccttgcctgggggtgttgtttaattttaaaaatatgtatcaggccgggcgcggtggctcacgcctgtaatctcagcactttgggaggccgaggcgggtggatcacgaggtcaggagttcgagaccagcctgaccaacgtggtgaaaccccgtctctactaaaaaaaaaatacaaaaaattagccaggtgtagtggtgcgctaatcccagctactcaggagaatgaggcaggagaaccacttgaacctgacaggcagaggttgcagtgagccaagatcgcgccactgcactccagcctgggctagagagactccgtctcaaaaaaataaataaattcatacatttaagtaataaactcattgtgagcaaggaattctactcgactttctgtctgcgtaaactctacaaatccacttggcctcagccacagtgtctttattcgtaaagcagaaacagtgggaccgtcagagcactgccgggcaggcgagagaagacaggaactgtatgaccacggaagttgttgtccctacaacctatttgctcatctggaacacagaatagtggtcctctaaagcttgcagggctggaggtcgccattatcagcagtggtgtcactaaacctgaacccaagggtctctgcaacttgggaaacgacggcccggatctgaggagatggccccttcctcccaccccgcctaaggactctcagcctccctgaccctacctttccggagctcagagtcccctctggcctccaagggcagaaggaatgggtttggctgaggtcgggggctcgggtctgggacgcgctccacctccccggctgcgcgactatggccaggctccctgtcggagcctctgcctggggccccacctggaaaaatggctcctctaaggcgcttccagcctaaagcccgtcctcttccacctcttgggtgcagactggccctcccactccgaccgcaggtcccccaccggccacacagacggctacgctagaacccagccaaacaccggggttgccaggatggtcccacagctttcctttccgactcccggaagtggccgtgatctcacgagatcccggaggcgagcgcgaccggaagtccggtcactctcgcgaggccccagagagcaggcgctgggcagtgtggaggtcgttggagtcacttccccgtcaccagctcctgtgcctgccagtcggtgcccctcccgctccagccatgctctccgccctcgcccggcctgccagcgctgctctccgccgcagcttcagcacctcggcccaggtaggccagacgaggggcggcctgcaggcggaggccccccggcccgggccacgtgcgtccccggttcgcgggcagctctgaccctctccaggccagcctggaccgcagggatgcccggcactggctggagactgtggcgcccggggcaggccctgacactggcctggaggtgcgggggagaaagccggggaaaagggggcgaggtagtcccgctccagggccggtccatttgtcagggttcccccaggtctcccagatttcccagaggacctgctcttggcttgcacgccttcaaggttgggaaaccagggctctgcatctgaaagtaaacttacgtttttttctgcagcgttccattgctttgacgtagctaatctccttgcagcatccgtgtgagttgtgcgtgaataaaagaaatcgtatacttcctaattccatagtatggacaaaccgaggctagagaactgggccagggttacagtcatttggccagaggattagaattcagcgcttctgacctgaagacggcttcctcttaacctttttggaggatctctcctgctgtgggcggactgagcctgccgccaggtgtcttaacagtgcttgacttggcccgcgaccacttaagcctaggagcctaggctatttttagccatcttctagaatggtggttcttaaactctgcagtgtgtcagaatcaccagaaagctaataaaaaacagacgtctgggttcattgaagaagcttaagactgcgggggggggggggggggtccgcatttttaccaggtgaatctaattaaacctaattttgagaacccaggaggtgctcgcattgccttttaattacgacgcccaagagggaggtaattttaaaggggaatccaaatttatcatcgaagttctcgagtttcctgtacatccagttcatttgaaaaataaatacaaatgctcctggattgatggctacttcccatacccatcgcaagttggtaatatcctaagtcaaaaggcgagtttaactttgtgtattttcaacttgcaatgggttcccacaggcaaccccattgtaagttgaatgtaccaaatgcttttgcgctgcggtgaagtgggggcccagctgtatacagataagtacattaagtacctgtgcttgccaacaactatgctgggtgctgcaggggataccaagataagtgagaagtgacacttgatatgggacaggaatgagtaaacttaggacaggtggaagcgatgaaggtcttagggaatgagtaaacttaggacaggtggaggcgatgaaggtcttagggaatgagtaaacaggacaggagggatgaggtgtgggggaggggcagccaaccaaagagaggacaggggtgtccagggagaggttgagttttggtaggaccttcagatatccgacatatttattgagctaggtactggaaatacagcggtgaacaaaacacagaagtccctgctctcacggaaattactagatattttacttattgccccactcattataaagtatcttaaaatagtgatgaacatgcaagaaaaatggggattgtagggtgcttgtgttagggaagagggtaccaattttatttactttttttgatgcagtgcctcgccctgtcgacaggctggagtgcagtggcgtgatctcggttcactgcagcctccacctcccaggttggagcgattctcctgcctcagcctcccgaatagctgggactacaggcgcgcaccaccgtgcccagctaatttttg

SEQ ID NO: 587011 - DNA, 4001 bp, Homo sapiens
gttacccaggctggagtgcagtggcacaatagcggatcactgcagcttcaacctcctaggactcaagccatcccacctcagcctcccaagcaactgggactacaggcgcacgccaccaagcccggctaattttttttgtatttttggtagaaatggggcttcacgatgttgcccaggctggtcttcaactcctgggctcaagcaatcgtcccacctaggtcattttattcaataaatattcaaatgagcaattcccaagcattaagttaaacactaaagacaatgtccagaaaggtgaatttttggccaggacagaactactgtatttaataaagtggataggctggagtcctccgaccttaattgtatcactaagccttaatggcaacgtgctaccttgattaagtctatcacttgtatctacagaagaaacgaaatgtagtgaattgaatttccacagaataaacaaacaaaaaaactgtctgtgtgtgtctccattcatcaaggaggatagaagctgagaagataccacactcgtcagcttgggatgtcacagaacatgtcaaagagacagcgaggagtagcagctacaagagggtgaatggaaatcacaggtccaggctacccgttaggctatgatttaatgagtcctaaagctcttttaagattctgtatcctacgccaggcgcggtggctcacgcatgaaatcccagcacttcgggaggcagaggcaggcggatcacttgagcccaggaatttgagaccagcctggccaacatggtgaaacccgtctttactaaaaatacaaaaaaattagccgggcatgtggcacatgcctgtaatctcggctactctagaaagctgaggcaagagaatcgcttgaacccgcgaggcagaggttgtggtgaaccaagatcgcgccactgcactccagcctgggcgacagagcgagactgtctcaaaaaaaaaaaaaaaaatcctgcatcctgcaactaatttcaagattcatagtgggccgcgcgcataatcatagagattacgtctgtaatctcaacactttgggaggccgaggcgggaggataacttgaggtcaggaattcgagaccagcctggccaatatggcgaaaccccgtctctactaaaaatacaaaaattagttgggcgtggtggcgcatgcctataatcccagctactcggaaggctgaagcaggaaaatctcctgaacacgggaggaggaggttgcagtgagccgagatcgcgccactgcagtccagcctgggcgagacagcgagactccgtctcaaaaaaaagagaaaaaaagaaaaaaggaaaaaaaagattcatagtggattaccattcccaaattcagagggagtaaagaaagttctataacactgtagtaaagctaaatttcatcctctaaataaaattctgcaacaggtaactgtacaagggcatcttttattgtacatgaagtgtcaagttattcaaagcagcgggctaaagtcctttctgaaatgtggcttggtgtgcattttcgaagttacttaaacttggcggacgaaaggacaggagtaaagaggccccaaacgcgagccgcgggacgcgcaggagcgggaccccacggcgcacggagccctcggtcacaacaacgcacgggacagaggcgaccctgggcggccagagcggggcaggccggccgcaggcccacggaacggggttgcagggaggcgagcaaagccaccgctaaggggtcagcagagacttcagaccctaattgctctcctcagggcgcccgaggaggcaagctggggcagggatccctttagccacccagaccgaatctcggagggtacctgactgcgggcggccagtccacagccccctcccgccgccccggccggagaagaggcaggttctgcgcagagctgccaccctcgccagcgtcgccagcatcgcgtgcgtctcagatggcatcggtcccggtgcaagcggcgaactccgtgcggcgccacccgccgccactggggggcgcccacggacgccgcagaccccgcccccgccgggcggggctgagcactagtcgcctgctgggccagcttctagtctgtcggtcagaccaagggcactcagactggaaaggttgttgctgggcttgggtgtccgtcctttcctgtctccttttcttcctcttttcacttaaatccactgagtctctcgccaagtcagtgatttaggtaatcccgccgcccctggcggaacctttgtgacgccggaactgatgtgccgtagggtggctgcggtcggaggactgttttggtaaaggactagcagttctctgcggagggccggttgatacagttccggtgggagaacgcggctgcgaggttttcggctttggctcctgatatgcagcgacagaattttcggcccccaactcctccttaccctggtccgggtggaggaggttggggtagcggaagcagcttccggggaaccccgggcgggggcggaccacggccgccctcccctcgagacgggtacgggagtccgcaccacacgccgccgtacgggccccggtctaggccgtacgggagcagtcactctccgcgacacggcggcagcttcccggggggccggttcgggtctccgtcccctggcggctaccctggctcctactccaggtcccccgcggggtcccagcagcaattcggctactccccagggcagcagcagacccacccccaggtaataataatagccagcgtttgccgagctcttactttatggcaggcacggtactaatattccctttacgtggattattttgtctaatcctctctgaggtactattgttagcccaattttgcagatgagcgaactgaggcttagagaagttgagtgacttccggaagattatccgaaagagtggcagagccgtacgttctgttttcgagccctcgtgcttttaaccaatacactgccacccgtacacagattttcctaattctccatttcctcctgtttgccaaaggccttgccagtttgtttcaagaaatagttctttttcttttttttttttttttttttatctttctttcgagctacactggcttctgctccaacttccctgaaaagaaaatcggtggtagtggaagttttccattcctttagtgagagtaaatacaaaagacagagagagtatctctagcatgtctgggatttctgtggtttacaacttgcaactacgtggttttccaacttgctgtattctacaccaaccccctaccccttttgagcctggagctaaggagtaaagaaaatgttcatgagctagaaaggttctagaaactttaaaactatagtattgttttctcctgaaaaaagtgaaaatttcgagggaaaattgaatataattacttgatttcatcactgcttgtatttaattactgcaaagttactacattagacacaaaagtatttgagatgacagtggtcatggaattataaataaatgagaataacgaattgctttaagtactttttttaaaaaataggaacacttgattaaaggaagcatggactttgtaattgaacattatttaggttcaagtcacaacttttaagcagcaatgtgattcccgctaacctttagctaaaggaagaagtaccaattatctttactaagtgtttttttaactgattttttttctaaagggttctccaaggacatctacaccatttggatcagggcgtgttagagaaaaaagaatgtctaatgagttggaaaattatttcaagccttcaatgcttgaagatccttgggctggcctagaaccagtatctgtagtggatataagccaacaatacagcaatactcaaacattcacaggcaaaaaaggaagatacttttgttaacatttctgaaattcaactggaagcttcatgtgtcaggaacatcttggacaaaactttaagttgtgttgatataaatttaccca

SEQ ID NO: 587012 - DNA, 4001 bp, Homo sapiens
agagtccttgtcttttgatgttcctcaagatcctatctttggatctcttattctgacacactctcagtgatttcatccattttcagtttttcgttttttttgttttgttttgtttttgatttttttttttttttttttttttgtgaggcggagccttgctctgttgtcccggtcagagtgcagtggcccgatctcggaaaactgcaacctccgcctcctgggttcaagcgattctcccgcctcagcctcctgaatagctgggactacaggcgcccgccaccacgcccggctaatttttttgtatttttagtagagacggggtttcaccatgttgggcaggctgctcgaactcctgacctcgtgatccgcccgcctcaggctcttaaagtgctgggatttcaagcgtgagccacctcacctggcccattttcagtttctttcacaaatatattgcaaagggaaaaaacggatcatcctggcgtggtggcttacgcctgtaatcccagcactttgggaaactgaggcagggattgcttgaggctgcagtcagctatgatggaaccattcactccagcctgggcaacacgtcgagaccttgccccccgccccaccaaaaataaataaataaataaataaaaggagtaagtagggaaatctcagattgaatcggaattaagaaataacatacaattgcaatgtatgagctttattttgtccctaattcagccagcaaacgttaaaaaccatttatgagataatagatgaatctgaacagactgaatatattattaagaagcactgtcaattttttaggtgagaaacggtttgactattcaagcttaataaatccctagaataaaatgggataatgtctggacccacttccaaatggctccaggagagggggagtgtgcgattccgcaggagcaggactggccacaaactggcagctatttaagctggccgagtacgtgggggcgggggtcgttcctcgttatattctcctttttccttttttttttttttttttttttgagacggagtctcgctgtcgcccaggctggagtgcagtggcgctatctccgctcactgcaggctccaccccccggggttcacgccattctcctgcctcagcctccctagtagctgggactacaagcgcccgccatcacgcccggctaattttttgaatttttagtagagacggggtttcactgtgttagccaggatggtctcgatttcctgacctcgtgatccgcccgcctcggcctcccaaagtgctgggattacaggcgtgagccaccgcgtccggccttttttttttttttttttttttttttttgagataaagtatcgatctgtcgcccaggctggaatgcaatggcacgatctcggctcactgcaacctccgcctcctgggttcaagcgagtctcctgtctcagcctcccgagtagctgggattacaggcacccgccgccacgcccggatagttgtgtttttttgtttttgtatttttgtagagacagggtttcacgttggccaggctggtctccaactcctgacctcaagtgatccacccgcctcggcctcccaaagtgctgggattacaggctcgagccaccgcgcccggcctctctttcccttttttaggtttgaaagattccacaacaagaagttgaaaagtataaggcggtgaggcgccacgcgcaccgagagctacctccccagcctgccgctgcagccgcatcccggaagccggcagaagggcctaaggctctctcccgtcagggcggagcgccccatccccttcccagcgcccccaggatggacggccggttcactgacctagcttgagccacgcgccgaccaggagcgacagcaggggcagcagcggtaacccatgccgggccatcaggactgccgcgctgcgccgcgtacacccacggccccgctgcgcatgcgccctcatgcaccgcagcggcagtcgacccctatgcacatgcgcaggctgcgccaccacccgccccgcacccaatagttcagcagggggaaactgacggagcgaggcggaggactggccacaccaccttcaggaccgcccagggaattaaggaaaaccacgttgagggtcccggccgttccagaggccccttcactacttttctgaacctttggacagttttcattccccttaagattgcttttgtgcgtcataccattgcaagaacagaaaggaggtttcaacttaacatttattgcacaactcacttcaggccactgctgacatcccaaaacacagcctagtaacacacaacttcaccttcaaggactgcagagatagaccaactatatataaataatctcgtggaaacgtaatttgggtgagaaaaatatgacgctagagactttgcgatgaatattttgcctaagttcagaagcttgaaaatacagttggcctacaatctcaaatttcacccaataaccgtggcccttagtcaccacaccttccatcatctttttacctctgcctgttcttgccctttacagttgcagctctctcaactcccttgcctctagttgactcctcttcccatttcctacaactttgtggcgggagcattttagcaaagccatttcaaaggcgttcaaagtccaactgatccaatgcatttactcagaaatttataccaacagggatgctttcaatattttaaattacttgagcatttatattagcataaaaattttaaaaccaaatgcttaacaatagggtagttggataatttaacatacgtccacataaaattaaaccattaaaatttgcttttcaagaaatatttaataacaaggtaagtaacatatgcttatctaacatggaattttatgtcactgctgctaaagcaaaacatcctgttcactggataaaagacctgctttatgtgtatacacttcagtgcaatttttaaaaatactataatttcagaacttccaaatttcaacagatgccagtgttctctccttttttcatatgggaaaatttctttcaaaattatttgaagcttggacaaaaattccacagctgtaatcctcaggatcactttgcagtcttcaagattcagatacagaggaagcttcaattcaacctttcagagaagacattccagctcgcatgatctcatcaaccaagagaatgttggtggcaatcacagtgctgaaagggggacaaaaataagatggctcagatgattaggagccctaattcgactcaacttcccacttccaaccaagctgcacacattacatccaattaaatttcccccttcccctctacacatcagagggctagttcagtttccatacttccagctgatcacattattcatgggggaaaggagcaactaaacagagaacaccaaatgaaaaaagtatgattctctaacagtttagttttcattttcccaaacttaccaggagtgaagaagctgtttctttacacaatagttatcccatacgcctacttctgctgccaccattggctcacctaaaaggcaaccaaatcttaaaataagttcagtcagtaagaaccaacaatattgtgtgcagctttgcttatcactgatgactcatttcctccagtattaactatgagaattcaaagcttctctgttagcccaattttctactctaaaccatgacccccgtccacaatatttgatgaatgtctgacttatacttagaagtcctgaacacccctctcttcttctggatacatttctgtttactcatactgaagtatagcacttcaactataatctgactaaaatggactgatcatttccctcattccagaaaccttttctattaatgttgacaataggtcttgcacatactgcatggaggtacctgttatctcctactttgtacttaatttgtgttgttttgttacaggaacctaagatcagggctgtcaccatttcactagatttctacatcccctttt

SEQ ID NO: 587013 - DNA, 4001 bp, Homo sapiens
cagcccaggaccaggaggacccaggcactgatgtccagaccagccctgaggcccccacctccagtctccggctgtgctccacgggcctccactcaggtgaggcggctggtccttccctctggtcctgatccagagctggacctccccgaggcactccggccatctcctggacagcccctgacctctatcctgcagcaacctcagagagccccccacctttaaatcctttcaggagttcccagtgcccgagagtccaaattcccagcccagcctacaccatccggccagcccctgcccaccaagagtctaaattcccagcccagcctacaccatccggccagcccctgcccaccaagagtctaaattcccagcccagcctacaccatccagccagcccctgcccaccaagagtctaaattcccagcccagcctacaaccactccggccagcccctgcccaccttccctctgcatttcccactccagctgccacagaggtctgcccacaggtctcactgaaggaaggctgtgaatttcagtgaaattaagtgttgctctcccaaggtaaagaaacagaggcattttaaaaactctattaaaataggtcagaaaagcaaaaataagtgaccacaaatcactgtttcatgctgcacggtctgaaggaagcagcagtctcccctgagctggcctgcccgttctgttctcaccactacaggactcttagaaaacagagtgtgttgctatggaagtgtgatggacctagaactgtgaattaaaaactcgatcatcgaatgtgagctctgactaatgctggtaacaagtatttttcttaaaatattttctaattttcttacagtttccattacattttcaccctttagaggataacccactgagaccgggcacggtggctcacgcctggaatcccagcactttgggaggccgaggtgggtggatcacctgaggtcaggagctcgagattggcctggtccacatggtgaaaccccatctctattaaaaatacaaaaattagctgggcgtggtggcgcacgtctgtaatcccagctactccagaggctgaggcagaagaactgcttgaatctgggaggcggatgttgcagtgagccgagattgcaccactgcactctagcctgggcgacggtgagactctgtctccaaaaaaacgaaaaaaaaaaaaaaggataagccactgaaaaaaattacacaagcattttcctggtgccttaaacatctgctgggtgcacaagttttccaacctgctgatcaaatccgggcccgtctagctgtgtaccttcccttgctgctgacccgtaatgtcatcaaacgcaaacttcgtttcagtcgctctttctacttggaaaactgaaagcagaaggggcagggcagcgcctcttcagactccaatgtcttggttcagtggatcggaatatgaataaaagcagaaaactccgcctcagacaaaagttgtgttctcaaaaccctgagcttcaacgctgttctatgatgtttcctttgaaatgggaaataattttccaggttatttctgttaacttaaaaataccaagccactgatacgttctcacaaacaccaggcatcaccacagagacatcttctcaacatcacaaccacctgggtggggtcgaagccagcaagccatgtgcgatgactaaccacccagtcaccaggatgaacagattcagtttaccttaaagccgtaagaaaaaaccacctctaaagccataagatacagtttattattttttttcaccttcaaaatacagcatgtagtcggtagtactatggagttcctgttaaggtccacgccaccgcgacagcgagtgggcattgcaaggccaggaccccacgtgcaggtgcacactcacctgagcgcatacgtgtagcccgtgttctccggcacacactggggaggactgtacatgtgaagccgagaaaaatccatgttcaccacttcaaaccatactgcagagggcgggaaagaaatgcagagtgttttaacgggcaggaaatcgagcgcattcctgtctcagtcaacctgagctgcctacacgcaactcaactcaggtcaccctcaaaactcacaggaaacacggccagcagcagtgttttctaaacagacgagacaagtgtttccatagttacaagcccaggaacacttctatcataatctagtcccctcatatatcctgagaaaaagaccaggggaaccctaaagtggctgactcgtgaaaccaggggcaccttccaagaaacacggagagaaactcagagctctcttcaagatgtgtttttaaatcctcactgtgtcaaaatgttctcggtcttctgaaatcagtttttattttactaactaaaatagaactacctgctacagcgtggtcaagcagcagcgtatgcgttcctagatggctgaagctctcacaagcatctcagaatcagaaaagaaactgcagggtgaataacaaaaaagcttaaggcactatttacacttttttcctcaccaaaaaacaggatattttttaggttagaaagtgttgagtatattgtttctcaggttgtcatctagatttatttggaatgactcatactttcctctggctaaaaatactcacatgcacacaccctgactttcaaaaagtcctcgtagaagcaatgtgaatcacagtcggctgctgaaatatctgagggagatataactaaaagaacctcctggacaaaagacacttttgtacaaataactgagctccataaaccaagccaaaagtactttaattcatgctaccttctttgaaataaagtatcacagaaataaagaccattgtttacatataaaaattgtactacacctacaagtatcgacaagcatgatgaaactcctgcattttaaaacatgtttcggccgggtgcggtggctcacgcctggaatcccagcactttgggaggccgaggtgggcggatcacgaggtcaggagatcgagaccatcctcgctaacacggtgaaaccccgtctctactaaaaatacaaaaattagccaggcgtggtggcgggcacctgtagtcccagctactcgggaggctgaggcaggagaatggcatgaacccgggaggcggagcttgcagtgagccgagatcgtaccactgtacgccagcctgggtgacagagcgagattccatctcaaaaaaaaaaaaaaaagcacgtttcaaaactcttgttctttccagggacacccagcccagcgtccgacccagacacaggctcggcaagtccagttcacacttgctcggcattccaggaacttacgcttcaacagccttttgcaaataaaactaactgtgatcacttaatccacgtaatagttaatacctgtttaactgtctctctcccacctgtctacctactttaaccaacacctaaatctagattcaacccacacgcagaggagcccggcacaggacagggccttggcctggatccaatgtaggctaccctccacctatacaccatgcctgggctcctgaggtgcgcaggcctgctctggcagcttctgcagaacccagccccgcccagcagcaatgcaacaatgggctctgcctgcactgccgagcaacaacccaaagctgggctcagcgaacgcccactcccgctataccctgggggacactgggctaactcagtgctatggacacccactcccgctcccaccctgggggacactgggctaactcagtagttctatggacatccactcctgctcagatgttgggctaatttagcaataaggccattagggcagccaggccagagaaaagcaaagcaaggaagatggggatggtagggaaaagaggtcacactccaggttcagcaggtgctgaggaagtgaggatgtggagtctgtgattacagacccttaatctgtcttcatcattctgatttcactttcataatcacgtgaattttaagt

SEQ ID NO: 587014 - DNA, 4001 bp, Homo sapiens
ggcagttcctcaaaaagctaaacacagagttaccatatgacctggcaactccattccttggtatataaccaaagaattgaaaacagatgctcaaacaaaaactcatccacaaatgttcatagtagctgcattactcacactagccaacaggtgcaaacagcccaagtgtccatcaacagactaaaggataaacataatgtggtatatctatacaatggacaattattcagtcataaaaaggaatggaatactgatacagtctacaacatgcgtgaactctgaagacattatcttaagtgaaagaggccagacacaagcggctgcatattgtatgattccatttacatgaaatgtccagaacagcccaattcagagagacagaaagcagattagccgttgccggggcctggggagacggaagaatgggcagtggctgcttaacaggtatagggtttccatctgggatgatgaaaaagttatgtaactaggtggtgatgttgttttacgttacgtgtattttagcacaatcaaaaacaaaaagcaggtgaatgagaggatactccatttatgaagtaagaacatattacaaattttaaaggaggaaaaaaaaacagctctgggaaatttaaaataccatggccaaactaaaatgctaaatagatatactggaagaaaaagaggaaatctagaaagtagaacaaacattaaatgggagaaagacaagaaaattataaagccagcccaagccttccagcccaaacagtagtatttccagaacagtcagaaaaaaagggtaaacaaagaaaaggaaattattagagaaataatttgagaaaactaaaggcttcaaaaaactatcaagtgtccaacaacagatgagataaaccaaaacacacggtgtttctccacagtggagatgtagggagtaaaaacagattacacacaaaagccttcatacaaagctttagcaattagagccgcaagcacttcatgggcaatactatgactgaagcttagaagacacaattatgggcagcttcccacccggaatcagagccagacgcagcaaccacaagctgcaaagcgagagcagagacctcggaccgcaccgcccacctgtcctggggagccctggggagccgggagaaatcctccccatgacggtgacagtggcaaggtgttccccgccgctgcttattttgcaccagacaccattctgggcactttgaaggcgcaacagggcgcggagaccacgcgcgcgcctccaggcaggctggggcgaggggatcgcttgagcctaggagtccgacctgggcagcatggagagaccacaaccctacaaaaaatacgactatcagccgggcgcggtggctcacgcctgtgatccgagcgcttcgggaggcggaggcgggaggatagctcgcgctcaggaggtcgagaccagcctgggaaacacagcgagaccccccctcttaaataaaaccgtcttcccaccaccccacccacggccccgccgctacttccaggggctgggaccccgcaacggggtccaggcgggcagcccgggccgaggcctgagaacgcggggaggacgctcctccacgcccagcccgggccgcccgccgcggcctcccgcgcctctccccgctccgcccccgaccccgcgccacgagccggctggcgacaccccggggaggagcaggacccctgcgccacgaccgccagggtctccgggcgtcttcacctgcgcgggccggggtagctgcggggcgcgggacgggcgggggcggcagccgttggcccaggaggccctggcgcagcccgcgctgagggcgcccaggccgcgaccccgcgtccccccggcccccgggcccccgcctcgcgtccccgcagcccggcgcccgccccggggtgcccttggcccggcccgccgggagctcacctgcctcgcgccgccgcctcaggcctcgtctgcgccgcccaggcccgagaagacgctctgcccacgccagccaatcgcgggccgcgccccgggccgagggcgggagcaacgcaggccttcaccagtcccgagcgcgccacccgaagcgttctggccaatgacgaggcggctacgggccgcgggcggaggggcgaggaggactccaggcgggggaaggggagggggagagggagggagggggaggggcctggatgcgtcacggggtgggacgggcgaggccacgtcccggtatgggggctgcacctggaggagggggactgcattcgggggaaaggcctgcatctgagggagggctccgcatttaggggaggggtctgcacctgctggggggggtttgcatctgggggaggggcccgcatctgggggagggatctgcacctgggggaggggtctgcacctgggggaggggtctgcacctgggggaggggtctgcatcgcggagggctctgcccctcagatacgcggtctacgttggggaggggtctgcatctgggggaagggtctgcatcttcggaaaggtgtgtgcatctgggggagggcgtccgcatcttggggagaggtttggatccgggggaggggtctgcatctccatgagagggtctgaatctccaggagggcgtccgcgtcttgggggaggggcagctgcggctccgggaggcagcccccacttccgacggggctcacctcggccagtgcctccttggccttccgcacgtctcccattgctggccgccgcccccaccccaattccccgccgctccgggcgtgcgcaggcgctcgcaggccgggctcctcccgcggcccctcctccccaggcgcccttctggggaatgtgtggggtctgcacgcgaggtctcctgcagggcccctgctgatggaaacgccggctcttcccgcgtggaattcgcaggttctcttctccgtgctggggactgcaccgcgtcttgcaaatactgatttgttctttgcacttttaaaacgaagtgtaatttacatacaatcatgttcaccttttttgctcttttgttttttttttgagacaaggtctccctcccgttgtccaggctggagtgcagtggcgcagtcatagctcactgtaacctcaacctccccggcccaggtgatcctcccacctcagactcccgagtagctgggactacaggcgcgcctggcttttttttttttttttttttgaaacggagtctctcaccatcgcctgggctggagtgcatttgcgcgatctcggctcattgcaacttctgcctgccgggttcaagcgattctcctgcctcagtctccccagtagctgggattacaggtacctgccaccacccccagctaattttttgtatttttagtagagacagggttacaccatgttggccagactggtcttgaactcctgatctcgtgattcgcctgcctcgggctcccaaagtgctgggattacaggtgtgagccaccgcacccggcctttttttggtatatttttgtaaacatgggggtctcactatgttgtccaggctggtcttgaactcctgacctcaagtgatcctcccaccttagccccccaaagtgctgggataacaggcatgagccaccgcacccggccaataaggcctttatttatttacttatttttgagacaatttcgctcttgttatccaggctggagtacaatggcacgatctcggctcactgcaacctccacctcccgggttcaagcaattcttgtgcctcagcctcctgagtagctgggattacaggtgcccaccaccacatccggataatttttgtatttttagtagagacggggtttcaccatgttggccaggctggtctggaactcctgtttttttcctttttgttttgctttttgttgttgttgtttagagacagggtctcgctctgtcatccaggctggagtgatcacgcagtggtatgatcatagcgcactgcagcctcgccgtcccatgttcaagccattctcccacgtcag

SEQ ID NO: 587015 - DNA, 4001 bp, Homo sapiens
agacgcagcaaccacaagctgcaaagcgagagcagagacctcggaccgcaccgcccacctgtcctggggagccctggggagccgggagaaatcctccccatgacggtgacagtggcaaggtgttccccgccgctgcttattttgcaccagacaccattctgggcactttgaaggcgcaacagggcgcggagaccacgcgcgcgcctccaggcaggctggggcgaggggatcgcttgagcctaggagtccgacctgggcagcatggagagaccacaaccctacaaaaaatacgactatcagccgggcgcggtggctcacgcctgtgatccgagcgcttcgggaggcggaggcgggaggatagctcgcgctcaggaggtcgagaccagcctgggaaacacagcgagaccccccctcttaaataaaaccgtcttcccaccaccccacccacggccccgccgctacttccaggggctgggaccccgcaacggggtccaggcgggcagcccgggccgaggcctgagaacgcggggaggacgctcctccacgcccagcccgggccgcccgccgcggcctcccgcgcctctccccgctccgcccccgaccccgcgccacgagccggctggcgacaccccggggaggagcaggacccctgcgccacgaccgccagggtctccgggcgtcttcacctgcgcgggccggggtagctgcggggcgcgggacgggcgggggcggcagccgttggcccaggaggccctggcgcagcccgcgctgagggcgcccaggccgcgaccccgcgtccccccggcccccgggcccccgcctcgcgtccccgcagcccggcgcccgccccggggtgcccttggcccggcccgccgggagctcacctgcctcgcgccgccgcctcaggcctcgtctgcgccgcccaggcccgagaagacgctctgcccacgccagccaatcgcgggccgcgccccgggccgagggcgggagcaacgcaggccttcaccagtcccgagcgcgccacccgaagcgttctggccaatgacgaggcggctacgggccgcgggcggaggggcgaggaggactccaggcgggggaaggggagggggagagggagggagggggaggggcctggatgcgtcacggggtgggacgggcgaggccacgtcccggtatgggggctgcacctggaggagggggactgcattcgggggaaaggcctgcatctgagggagggctccgcatttaggggaggggtctgcacctgctggggggggtttgcatctgggggaggggcccgcatctgggggagggatctgcacctgggggaggggtctgcacctgggggaggggtctgcacctgggggaggggtctgcatcgcggagggctctgcccctcagatacgcggtctacgttggggaggggtctgcatctgggggaagggtctgcatcttcggaaaggtgtgtgcatctgggggagggcgtccgcatcttggggagaggtttggatccgggggaggggtctgcatctccatgagagggtctgaatctccaggagggcgtccgcgtcttgggggaggggcagctgcggctccgggaggcagcccccacttccgacggggctcacctcggccagtgcctccttggccttccgcacgtctcccattgctggccgccgcccccaccccaattccccgccgctccgggcgtgcgcaggcgctcgcaggccgggctcctcccgcggcccctcctccccaggcgcccttctggggaatgtgtggggtctgcacgcgaggtctcctgcagggcccctgctgatggaaacgccggctcttcccgcgtggaattcgcaggttctcttctccgtgctggggactgcaccgcgtcttgcaaatactgatttgttctttgcacttttaaaacgaagtgtaatttacatacaatcatgttcaccttttttgctcttttgttttttttttgagacaaggtctccctcccgttgtccaggctggagtgcagtggcgcagtcatagctcactgtaacctcaacctccccggcccaggtgatcctcccacctcagactcccgagtagctgggactacaggcgcgcctggcttttttttttttttttttttgaaacggagtctctcaccatcgcctgggctggagtgcatttgcgcgatctcggctcattgcaacttctgcctgccgggttcaagcgattctcctgcctcagtctccccagtagctgggattacaggtacctgccaccacccccagctaattttttgtatttttagtagagacagggttacaccatgttggccagactggtcttgaactcctgatctcgtgattcgcctgcctcgggctcccaaagtgctgggattacaggtgtgagccaccgcacccggcctttttttggtatatttttgtaaacatgggggtctcactatgttgtccaggctggtcttgaactcctgacctcaagtgatcctcccaccttagccccccaaagtgctgggataacaggcatgagccaccgcacccggccaataaggcctttatttatttacttatttttgagacaatttcgctcttgttatccaggctggagtacaatggcacgatctcggctcactgcaacctccacctcccgggttcaagcaattcttgtgcctcagcctcctgagtagctgggattacaggtgcccaccaccacatccggataatttttgtatttttagtagagacggggtttcaccatgttggccaggctggtctggaactcctgtttttttcctttttgttttgctttttgttgttgttgtttagagacagggtctcgctctgtcatccaggctggagtgatcacgcagtggtatgatcatagcgcactgcagcctcgccgtcccatgttcaagccattctcccacgtcagcctcctgagtcgctgagactacaggcagacaccaccatgtctggctaattttaaatctttttgtacagatggagtctcactatattgcccaggctggtctttttttttttttttttttttttttttttgagacagtctctctgtcgcccaggctggagtgcagtggcgctatctcggctcagtgcaagctctgccccccgggggttcacgccattctcctgcctcagcctcccaagtagctgggactacaggcgcctgccacctcgcctggctaattttttgtatttttagtagagacggggtttcaccgtgttagccaggatggtctcgatctcctgacctcgtgatccgcccgcctcggcctcccaaagtgctgggattacaggcgtgagccaccgcgcccggcttcccaggctggtcttgagctcttggtctgaaacgatcctctgcctcagcgtccccccgcaccctctaccacatctgactactttttttttttttaaaccaagcattaactctgatggaccttacattgctgctaaaagcctgcattagatctcctttttaaacagacacatctgtttgggggaaagattttggcagatggccgtgccagaacccaccgcctgggtctgtcactagagaagatggacattcaaatactaggatcgtgcccccaaaaaggctggcctccaccctgcccaccctggggccagtacggcctccccgtaaggccccggtccgtggagtgggttaagggaggaacaagaacaagcaggtaggagagtctggggggcttctgtgtctcccgaaacacagcttgggtctgttttctttggcctggccaactgtcctcatttcagaagaggacattggacaacaggctgggcttcagttcctaaggcttttcccatcttcccagcactgcagagcaggacggagcaggtagtgcagccactgacatttcaaagcaagggaaacggaggcaggggccaggccggcagcctggctggagtgagaccggacgcagcgaccccgtaggcaggctcgctgtcttc

SEQ ID NO: 587016 - DNA, 4001 bp, Homo sapiens
cctgttcccagtcttaagtctgtgagagtcaactgtgctgttgtgtatagttgtggttcattcattcttataactgtgtagtatttcattgtgtgaatatatcatgtgggtatccatcctaacattgatgggtgtttggggctatgataaacaatgcagttataaatattactacaagcaatgcagctatgaacattcttgtacatggtttctgatgaagacaagtatgtatttcatttaagtgtattttcaagagagacattgatgggtcataggatacatgcataatccgttgcagtagattttgctcagtgttacaaagtggttgtaatgacaaccttttcacatctaaccttttaaaaagccctaaagggtggatggggagggaagctaaaatgatcacattaatctaacgtgaaggctataaacttccggataaagtattacaagttggcaaactaaaaatttctacttaaaacataagaaaaatcacattaagatggaccattcattaactgtattcactagagtgggccgcctaattctcccagtacagaatctttaagtagcttatctaccctacataaagcagtcatacctattagccatccaagagtgtgacagtgtggaaaccaactaagaagagaattttcttaactctcttcccctccagggaagtgtattctggaacctcttccttttaactattattggagatgtggagagtggtagggggtccactgtattaaaaaagttgttcataggtcagttatggtctacaagagctcttttggtgggctgcattaagtgaaaattatcacattaccatatttaccaaagattaactccagtgtttttcgttttttgtttttcactagaaaactggctgccaggctctgcattgcaaaattccttcggtgccttcacccagccagtgggattctgccatttggggcaagcatattttgttattactgtgattttgaaatgctgctctacttgtactaataactttgtagcattccttttatttttattgacagttttgttctgtgcaagtgcttcattgttaccaataggaaggttatttcattacttgtagtttttgttttcccagcaggcagcacatgggcagggcgtttgtaaataggtttagggtatttggattccctgctataataatccccacatatgttctcactagaggaaacagggtgattcactcaaaatgtgcatcccctaccagagtctttagtcaattatcacccaagaatgtaataaatgccactctgtgcccagagtcctgagcccggtgctaagctctgcataccaccaagactatacaagctagcccaatgacaaaaaaaaaaaaaaaaaaaaaaaaaaaaagtgaattatctggaagcttttaagttcctgctgctgtggctcattcttttaaagagggtggctctcctttcttaatccttctcccaagtctgctgttattaatccagataccgttgacatagaagtattgtgatcaagtgtaagactgtgatgaagagaaaccttcaaaggaaactattgaaaatgattttctctataaagggagaaaatactgtcgggtaacaggtaacagatgaacagacacaagtgacagatgtaacacataaaacctacaatttcaggcacaccgttctgccatgtttacctacccattcgcatcaggattttcgtcctctgataacaaagcattgccactggcgctaccgctggcgtcttcagagcaacgtctaaaaaacatggcagcccttcttgcctttgtttttccactcatgatcccctaccaaagaacaaacagctggtaggatgaagagcaacatttgtcctcattcctattttatgaaaaacatgaagctatacatacagtttctaaatttgttttgtataatgtcttcttcctccacgggtgtttcttcttgaagacggaattttgaaaagcttctgattcttctgttgcatcatcctccgtgacacctcataatgcagatggccaccacgcccagccagggcatggacaggcaaccacctctctgcttcaagggcctaattgtaccatatgtcacacccactgaataatacaaaggcccccccatgtacctaccgcttttcgatagcaaatctggatgttttgctgtgtttgcttcagtgcttttctaataaagaaaatatcagaaatataatagtagacccccaagtatccctgaatctcagcactcttattttccacagataactacaacctgaaaattgatatactctattctcattatttttgatactttactatgtaaatctgtatctataaataataccattttcatgcttaaaacataaactaaatgttatgccactctaggttttcttacaatattatttatcttgagacattaactccactcattttaattgctctatggtatttcattatacatacatcacaattcatttacccatccttctgtaaatgtatgcttaggttgttttcagtttttttggcaaggaataatgctcattgcacgttgttatatgcacatcacaaggtttttctaaacatacacctagaaacagaatagttaggtggaaggatgagctggtttatttggggcataaattctacgatgacagtcatttcactctcagcactttggagatactactccatggccttgtggattgattgttgttgatgagaattctgtcttatcttcatttctctgttttttttggcaatttctcgcgtagtttttaagattttctgtttatccatattttccagttgtattttagtgtatccaggtttgatactagtttttgtttttcctcacttataactcagagagtcttttcaatttgggtacttgtgtgttttttcagttctggactatttttcagccatcagggcttcaaatattgcttctctgccactgcctcaattttcttagaatggtccacctattgacacttgtgtctcccttttgctttccgttcaactgctccttcatatttgtttttgcttttttctctttttacttatgctgatttctgggtgaatttgtaagtgttatttttcaatttactacttattttctgaaagcttagatttataccaagaaacccccaagtttctacttttttacctactagtccaaaattcgaaagttacaaaatggtacacagcaaatatggcctttccacccggcatctgccttctagctattggttcccctctcttttagcatctatgctaccatttatagtatttcctttcaaagatgtgatacacatgcacagtatgtgacattgtattatatatgtaatattttataggtatatttatctctccacattcctaatggtagcttactataaactgtgctctgcatcttgcttctttcccttaaacatgtatcttggaagttgttttgattgtttgagataatcttcctcatttatttatgactgaatagtgtttcattgggtgaatgggccataggctatttagcctgtctcatattgatgggcagtttggtatttaaaataatgtgcaatagtaatcttgtatttaagttattatccatatgtgtgaatatatctttaaggatatatacccagaggaggaacttctgggtcaaagtctatgtgtatttttcaagaataaatccgcacatatacagccaactaatcattgataagtttgtcaggtgtacacaataaggaaaggacactgtagtctcttcaatgaatggtgctgggaaaagtagatattcacatgcaaaagaattaaattggacagttatcttacaccatacccaaataataccttgaaatagataaaagacttaaacataagacctctaaccataaaattcctagaagaaaacaaggaaaaaatctccctgacattggtcttgacaatgactttttaaatatgacatcaaaagcacatgcaaaaataa

SEQ ID NO: 587017 - DNA, 4001 bp, Homo sapiens
ggcgcccgccaccatgcccgtctcatttttttgtatttttattagatacggggtttcaccatgttagccaggatggtctcgatatcctgacctcgtgatccgcccgcctcggcctcccaaagtgctgggattacaggcgtgagccactgcgcccggcctcctgctctttttcttatccctacaccccctggactggagagcccagagcctgaggtcagtagaaaaaagactgctgcgtccaatgatgttagctttgaagacccacgtgatctctgaggcctaagctctgattgtttttattttgcccaaattcctgtctaagggggctggggagtcatgccctacaaaccataaattctcatcagatgggttttattaaccctatagatcgtgacttactttccgatttggcataacattatgtgaaaaagaaataagtcaaatattttaccccaagacatgtttctttgccgtattttgaaatggtcctgcaaagctgttctttgtgggagaaaatttccatctgtaaagaatctctattaacagagctagatctttttcttccaggccctcccaatcctgaagagattaactaaaagtctagcaccttttaaaggtctgaataggaaacatttgtcatctattgtctctaagggcagccactataagacttcaaaagaaccttagtctacacaatcttttttttttttttttcattttattatttttttttttgagacgcagtctcgctctgtcattcaagctggagtgcagtggcgcgatctcagctcactgcaacctccgcctcctgggttcaagcgattctcctgcctcagcctcccgagtagctgggattacaggcaccagccaccaagcccagctaatttttgtgtttttagtagaaacggagtttcaacaccatgttggccaggctggtctcaaactcctgacctcaggtgatccaccagcctcagcctcccaaagtgctgggattgcaggtgtcagccaccgtgtgtggccacaatcttttatcttaacttgaacatctcctttctatcaatcccaggtctgtagacaaactcaaccaattgtcaatcagaaaatgtttacatttacctatagcctgaaagtcccccctcccccaccactcctgttttgaatttgaattgtcccgcctttctggaccaaatcaatgtatttcttaaatgtatttgatggatgtctcctgcctccctaaacggtgccccatccaccttgggcacacgttctcaggacctcctgagggctgtgtcacaggccatggtcactcatatttggctcagaataaatctcttcaaatattttacagagtttgacacttttcgtcaacatctcgaaggagcactcaccccagtactgcccatgatcagaaagagggcaatgtggaaacgcccgaagccgatagtctccactgcatcttccacggtgaacgtctttggctctaacaacgaaagacaaagtggaaaaaattgcttctgcagggaagggaatgcgtgtggactatcagcttcagaaagccaacccattattataaaaacaagttaatacggggggtcagtggtaggcaacctctgcctactggtccaagcaattctcctccctcagtctcctgagtagctgagattacacacacccactgccacactggcctaatttttgtatttttagtagagacgggatttcaccatgttggccaggcaggtcccaaactcctgacctcagtgatccacctgcctcggcctcccaaagtgatgggattacaggtgtgagccaccatgcctggctgcttcttttgacctcacctttttgcatttaaccttaaaaaggattcttaactctaagcagcaggttgagctggagacttctatgataatctcacctttaacctgtggctctgcggtccccaggctcaatttccgaaggctgaggatcgtgacaggctctgttggcttggttgccatcttctaaatagctcaagttccccaaacagcttccctggtggaagcaagggagggaagaaggaaagaaatataatggttattggatagttagtatatgccaggcacactacacacaaaatttcctgaagccctcacaaaaatcgaatgaggtatgtatttttatcctcttttcacaccgggcctctggaaccaagcagctcagtgttttttttcccctactactttttattaattgattgattgagatggagtctcgctctgttgcccaggttggagttcagtggtgcaatctcagctcactacaacctccgccttctgagttcaagcgattctcgtgcctcagcctcttgagtagctggggttacaggcatgcgtcaccatgcctggctaattttttttgtatattttgtagagacagggtttcaccatgttctccaggctggtctcgaatttctgacctcaggtgatccgcccacctcggcttcccaaagtgctgggattataggcgtgaacgactgtgcccagccttccctactactttttaggtatgtggctttgaggaatttgccctttgcacacctcagttttctcaaatgggtttcctaaaatggggatgatataataatggcacccaactttcaaggttgttgtgatgattaaatgagttagttcacggaaagcactcaccccataactggcaagtactaatgtgcttgataaatggaagccattactattattactctgtatgagggatgtatttgtcactaatcattatcctgaacactttacatacatgaattattccctctaatcttcacagaagatctgtgaaatatcataatttatcactgtctggcacgtaaggaacctgagaaatggagagactaaatggctaaattagataatcgagctaaattaagaggccaaattagacaaccaggactctgagaccggtaaccaaccttgagcctggggccagacgcaggccttggcaatttaaccaagagcatcctctgagtgggagggaagatggctttgatacagaaaaacaatcgcaaagcagcacttcacacttctgcagatactgtatttccagtgtgctttcttgcatgtcattgtctttttttttttttttttttgaggcagagtcttgccctgttgcccagactggagtgcagtggcacgatctcggctcactgcaacctccgcctactggttcaagaaattctcctccctcttacatgcacccactgccacactgggctaatttttgtgtttttagtagagatggggttttgccatgttggccaggcaggtcccaaactcctgacctcaagtgatccgcctgccttggcttcccaaagtgttgggattacaggcgtgagccaccatgcctggctgcttctttttaacctcgcctttttgcatttaaccctaaaaaggattcttaactctaaaagccaaaagaaaactaagacaagtaaagatgggtaccaagtcagtggcttacccacacagacttttgtgtgtgtgtgtgtgtgtgtgtgtgagacggagtcttgctctgtcgcccaggctggagtgcagtggcccgatctcggctcactgcaagctctgcctcccgggttcatgccattctcctgcctcagcctcctgagtagctgggactacaggcgcccgccaccacgcccggctaattttttgtatttttagtagacacggagtttcaccgtgttagccaggatggtctcgatctcctgaccttgtgaatccgcccgcatcggcctcccaaagtactgggattacaggtgtgagccaccttgcccggccagactttttttcagatgactctaagacatagtaacttaattgtatattcctagtgggataaacagaaagcctaaactattcttgctaatgatattgttagtaataatattggtatcatcagttgcatattagtacatatttaggataaggaaagtaattttgttaata

SEQ ID NO: 587018 - DNA, 4001 bp, Homo sapiens
ttggccatccagcactagtcattttactttttcttgtcctaaaattccatcacaggctttaaaacttgcatctgtttcctactgattgtaatttggacttctcttttcatttgtggccagttcctgctagtttcaaacagataggtgcctgagggtgagttttcttgccccaaaattaagggagacttgctccctcccaacctacttgggtgctctggggggttagagactttatggacactcactcatgacacatagtcctgaaagaacagcttcttctgagcttgctgttgcagcagtggactagtcatttaaatgaaaaccagaggaaaaaacctcccaatagggctgctctgaagggctaaggggccttttccattccccttattaactcattagaagcgaagatatggataaatggagaacagatgtgtgcccccactgatatcagacctctgttctcaacaccaccacagtaaactggacgtggtgggggcatctaaccaacccatgactgcttctaagtcccaacctttaaaagttcaaatagagccacttagcggccttccttcctttaatccttctgggtagagatttcttagaactctataatacccgcatctccttttactccacacctggactgcagaggaacagctgcaggcacaggtaccctgagaaaaatgtccagaagataagcctggaatgttccatcagggagggaaatgtctgcattttctatcttgggtattgggagggagatgcctactaaagagaaacagtgataaggttgcccccaaaagaatacacaaaagacaattccaaatgctactgtgaggccccacctaccttccagcggccatatctgtcagccaggaggccaaagaggatactgaaaaccatgtagccaaaaaacaccatctgcaagtgggagcgagataaaacggttctctaagcaggttttacatgttactttaccccgttagccattttcactagaagtaggctggaaatacgggagggatggaagttaatttaaagaacagggtttcacgttggtcttgcttgcccctgaggcccttcatgttcaggatttcagctccctgttggtgggagcctaacaaggcagatcctgccccaggtggaaacggggtcctctgccgcccgcttgttgctagaggacggcttcggctccactctattcagatgtgtacttgtgaatttccactgtaatttttaaaattgtctgttcatgcgctgccttatacagtacacaaattggggccactagaagcagtctccctttatgttattacaaatagacataactttaaacaccaaatccaatcactcatttaaaaaactcttcagaacattcataagtcctaagatacacctacttcttttccttactcgttctcacaatggcctgtcctcccctgataaaattcaaggacctgggatttgacactagggttttatttattataacttggcctgagacctcagctgctgtctgtgcctctgggctccttattttcctgccttcaagaagttcaggcttcactgcagccctgactgacggcctccagggcaatcaaaggaatgctgtcagctcgcatttctaggggaaaacaaaacaaaccagaaacagctctgtttccctttcgctgtcgctgttctgctttttttctccttccttcactctttagagggaagactgaaatgcatttctcccacactgaaccatgaaaaattcatcatatatattcttgcacgacaaaagccacgactgggtcctgcacgctacactttctaggacagaaacgttccgtaaccctgtttgacagactgcagagacagaaacctgtccgctcgctggggctccagctctccctctgcctccctcactcgcccccaacgatcctcagtggtgcccccttcttgtgcaccctaccctgccctccccctcccccaccttctacctggaagacgtcctgcctccctcgcgcgccccacctagcgcgcgcctaaccctccagcgtccttgagctcccatcgggcacgcgcctaaccctccagcacccctaatcctccatcggacacacccctggccctccatcgggcgtgcgcctaaccctccaacgcccctaatcctccatcgggcacgcctctgacccattgggcgcgtgcctaaccctctggcaccccgtatcctccagcaggcgggcgcctaaccctccagcgcccctaatcctccactgggcaagcccctgaccctttatcgggcgcgcgcgcctaaccctcgagcacccctaatcctccatcaggcgcgcgcctaaccctccagcgcctttaatcctccatcgggcacgcccctgaccctccaccagatgcgcgcctaatctccagcacccccgatcctccatcgggcgcgcgcctaactctccagcgtccctgaccctccatcgggcgcacccctgatcctccatgggtgtgccgctgacccctgatcctctcttgcgcccttcccccctcccccgcacgctgctgctgctcacccccagctcttcctcctccgccaccccggcgctcgacccttccccccacccccgccctcgacccttctccccaactcccgccctcgacctttcccccataaccctgacccttcccccaaccagccccgcgctcgacccttccttacccccacgcccaccctcgacccttcccccgacacttcccccatccccgccctttcccctgacccccgacacttccccccgacccctgccctcgacccttcccctccacccccgacccttcccccaaccacccccatgctcgacccttcctacccccacccccacgctcgaccctcccccgcccccactcgccacctccctagggtcagctcttttctgcaggtgcttgtctttaatacatgacatgactccactgtttctgatttaagcaacacacaaagcgtttcttcagcatgactctcacaaaacacaagggccatcatagccccacaattctttagttttctcaattaacaaccgcttagaaaacagggttggggggcctgggagacagtgacaatgttgctcattagcctggcccttccgtttagcacaattgttcccagtaagctcagggacagggtcagagtcagatgggctaagccaagacaggaggatgggaggagcccagagcaggaaacagtcaccttgggagagttcagctgcttagagagaagtcttctgagctgtgatggcctaatgagggagattgtgtacctgctggaaggagcctctgtaggcaccttaggaaacagcacaaatgcagccaatgaaatatgagctgtaaatatcacatttacatgtgtgtcatgtactataaaaaacggtatcacgtaatacaattttgtagtgcaggtgcaaatgccacacctggatctccagcattctcaaggatctaagaggtgcatatacacaagccaactggggtacagatcagttagaattaaacataaagttatagggtcaccctaaagatacaaggattggcaagtaacgcttttctgaaagccatgagaaccaaaatggagtcacttaggccacaccctaccaaaatgggattgtaggcaacagaggaggagctctcaggcacacaaaaactgtaataaggactctgaaaaccacagccttgcacaaagaccactgatcgcttgagcccaggagctcaaggccagcctgagcaacagagtgcatcactgtctcaaaaacaaacaaaacaaaaaacaagaaactgcttctgcaagaacaatacccagcctgttctacctcggactgatgccaccgttgttactgatccttgtagccaaggaaaagtatttcaaaataacttatgtagccttcctcattttgtctttaaaaaactctcgactttccttgccttcctggatacacctatggcccggccacggttcgccatgg

SEQ ID NO: 587019 - DNA, 4001 bp, Homo sapiens
atttctgtaagatgcttaaaaagggatatttttcaaaatacatcaaaacacgaatgaacttatcactagtgcttgaaatattaaggaaaaagctaagtctacagttgtttaaaaacttgacaaaaaatataagcacagatataaacaactgcctcttcatttaagtggaaatctaaattattagttatacatttaattataatcctcaatgagactaaatctagatataagactttcttaacgttcatatttgattagcctcgttaatgagattttcctcttgcaatttttaaatgctttaatcatggttttctttatacttaaatctggacttaggtttaaaaaaatcaagtatatttatttatgcgtctttcaagtagtcatttgtgtgaagtcagcactacttcagttttcagaaaacacacaaaatgttcagtgaatggtgaaattgcctaaccccttgcgcggttacaatggtccaagtaggaaatcacattaggtacccatcagagaaactgagtttctacgctgcttttaaaaacatcctcggtaggttatttagaacaggaaattgaaagttcttattcttcttcaccactctatcactaaggaaaagggcgaaaaagctatggatgtaaatgctgctgtctataaacacaacttgcctgcagaaatatgtagtgggccgcgaagtttgaaggaagcccgcagtgcctggtatattcaccaactcctccaagtaactgatcattgccaaggtcgaattaataagcgttctttgatgttaatgattgtgagtgttctcaggaaaggactaaaagctgactttctaaacaggatgttgtttggaaataccccaaacaaactcgatgtccattcctaacgtgttattaagtgaaccgatctgactcgatgcgttttgttaaaaggactttctttagtttccctggcccacagtttatttttttactatttttaactcggagcccatcttaaaaacaaattaagaacggaatgctcgccaaatcacgtctacaagacaaaatcggcttcccagggagctagacctcgagtgggcaccggcagggacgtaaccgctgagcctctccgcagagcgcgacgccggccgccgggtttcggttagaccgcagcaggaagttttcccttcctctgcgggaggcagtggagccaaggggaaatttgaactcccactccacggggacacccagaggggagctccggtgtgggagggtggctcccctgggagccaggcggccgaggagctcgtgattcgacgcccgccgcggcgtctccgccccgcgcggcccaggccgcggcctccctgccctccctgccgtccactcccagtcccggggcggcggcctcaaagcccgcgcggcagggctgcgtcccggctcgcaggtccccgtctccccgcctagggcgccgcgccgagcggcaggcgggcctggccggcgcgggctgcactcacccactcgaggaccttgatgaagccgagtggctccttgagcgggttgaggttgatctggaagccggacatcctctgaggaaaggagggagagagagtcaggacgacggggcggaggaggggaccgacgagaccagagcagcccggtggcgaggaagggcaggcggggctggcgcgctggccgggctcggaggcgggcccgggcggccgtggggcggggcggggcggagcggcggcggttgagctgctggctgagactctggggcggaaacggagtggggcggctggggaggcgaggggcgggccggggcggagaccgggaggcttctcctcaggccgcacctggccgagtcgactgatccgctggcgaaccaagtagatgttgggcgccatactgcgtgcgccgcgcccccttccctgcggttcagcccctggcactcggtcttcccctgcgcacgcgtgtacgcgtgcgctcgttgggcccgcgccgcgcttccggacccgcgcgactgcgaagagccctgacccgggggcgcccacgcccgctcctgcgcagcttgggggcgctggcctcagagacaccctcacttgaccccgagctcaccacagctgagctcactacaccgaagctgacctctccttcccttaacagatctcaacttttttatgaatttataatgtattggcacagatgaagttgtgtttcaaggcatgtgttaggggcctttgattaaaattgcaaaacaacagacttctggctaccgtgctgtggggtgcctcgaaagtgtgaatcaccaaatattcgtatggaaattaggtttattttcaaagttaccatcgcagccatggttgaaaaatgaagtaagtttatacctaaaaggaaaggcgtggccggacaggccctcggtgacctacactttcacctcttctacgctgtcggtcgacagtcctctttttaaggcatcgttggtatctttcttcaagaagctgacccctttaagattcggcttaggtgatactttcctcttggcacgcagttacgggagccccaaggtagtgtgatctccttcctggcttcttcagtacctggaaagttcctggacagctggaatgtggtcatattcgtgtatatgaaaaaccagcttccaaggacttacctgaatttcaagcacgaatatgatttgcaggctacttgccactgaggttattccgtcagggttgacaactgttattgaacgtccttgtagtaagcgaaccctttctctttcgagacctatctccttgtttgctgtccagagagtgcaaaaaatacatttcattttctatgcagacagagacaatctttatgtttatcttggctcccgttcctcagtccccagcacagtcagtgctcaatgagcacctaatggcatatctcattttgaaataacattaagaactgggcgcggtggctcacgcctgtaatcccagcactttgggaggccgaggccggcggatcgtgaggtcaggagttcaagaccaacctggctaacatggtgaaaccccgtctcttataaagataccaaaaaaattagcctgacgtggtagcacgcgcctgtcatcccagctactcaggaggctgaggcaggagaatcgcttgaaccgggaggtgggggggttgcagcgggttcctaatggatggttgcagatttctcccactaagcaacaaagcatcatagataccccttagggctaggtgagtggaaggtgaccatacactgctacctggtgcgtctgagaccacgatgagcggtgctccaggtcttccagcttcctctctctccttttttttctactttgtttctgtatcttcctctcagtacttctctttttgttctctttagcccgtttttctaagcttttactctcattctgttgcggtcttctgggtaggcacctggggacggagtagtgaatagtaagactatttagcttgagcttcatattcacgaatattcaaattagactcttaatgttattattattattttttttttttgagacagagtcttgccccgtcacccaggctggagtgcaatggcgtgatctcagctcactgcaacctctgcacccccgggttcaagcgattctcctgcctcagcctcccgagtagctgggattacaggcacgtaccaccacgtccggctaatttttttgtatctttattagagacggggtttcaccatgttggccaggttggtcttgaactcctgacctcatgatccgccacctcggcctcccaaagtgctgggattacaggcgtgagccaccgcgcccagctcttaatgttatttcaaaatgagatatgccttgacagattagagatatgttcacatgcagctttattaattaaagatctaaaacataccatgacttagtaaaccaatattggcatctcttcttctttttgtttattgaaggccttagaaattggaattggccaggccctttctcaacttccgcgctaaacttt

SEQ ID NO: 587020 - DNA, 4001 bp, Homo sapiens
tcaagtgttctctcagctatgaagtcctccctagttcctccaagcaaatgctctctccctcatttcttctactattctttgcatacacctttatcacagtttattacatggcatttttgtattttgtatgtccttcatccttaatagatcatgagaaaaagaccatgttttattcatgtggtatgctagtgtttagtacagatctggtataaaatagtcaaatatttaccacaccattaacaatgtgtagtcttttcataaaaggctctcctgtgtaataacaagctgttcaaactgaaagtatttctgtaagatgcttaaaaagggatatttttcaaaatacatcaaaacacgaatgaacttatcactagtgcttgaaatattaaggaaaaagctaagtctacagttgtttaaaaacttgacaaaaaatataagcacagatataaacaactgcctcttcatttaagtggaaatctaaattattagttatacatttaattataatcctcaatgagactaaatctagatataagactttcttaacgttcatatttgattagcctcgttaatgagattttcctcttgcaatttttaaatgctttaatcatggttttctttatacttaaatctggacttaggtttaaaaaaatcaagtatatttatttatgcgtctttcaagtagtcatttgtgtgaagtcagcactacttcagttttcagaaaacacacaaaatgttcagtgaatggtgaaattgcctaaccccttgcgcggttacaatggtccaagtaggaaatcacattaggtacccatcagagaaactgagtttctacgctgcttttaaaaacatcctcggtaggttatttagaacaggaaattgaaagttcttattcttcttcaccactctatcactaaggaaaagggcgaaaaagctatggatgtaaatgctgctgtctataaacacaacttgcctgcagaaatatgtagtgggccgcgaagtttgaaggaagcccgcagtgcctggtatattcaccaactcctccaagtaactgatcattgccaaggtcgaattaataagcgttctttgatgttaatgattgtgagtgttctcaggaaaggactaaaagctgactttctaaacaggatgttgtttggaaataccccaaacaaactcgatgtccattcctaacgtgttattaagtgaaccgatctgactcgatgcgttttgttaaaaggactttctttagtttccctggcccacagtttatttttttactatttttaactcggagcccatcttaaaaacaaattaagaacggaatgctcgccaaatcacgtctacaagacaaaatcggcttcccagggagctagacctcgagtgggcaccggcagggacgtaaccgctgagcctctccgcagagcgcgacgccggccgccgggtttcggttagaccgcagcaggaagttttcccttcctctgcgggaggcagtggagccaaggggaaatttgaactcccactccacggggacacccagaggggagctccggtgtgggagggtggctcccctgggagccaggcggccgaggagctcgtgattcgacgcccgccgcggcgtctccgccccgcgcggcccaggccgcggcctccctgccctccctgccgtccactcccagtcccggggcggcggcctcaaagcccgcgcggcagggctgcgtcccggctcgcaggtccccgtctccccgcctagggcgccgcgccgagcggcaggcgggcctggccggcgcgggctgcactcacccactcgaggaccttgatgaagccgagtggctccttgagcgggttgaggttgatctggaagccggacatcctctgaggaaaggagggagagagagtcaggacgacggggcggaggaggggaccgacgagaccagagcagcccggtggcgaggaagggcaggcggggctggcgcgctggccgggctcggaggcgggcccgggcggccgtggggcggggcggggcggagcggcggcggttgagctgctggctgagactctggggcggaaacggagtggggcggctggggaggcgaggggcgggccggggcggagaccgggaggcttctcctcaggccgcacctggccgagtcgactgatccgctggcgaaccaagtagatgttgggcgccatactgcgtgcgccgcgcccccttccctgcggttcagcccctggcactcggtcttcccctgcgcacgcgtgtacgcgtgcgctcgttgggcccgcgccgcgcttccggacccgcgcgactgcgaagagccctgacccgggggcgcccacgcccgctcctgcgcagcttgggggcgctggcctcagagacaccctcacttgaccccgagctcaccacagctgagctcactacaccgaagctgacctctccttcccttaacagatctcaacttttttatgaatttataatgtattggcacagatgaagttgtgtttcaaggcatgtgttaggggcctttgattaaaattgcaaaacaacagacttctggctaccgtgctgtggggtgcctcgaaagtgtgaatcaccaaatattcgtatggaaattaggtttattttcaaagttaccatcgcagccatggttgaaaaatgaagtaagtttatacctaaaaggaaaggcgtggccggacaggccctcggtgacctacactttcacctcttctacgctgtcggtcgacagtcctctttttaaggcatcgttggtatctttcttcaagaagctgacccctttaagattcggcttaggtgatactttcctcttggcacgcagttacgggagccccaaggtagtgtgatctccttcctggcttcttcagtacctggaaagttcctggacagctggaatgtggtcatattcgtgtatatgaaaaaccagcttccaaggacttacctgaatttcaagcacgaatatgatttgcaggctacttgccactgaggttattccgtcagggttgacaactgttattgaacgtccttgtagtaagcgaaccctttctctttcgagacctatctccttgtttgctgtccagagagtgcaaaaaatacatttcattttctatgcagacagagacaatctttatgtttatcttggctcccgttcctcagtccccagcacagtcagtgctcaatgagcacctaatggcatatctcattttgaaataacattaagaactgggcgcggtggctcacgcctgtaatcccagcactttgggaggccgaggccggcggatcgtgaggtcaggagttcaagaccaacctggctaacatggtgaaaccccgtctcttataaagataccaaaaaaattagcctgacgtggtagcacgcgcctgtcatcccagctactcaggaggctgaggcaggagaatcgcttgaaccgggaggtgggggggttgcagcgggttcctaatggatggttgcagatttctcccactaagcaacaaagcatcatagataccccttagggctaggtgagtggaaggtgaccatacactgctacctggtgcgtctgagaccacgatgagcggtgctccaggtcttccagcttcctctctctccttttttttctactttgtttctgtatcttcctctcagtacttctctttttgttctctttagcccgtttttctaagcttttactctcattctgttgcggtcttctgggtaggcacctggggacggagtagtgaatagtaagactatttagcttgagcttcatattcacgaatattcaaattagactcttaatgttattattattattttttttttttgagacagagtcttgccccgtcacccaggctggagtgcaatggcgtgatctcagctcactgcaacctctgcacccccgggttcaagcgattctcctgcctcagcctcccgagtagctgggattacaggcacgtaccaccacgtccggctaatttttttgtatctttattagag

SEQ ID NO: 587021 - DNA, 4001 bp, Homo sapiens
gccaatgtcgcgcctggggaattacacccctcttggagtggaaatctctattcagagcgagagaccctggggtactccaggaaggagtgagcagacagggcgggctgcccaagacacctagggacggtcgcctatctcaccagcatcccgtttgcccattaatccaaagaactgctgaggcttgggtctccgggcgattctctgcagaagatgctcaaagggctccggcagttcctcctgggagacaaaagcacggacaaagggcgtgtaaggcaaccagagcgaggcacccagcaacccgagcccttccccccgctgtactccggccccgaggcgtggggaggcggccttccccacgctcgggctgagcggggtccctcccgaggcgctgcctctctgcgcccctccccgccgaactcgcgtcccgccccccgcaagcctgccagggcgagttagcagctggctcggcgtcttcaagcttcgagcgctttccgctctttcctcccagcccggggaccttccctcatctgctgcgccgccacctgactttgtcttgtctcggtgccggctttgtagagtcctcaccgccctaaatgcacacaggtgtgtgggatctggggctggggctccggtggggaagggtgacaacgctttacagacgactttcaccgtttttccgaggcgcgctccccagcgcctgtagcctacgagtttctaaagggagacttcaagctacatcctcaggtccgcaaaacaaacgtgaaggcaggaaattaacttccctccagcctccggccctccaatccccctgcagctcgcgcgtgtgcccgctgctgcccgcgacccaggcgccctcctctgcccgtgcccagacgctagggcagtgcagctggaccggagcccccgaaatcccaggtcctgggggatgaaatcttacgagatttcccgccttgtgaggatctcgggctcatccgggagggcatccctactgcagggagttcctgggccggacggtgcagccctcgggaagaaacttgaatcgtgggcacaaaatcccgtggggaacccgggaaatagtgcccctttccatcctctcgcacgcaaccgctgcctctttccgtggtggcggtgcgtgccacgttaactagggtgctgttgcgtgggaaggtgacagctcccgagcccaggaagaagggtgcgggccgtcctgggaaggggcctcaccttgatctggtcgctgtcgtaccagtcggaccagtaattcagatcatcattggctcctatttcttctgcaaacagctgagtggagacaagaaaaaagactgccaaggccacgaggattttcatgttggatttctgggaaggggtaggaggagaagacaccaaagagagaaataatgtatctattaggggtggttatccaagagttaaagcaacagaattttctgccccacaacggatgaaccaagatcaaaaacataaggactgaagtctcacctgtaccggttaggcgagagaatcgcgtcccaaagattctccaaccctcttctccctgaatcccaactcccccagccccctaacccaccaacccacaccttcaaaccaggaaactctgcaggtggaagacaaagaggggcgttggcgtttgggaagccagtctccccactgtccctcgccgcagcggcgcccccagcgcggccacctcggacagatgcggggcggggtgacccgggcagccgcggccagcaccgcgcgggcacttactgcgacggacagtcccgcggggtgctgagtttctctggttcctccgagcgcacgctggtcgctccgcactctcggtagctgccgccgggaaggaggtccgagcgcgctctttcgcctgctcagtgccttgcggtatttatcccagcctccttgagcctccagacccacgtgacattctccccacgcgactttctgctcaatatttaattagccgcctcctctcctttcgcttgcgtgattgagagtttccgagacggtaactcgtcgatgcccataacatctggacccaattgggttctaaatgacgcaattttaggaaaatcgaggtctcgccatccaatccggagcggcctgcttccgtctgcagatctgacgccccctcccctctccttcgaaactgggtttcatgacacctgatattactcatcaaatttgagcaaagtgactcattccttggacttcggtaacttttccgtccctcgagacgtcaggataagttgcacttttcaggatggccaaataactgtaggcattcagacatttcgtcggaaatcaggctaaaaaaagaggactacacttgaggggagatgcggggaagcattattttcccttctatttctagcttaatagtatttaagtgtttctgagacacagcatcgttctataaccagaacatccctcttctaaatcaacgcgaatactggcttttccttagcataacaaaaggatgtttagtcccatagtattttagaagatggaagcagatttattttacattttggagaaaggggaatttaaacatgacattgtgtgtcagacttaggatttcttttgtttcaagccgggtaactcctcttccttgccacatccaggagcaggggttgaacaggacgttttttgcttctctcctacactttcttgctgaagactaggaaaccagcaacatagtgtgtaggatcctcacccttgtcactaaagggctctataaatcatgtttctcctttctatgaaagtaagtgtagtgaagatgctaatgggacagtcattaacagcacaaaatattagacaaatagcatttgtacagaaaccacacctttccatgagcccttggttgcctggcagacacatttctttgatctccaaatgaattaaaagatgtgacatctttggtggagtagttttctcccctttacatatgaagtattatatttttcaattaattatgattttttagtatattgcataaaagaaataaatttttgcaactcaaaccagaagtatttttttctctatgttgttcttaaataatcctgaatttggaaattctcatgcatctctgatttcttttggccttagcctcacaatgtgagcattttattttccgttttcagaacttttatatggaaaattataagcatatccaaaagtagagagaaacatccacttccaagtttcatctacaacccttccagtttcctctgcactgagattattttgaaaaaaatcccagacagttaatcatttcaactgtaaatatttcagcatgtctgtataaaggtaggaattaaaaaaaataaaaacatatccacgccattatcccacctaaaacaacataaaataattccttacattaaatatccagttagcattcaaatatttctcattgcttcctaattccggcccacacagtttactacttgaaatcagaattataatgaagtccatacattacaattggttttgttagttcaggctgctgtaagaaagtaccatggtctgggtgacgtaaacaacagaaatttatttctcacagtttcgaaggttggaagtctgagatcgtggtgtcagcatggtctggttgtgtttaaggccctcttccaggttacagactgtcatattgtctccttgttatatcctcacatggcaggaaagaatgagagagctcttcaaagtcccttttatcggggcactgatctcattcataagagctgcaccatcatgatctaattatcttccaaagaccccacttcctaataccataaccttaggggttacgatttcaacacatgcattttggagggacacgaacattccttctactgcatgtttcttaaatctccctgaatctgtaattcgctctctctttctctctctattgtagtttattgataagacaggtcaggagagtgtaccgcattctggactttgctgattgccttttaacttgtttctctgtt

SEQ ID NO: 587022 - DNA, 4001 bp, Homo sapiens
ggtgaaacctcgtctctactaaaaaatagaaaaaattagccaggcatggtggcaggcacctatagtccctgctactcgggaggctgctgaggcaggagaatggcgtgagcccgggaggcggagcttgcagtgagccgagatcgcaccactgcactccagcctgggcaacagagccagactctgtctcaaaaaaaaaaaaaaaacaaaaaaagcaaagtggagccaggtgcagtggctcacgcctgtaatttgggaggccaaggcgggaagatcacctgaggttaggagttcgagaccaccctggccaacatggtgaaaccctgtctttttgtaaaaacacaaaaattaaccagacatggtggcgggcgcctgtagtcccagctatctgggaggctgaggtgggagaaccgcttgaaccaggaagcggaggttgcagtgaaccgagatcgtgccactgcactccagcctgggcgatagagagagactccatctcaaaaaaaaaaaaaaagcaaattggagccaagagaggtaactcaccccagtaatcccagcactttggaaggcagaggtggggggattgtttgaggccaggagtttgagacagcctggtcaacatagtgagacccccatttctgcaaaaattaaaaaattagacggacctggtggtgtgaacctgtcatcccagctacttaggaggctgaggcaggaggatcgcttgaactgaggagttggaggctgcagtgagccaagatggtgccactgcacaacagcctgggtaacagacggaaaccctgtctcaaaaaaaaaacaaaaaaaaattaaagtggcacacttgcagttggacattaggaagattaacatatcaatactgcttaggagtagtacaggtagggtggggccgtgctggaaggatgggaagagggaggccgaaaaacaaattggttcttttcaaaccatccctgatctcctccccgacttttataagtcttatctatagggaacacaactattcgagacatactctgtgcctggcgccgggtttacaagagggggtcgtgtcccacttccctggcgaactcctacgaatccttcaatacccggcggtaccctctgccagtaaaggctcataaaacacgctacagtcacaggatctcctcagatcagtggaggcggcaggaaggcgtcccagggaagggttaacttaagcgagatcccagcagagaagcaggtcgaagatccccgggcagcgcgaaaggaggttcagagagcccaccccatctcctgcaacatctctccaatgcaggcacacacacggggtccccacgagcacagacacacaaccaaccgtcctctttccagtccccacaagggaccttcaaagggtctcctccggggtaccactcagacccgcccccgccacccgagcgcggggagcaggaaaactctagcggcagccgagacgctgctcacccggcgctcggcgccatcttggccccgccccctcgtgggagcaggtcctggcagagcctaagagcaagtcactgccccttccccgtaccagaataagtcctctaggctcgcagaatgaaattatattttaaaagtttgtttctacatctatatataaggagcactccctcttggtgtaattactgcaatttattccttcactacccggctgccaggaccttcaagaggcgccacaaaacggaggcagggaaacccgtagcaacgaggccccacccttgttgggctgatcctgcgcatgcgccgaccttcctcggctggatttaaggttgccgctagccgcctgggaatttaagggacccacactaccttcccgaagttgaaggcaagcggtgattgtttgtagacggcgctttgtcatgggacctgtgcggttgggaatattgcttttcctttttttggccgtgcacgaggcttgggctgggatgttgaaggaggaggacgatgacacagaacgcttgcccagcaaatgcgaaggtatttgaagggggtagcccctataggcatcgcccggccacacctccttcttctaggccggacatcctagcctgtattgggtgggtcacccgacctccttgaaggcttgagggaggttctggtggagcttggctgaatttggatggggtcaaggaagcgaacgtgtagtgccacctcaaactgcatccagagagagcctgcatttttttggctggcttggaaccccccgcccgccaatggattgtgggaattgtagttcagggaccatcggcccgggactgccaacttttagagcatcttcagtgagtgtttacctcatgtcaccagaccttaatctgcagaggctgcaggagccgggtgtgaggctcaggccttgtggacatccgctgccctaccctagcatagacgctcccaaattacaggccccacaccccgctgagggggtttgagggtgagtaattcagcctttgaagctcataaacaaaaggaagccacacaactaggagagtgtccccatccggtgagactttgcagacggtgcgtactatatggatttttcagcaagcagcgccttccatagctgcactagcgtggggcccagttgagaaagggggctggccctgatgccctagtttgctgccctcctgactttacgtttcttccctggattccttttctcttcgcttcaccccctcaactgtattccagtatcatgaaaggcagtcatgacagtctcatgacttggtcctcatctctgtctcctttcacctccgtgtgccgctcttctcccctgacctgtcaatctttttaaacagacttaatcacctaattgtatcagtccttgctttaacacctctgcaggccttctatcagaatacagccaacgggcctgggcacagtggctcacatctgtaatcccagcactttggaaggccaaggtgggaggatcacttgagcccatgagttcaggcccagcttcaccacagcttgtcatccttggtttatctgtcccaactacactgacagagacctgtagatagagataataggtcttattgctgtctatattgttagtatgcatacagaaggagctcaataaataactgcaggataacagtgaatacttatacagtgctcactatgtgccagcctttatatatgttgatttatttaatcttcatcacactcctatgagggacatactattattatccaattgtattaattttatatatatatatatatatatatatattttttttttttttttttttttttttttttttttctcttttcagacagcgtctcatgccgttgcccaggctggagtgcagtggtgcaatctcgctcactgcaacctccgcctcccgggttcaagcgattctcctgcctcagcctcccaagtagctgggattacaggcgcccgccaccatgcccagctaatttttgtatttttagtagagacaaggtttcactatgttggccaggatggtctcaatctcttgacctcgtgatccacccacctcagcctcccaaagtgttgggattacaggcatgagtcactgtgctggcctatttatttttaatgtattttactttttttaagatggagtctccctttgttgcctgggctggggtgcagtggtgggatctcagctcactgcaacctccacctcctgggttcgagtgattctcctgcctcagcttcccgagtagctattacaggtgcgcaccaccacacctggctagtttttgtatttttaatagagatggggtttcaccatgtgggccaggctggtcttgaactcctcaagtgatctgcccgcctcagcctcccaaagtgctgggattacaggtgtgagccaccactcctggcctattatcccattataaagatgaagaaaccggccgggcgtggtggctcacgcctgtaatcccagtactttgggaggccaaggcgggcggatcacaaggtcagctgatcgagaccatcctgg

SEQ ID NO: 587023 - DNA, 4001 bp, Homo sapiens
gcaattctcctgtctcagcctcctgcgtagctgggattacaggcatgcgccaccacacctggctaatttttgtatttttagtagagatggggtttcaccatgttgctcaggctggtcttgaactcctgacctcaggtgttccacccaccctggcctcccaaagtgctgggattacaggcgtgagccactgtgcccggccgacagagctctttattatgttcactgatgtattccaggagcccagcctgggacatcataaatatttgtgaagtaaatgaattagttgtaaggcttagagatattggtgctcagtaaatacttggtatcactattattaataggtcataggcccaagctttgagcctacactgtagttaaaagcaaactgggccggccgtggtggctcacgcctgtaatcccagcactttgggaggccgaggcgggcggatcactaggtcaggagattgagaccatcctggctaacaaggtgaaacctcgtctctactaaaaaatagaaaaaattagccaggcatggtggcaggcacctatagtccctgctactcgggaggctgctgaggcaggagaatggcgtgagcccgggaggcggagcttgcagtgagccgagatcgcaccactgcactccagcctgggcaacagagccagactctgtctcaaaaaaaaaaaaaaaacaaaaaaagcaaagtggagccaggtgcagtggctcacgcctgtaatttgggaggccaaggcgggaagatcacctgaggttaggagttcgagaccaccctggccaacatggtgaaaccctgtctttttgtaaaaacacaaaaattaaccagacatggtggcgggcgcctgtagtcccagctatctgggaggctgaggtgggagaaccgcttgaaccaggaagcggaggttgcagtgaaccgagatcgtgccactgcactccagcctgggcgatagagagagactccatctcaaaaaaaaaaaaaaagcaaattggagccaagagaggtaactcaccccagtaatcccagcactttggaaggcagaggtggggggattgtttgaggccaggagtttgagacagcctggtcaacatagtgagacccccatttctgcaaaaattaaaaaattagacggacctggtggtgtgaacctgtcatcccagctacttaggaggctgaggcaggaggatcgcttgaactgaggagttggaggctgcagtgagccaagatggtgccactgcacaacagcctgggtaacagacggaaaccctgtctcaaaaaaaaaacaaaaaaaaattaaagtggcacacttgcagttggacattaggaagattaacatatcaatactgcttaggagtagtacaggtagggtggggccgtgctggaaggatgggaagagggaggccgaaaaacaaattggttcttttcaaaccatccctgatctcctccccgacttttataagtcttatctatagggaacacaactattcgagacatactctgtgcctggcgccgggtttacaagagggggtcgtgtcccacttccctggcgaactcctacgaatccttcaatacccggcggtaccctctgccagtaaaggctcataaaacacgctacagtcacaggatctcctcagatcagtggaggcggcaggaaggcgtcccagggaagggttaacttaagcgagatcccagcagagaagcaggtcgaagatccccgggcagcgcgaaaggaggttcagagagcccaccccatctcctgcaacatctctccaatgcaggcacacacacggggtccccacgagcacagacacacaaccaaccgtcctctttccagtccccacaagggaccttcaaagggtctcctccggggtaccactcagacccgcccccgccacccgagcgcggggagcaggaaaactctagcggcagccgagacgctgctcacccggcgctcggcgccatcttggccccgccccctcgtgggagcaggtcctggcagagcctaagagcaagtcactgccccttccccgtaccagaataagtcctctaggctcgcagaatgaaattatattttaaaagtttgtttctacatctatatataaggagcactccctcttggtgtaattactgcaatttattccttcactacccggctgccaggaccttcaagaggcgccacaaaacggaggcagggaaacccgtagcaacgaggccccacccttgttgggctgatcctgcgcatgcgccgaccttcctcggctggatttaaggttgccgctagccgcctgggaatttaagggacccacactaccttcccgaagttgaaggcaagcggtgattgtttgtagacggcgctttgtcatgggacctgtgcggttgggaatattgcttttcctttttttggccgtgcacgaggcttgggctgggatgttgaaggaggaggacgatgacacagaacgcttgcccagcaaatgcgaaggtatttgaagggggtagcccctataggcatcgcccggccacacctccttcttctaggccggacatcctagcctgtattgggtgggtcacccgacctccttgaaggcttgagggaggttctggtggagcttggctgaatttggatggggtcaaggaagcgaacgtgtagtgccacctcaaactgcatccagagagagcctgcatttttttggctggcttggaaccccccgcccgccaatggattgtgggaattgtagttcagggaccatcggcccgggactgccaacttttagagcatcttcagtgagtgtttacctcatgtcaccagaccttaatctgcagaggctgcaggagccgggtgtgaggctcaggccttgtggacatccgctgccctaccctagcatagacgctcccaaattacaggccccacaccccgctgagggggtttgagggtgagtaattcagcctttgaagctcataaacaaaaggaagccacacaactaggagagtgtccccatccggtgagactttgcagacggtgcgtactatatggatttttcagcaagcagcgccttccatagctgcactagcgtggggcccagttgagaaagggggctggccctgatgccctagtttgctgccctcctgactttacgtttcttccctggattccttttctcttcgcttcaccccctcaactgtattccagtatcatgaaaggcagtcatgacagtctcatgacttggtcctcatctctgtctcctttcacctccgtgtgccgctcttctcccctgacctgtcaatctttttaaacagacttaatcacctaattgtatcagtccttgctttaacacctctgcaggccttctatcagaatacagccaacgggcctgggcacagtggctcacatctgtaatcccagcactttggaaggccaaggtgggaggatcacttgagcccatgagttcaggcccagcttcaccacagcttgtcatccttggtttatctgtcccaactacactgacagagacctgtagatagagataataggtcttattgctgtctatattgttagtatgcatacagaaggagctcaataaataactgcaggataacagtgaatacttatacagtgctcactatgtgccagcctttatatatgttgatttatttaatcttcatcacactcctatgagggacatactattattatccaattgtattaattttatatatatatatatatatatatatattttttttttttttttttttttttttttttttttctcttttcagacagcgtctcatgccgttgcccaggctggagtgcagtggtgcaatctcgctcactgcaacctccgcctcccgggttcaagcgattctcctgcctcagcctcccaagtagctgggattacaggcgcccgccaccatgcccagctaatttttgtatttttagtagagacaaggtttcactatgttggccaggatggtctcaatctcttgacctcg

SEQ ID NO: 587024 - DNA, 4001 bp, Homo sapiens
gtagctgggattacaggcatgcgccaccacacctggctaatttttgtatttttagtagagatggggtttcaccatgttgctcaggctggtcttgaactcctgacctcaggtgttccacccaccctggcctcccaaagtgctgggattacaggcgtgagccactgtgcccggccgacagagctctttattatgttcactgatgtattccaggagcccagcctgggacatcataaatatttgtgaagtaaatgaattagttgtaaggcttagagatattggtgctcagtaaatacttggtatcactattattaataggtcataggcccaagctttgagcctacactgtagttaaaagcaaactgggccggccgtggtggctcacgcctgtaatcccagcactttgggaggccgaggcgggcggatcactaggtcaggagattgagaccatcctggctaacaaggtgaaacctcgtctctactaaaaaatagaaaaaattagccaggcatggtggcaggcacctatagtccctgctactcgggaggctgctgaggcaggagaatggcgtgagcccgggaggcggagcttgcagtgagccgagatcgcaccactgcactccagcctgggcaacagagccagactctgtctcaaaaaaaaaaaaaaaacaaaaaaagcaaagtggagccaggtgcagtggctcacgcctgtaatttgggaggccaaggcgggaagatcacctgaggttaggagttcgagaccaccctggccaacatggtgaaaccctgtctttttgtaaaaacacaaaaattaaccagacatggtggcgggcgcctgtagtcccagctatctgggaggctgaggtgggagaaccgcttgaaccaggaagcggaggttgcagtgaaccgagatcgtgccactgcactccagcctgggcgatagagagagactccatctcaaaaaaaaaaaaaaagcaaattggagccaagagaggtaactcaccccagtaatcccagcactttggaaggcagaggtggggggattgtttgaggccaggagtttgagacagcctggtcaacatagtgagacccccatttctgcaaaaattaaaaaattagacggacctggtggtgtgaacctgtcatcccagctacttaggaggctgaggcaggaggatcgcttgaactgaggagttggaggctgcagtgagccaagatggtgccactgcacaacagcctgggtaacagacggaaaccctgtctcaaaaaaaaaacaaaaaaaaattaaagtggcacacttgcagttggacattaggaagattaacatatcaatactgcttaggagtagtacaggtagggtggggccgtgctggaaggatgggaagagggaggccgaaaaacaaattggttcttttcaaaccatccctgatctcctccccgacttttataagtcttatctatagggaacacaactattcgagacatactctgtgcctggcgccgggtttacaagagggggtcgtgtcccacttccctggcgaactcctacgaatccttcaatacccggcggtaccctctgccagtaaaggctcataaaacacgctacagtcacaggatctcctcagatcagtggaggcggcaggaaggcgtcccagggaagggttaacttaagcgagatcccagcagagaagcaggtcgaagatccccgggcagcgcgaaaggaggttcagagagcccaccccatctcctgcaacatctctccaatgcaggcacacacacggggtccccacgagcacagacacacaaccaaccgtcctctttccagtccccacaagggaccttcaaagggtctcctccggggtaccactcagacccgcccccgccacccgagcgcggggagcaggaaaactctagcggcagccgagacgctgctcacccggcgctcggcgccatcttggccccgccccctcgtgggagcaggtcctggcagagcctaagagcaagtcactgccccttccccgtaccagaataagtcctctaggctcgcagaatgaaattatattttaaaagtttgtttctacatctatatataaggagcactccctcttggtgtaattactgcaatttattccttcactacccggctgccaggaccttcaagaggcgccacaaaacggaggcagggaaacccgtagcaacgaggccccacccttgttgggctgatcctgcgcatgcgccgaccttcctcggctggatttaaggttgccgctagccgcctgggaatttaagggacccacactaccttcccgaagttgaaggcaagcggtgattgtttgtagacggcgctttgtcatgggacctgtgcggttgggaatattgcttttcctttttttggccgtgcacgaggcttgggctgggatgttgaaggaggaggacgatgacacagaacgcttgcccagcaaatgcgaaggtatttgaagggggtagcccctataggcatcgcccggccacacctccttcttctaggccggacatcctagcctgtattgggtgggtcacccgacctccttgaaggcttgagggaggttctggtggagcttggctgaatttggatggggtcaaggaagcgaacgtgtagtgccacctcaaactgcatccagagagagcctgcatttttttggctggcttggaaccccccgcccgccaatggattgtgggaattgtagttcagggaccatcggcccgggactgccaacttttagagcatcttcagtgagtgtttacctcatgtcaccagaccttaatctgcagaggctgcaggagccgggtgtgaggctcaggccttgtggacatccgctgccctaccctagcatagacgctcccaaattacaggccccacaccccgctgagggggtttgagggtgagtaattcagcctttgaagctcataaacaaaaggaagccacacaactaggagagtgtccccatccggtgagactttgcagacggtgcgtactatatggatttttcagcaagcagcgccttccatagctgcactagcgtggggcccagttgagaaagggggctggccctgatgccctagtttgctgccctcctgactttacgtttcttccctggattccttttctcttcgcttcaccccctcaactgtattccagtatcatgaaaggcagtcatgacagtctcatgacttggtcctcatctctgtctcctttcacctccgtgtgccgctcttctcccctgacctgtcaatctttttaaacagacttaatcacctaattgtatcagtccttgctttaacacctctgcaggccttctatcagaatacagccaacgggcctgggcacagtggctcacatctgtaatcccagcactttggaaggccaaggtgggaggatcacttgagcccatgagttcaggcccagcttcaccacagcttgtcatccttggtttatctgtcccaactacactgacagagacctgtagatagagataataggtcttattgctgtctatattgttagtatgcatacagaaggagctcaataaataactgcaggataacagtgaatacttatacagtgctcactatgtgccagcctttatatatgttgatttatttaatcttcatcacactcctatgagggacatactattattatccaattgtattaattttatatatatatatatatatatatatattttttttttttttttttttttttttttttttttctcttttcagacagcgtctcatgccgttgcccaggctggagtgcagtggtgcaatctcgctcactgcaacctccgcctcccgggttcaagcgattctcctgcctcagcctcccaagtagctgggattacaggcgcccgccaccatgcccagctaatttttgtatttttagtagagacaaggtttcactatgttggccaggatggtctcaatctcttgacctcgtgatccacccacctcagcctcccaaa

SEQ ID NO: 587025 - DNA, 4001 bp, Homo sapiens
aattggaaaaaaatatatccttttattttgtgagtgaataattgtgtcttagaataaaatattcagagacaccatcataagaggattccaaagtggacgctttgacctgagatgccttagaaagctgttctgagatagatgctttacatgcatgtgaagcatcaaaacaaaagttttaatgaaatataagggcaaaaaaggcaatatttctcaactgatattgatattgatataatttttaactttgaaagtatgaaccaggtaagaaattaaatgttataggtagacatttgactgttttacctgtagccctataaatttacatattcgagttgggggaggggaaaatacatattttcttaaacataaattttctcttgaaaatgaaaaatcaccttgtattcaggtagatcatatttgagataatacgtaaaacattctaattacttttagaagcaggtacaattagtcttttagacatagaaagcattttacaaatagtgatatttgttctgaagtgagctgctgaatagatgggagtcgatacatttatctgtattcctgagtgtataaagacctttcgtgggtagtaacttgaattctagaagaggaaataatatttctatcacctaccaagtgccaggcattctggtaggtaatttccatatttaatttcatttaatctttataacatccactttagataaataatctccattatcttctttgtacagatcaacgtgaaaacagaagtttcaactttgttctggtattgaaaaatattaaggacatttgaaaagaatgtttatgaagcagtgtgaagtgaaaaagccagatctattattgtgtatctagtatgattccaactttgtaaaacaaacaaacaaaaagcagagaaaaatgtttaaataaaaatataacaaaatgataatgtgatgagggtcaatatcaaattataattttttgtttatttttgtgttttccaatttttctataatgaaccagcatttttataatttgaacaactggtaaatcaaaatacacttcctaaaagggagttacatagaaagtgctagctccaggagtcgagaaacaaagtccataccttttcttgcaccgcactttcctgaaaaatcacttctcagaaaattacaaattatgaatttgattgctacaattctcattaagtcaattggataaaagagaatcggaaggtcactttttaacttataagttcattttatcataagatctcaaccactaaggaattaaaaatgtaaaactgctttcattttttccgatgctttatcaactttgtgaaaattctctgaaaactttcatttcagtggatctaacagactaagagtatctttatgagatgttttctctcatccaggcaaaattacatctttaaacttaagctaacaaataataaacaaactcattggaccaatttaaataacaataaatgcagcttatgttacttctaaatatggtcacaccgagaaatattttaacatttgatattaaccattctttggtcaaattatcaaatatttcatcttttggtgaccaaataaggagggtagctgattttactttttttttttttaattttttccattggttatttttagaactgaagaaataaaatctcaaaactaaacttgttcacaaaactttcaacagagagataccaatggaacaacataaggcctccatcctttagagatttgcagttggtctaagctccttagtaatgtctcccatgctagggcaggaaaagttctgactcctaaggcatgaaccaagtcacctgacctctctggagatttcaccatgattagtgaccaaggagggaatcctagaattctgagccagctcctgcctgccagcctcccatcccttctttacattgcaaaatttaaagaaaacttacctgtaatgataagctttgttccgggaccaaataccttgatttttttgcccaactcttgcccaccacctgagaagcctttataagaatctccctttgtgtttgtcttaaaattgtgccaacatttttttcaatatttacataaatacataaaaattggccctgctgacgttaagtcaagacaaaggtcaaacaaaatcacactggatctgaatgtaatcaggaatttaagaactgacctcaccttgccctgggcactttgggctatgtacattctctccttgtatcccatacattagagagtctgattttaccttttctcatgattttgcctgaatcttctaaatcttccctaaaaagttttcttgtatacactttgtcttaagtgtaatttagagttaatatttccttaattttcaaagagagacaataataggattcctatgtttgacatttaataaatagatattcaatatgatttataggtattttgggattcatatgtatggagggatgggtatctagattgattctaaaataacttctttttggccaggcacagtggctcatccctgtaatcctagcactttgggaggctgaggcaagcggatcacttgagctcaggagttgaaaaccagcctggtcaacatggtgaaaccccatctctactaaaaatacaaaaaaaacccaaaacattagttgggcgtagtggcaggagcctgtaatcctagctactcaggaggccgaagcagaagaatctcttgaaactgggaagcggaggttgcagtgagcagagatgatgccactgcattccagctgggcgacagagtgagactccatctcaaaaaataaaaaataaaaataaagtaagttctttttagaatccagttctcactgatagaatactgatgagttgttagaaaatatgaattcttaatgatgattcattgctgaaagactgctacttttgacttgaaaatatctatacagtttcatcaaattaaatcgtgtgctactcaacagagaatctgaggcagctctgagttatgcgacttagcactgcaatatagcatagctgcgatagctcctacatcagtttcaacatatctagcaaatttgatgccaatacagaaagacagctgagtggaatgacgtcaaaatgactcattctacagaaataccctaaaaattatattttgagtatttaataaatgtatatcccatatgactttttggaggagagaggtcatttcagtgccataattagaagtagaagaattgtattaatacacaaatagtaatacaaattgggagttgttactagaaaaatagtcaactaaagagtccattcatagggtcaagctacagaagaagaaatattcaaagtataaaaatatgacttaatatttctaaatatcacataagggtccagaccaggcactttggagtagacaagcttagatagatcccagacttttccacagtgactagtcatgtgactttaagaaagtaactgagcttctctaggcctcagtttcctcatctgtgaaatgggactaagaggatctcctgcataggtctgatgaggaaggagataaagcattgaaactatttagcatggtgtctggctctcaataaactttgctaatattaattttctccttaaaaggacaatattgggtcattttatcaaatcctcccaccaaacgcaatacatagatcttataagcaataactgctacacaaattaagaaagaaaatgagctcatgaacccaagaccttctgcttctccggcagccacaggccaaagaacgtggacagggcccaaccaagccagaatctagaatacttatctgccagactggcagcttttgagtgttgagactgtgtcttctttgcccttttatctctagcatccagaacaaaaactgtttttgataaatatttgctgagaggatgaatgaacaaatgaagatgtaaaatgatgaagactcttttcattgaccttggagctgacatggctggttgaacttacaaattctattaaaccgggccatttccagg

SEQ ID NO: 587026 - DNA, 4001 bp, Homo sapiens
gacagggaggcagaaagaacgtctaaagaatgagtatgttttatacgtgatttttcactgattactgtgtgatttctatattcttattcattttgggagggctttggacagaataaaaaagtgtagaaagtgtaagccaacgccactcaaatgttatgagctaagagtggttcttaactgatatctgggttgtatatgggaaataaaacaactatgtctcaacatggagatgttccatcaagttaataatacaatacaagttataatacaatagagaggcaagaattgagccaatggaaaccatttatagttgtatagttgacacaattaaattgtcaatatttggggaattattaaggatgaatctggattgggtaaagtgtctgctattctggggaagagtataatgttttggctaatggaaatgaagaaagagttaaattttgacttgagttttaaagagataaagacatggcatttggaagagaagcaaataagaacatttgtgtcatcagataaaagtccagaaacagccaggggatagagaaagagagagagatggagagggggagagagagagtgagggagagagagagagagagagactccttgactaaaaaagtgaattgaaggcttagtatgggaatcattcagggtacaagcaatatgtttctgtgggatggtattcatattcatgtgtgaagtaactggcagtcatgggaaggttaaagtaatgtgtggacaccatgattttgactgtcttgtgtagaatataccaggtgtacaattccagagttggcaaggactaaggagagatggggcagtcttgagcaagttggaaccaacctgaggattgtgaaagggaaaggaaaccagtggaaaaggatagagaaagggttgattatttacaaatacatggctgcgaagatggaagggaatgagggttgcattatggtgattcacaatgaattgattgataagagcaatactctcttctggtattaattatatcaattgctcgggagtcttttatcctgtgcctcaggcaacctctaggcctagcactttccctttagaatccttttcaacgtagggctgctcagcatcagtgaagtggaatgcattaagatgaaagcatagacaaaagcttcccagacccataaccaacatctcttatcaaatagagtacctataatggtgatgagtatggttagaaagtaagaggtaaacacaataaataagacggcaagggacctcagggcagtgaagcgcgctttcatgcttggattgcagtgaccagtgctatgatgttgtatctgcttggtcagtgatgccatgagaaagatggtggaggccaggaacaggatgaaaggaataaccaatgcaactgtatgagcctggaactgatactgatgaaaattttcaagtttgtcagttacagtgctgtttcttggtagatgctccatggtgagtaactgaatttgaatgtaattcccaatagctgaagggatgattgttacacaagtaatcatcagagaacccagtaatatccagggaaacaacctcaaaattctccacctcagccagagaaagatgtgatgggtgaaagaagagaccttgatgcagtagaacacggtaagcaagctgtttaaccagaatgtaaggatattaaaaaattcccaggtgattgttaagttgcaaagtacataattcaaattaaaataggagcaaaaattgttcagcattgatgcccactgtagacagaagcgagagatgcccaggctgatgagaatcatgtccacaggcatcagccttctgacttgcagccattctctgcccagcactgcaacaattaggctgctctgcacaataattgtcaaggactcaagcacatagatgatcatgaagaagacagtgagttggatgggtatcattcttctactccaaagtgtcttcctggacaaagactctgaatctctgtaccaatttccaggtagagaatgggttcctgattccaccactgtctggtacaagaaaacccctctctctggaagcaaattttcccaagctcatttttgattttgtcattttcctatctatagaatttgtttatgctttgcttgctggtttgctatcacatctgaatgtagggaaatgtttaaatgtggattcctgctcctgaggtgatttgattattccaaaaaggcatatgtatttcataaccatgttgtttatttcctctttttctgaggtgcacttagcttatttccttatcttctttaaatgacatcttcactcttttaacctaaaatttgagcaacaagaaagatgaatccttccctgttcattcacgtcctgcatgatgtttctgctctgttgagtgcagtaccaaagcgaacctcagaagccctatcttcccagttctcatggcagctagtggtggatgctacaaccaaagtgtgagggtaaataaaaatgataatgaaaagtctttcctccgaaattccacaaaattgctgaaccccagaccttcaagtatttccatccaatgcaggccactctcataactgcccattgaattcccccacttagagaaatcaaactgcagagaaaacactgcacacagcctctcttagctattgttcttctgccaattccgatgctttgagcatatgccttatatattttcaggaattgttcttgtcccattaacatcactgtgtgtttttttttttctcttacatggctaggttctttttgtcactgctcccattgctcaggaagaattgaaagaggaccctcttaccactagtaaagcgtattacttctaaatgtgcaggcatcatttcatagctatacaagcaggctataaaaggaatacgttttccttcagttcaggacaactcttccaaatagacaccaaatatgtaataagtggcttcagaaatgagaggttattctaattgctagttggtgacagagacaaagtgaaagtcattgaccttatgtatgataaactcggagtctgtatggactttttagtcattcaaggaagacaacacagaagcaagcaaacatgaatcttagaattcttgaacacaaaacaagaaactactgaactcatgaagcaaaggtaagcaatagcttgaaaaattacaccagaaaacagaattaagtgtaagaaagcatctgctttgcattctcaataaaatgcaagaaacaggaaataaaaaactgagatgacaaaacaatatatattattaaaaggtgaattggttgagatgtatccagacataagaagggagaaagatgagatatgaaatgttggtatgtgaaacatgcaataatagcattaacctctaatttatgtcctgaatacactaagcatgttgccagctatatacactgccccattctgagtaaacttggaaggactgtgatgctctcaatctctgtctgaggggttgtgaaagtgtggccaccatactacacccctcatgactggattccagccacaatagtatgaccaggaatgagtttctgtccaaagcagcccctcatagactggcctgctgcatgagagatggcctggcactactctactccactggagtgttttctatgtgatagtggctgattaaataacccagatactctttttgggaaagtttgaaggtgagacatacagagtgtccatagactggtgattgatgttccctggggttaggagttgagagtctggctctttcatcatgtgtgcatgtgaaccttcagggccacctctggggtctcctcattgcagtgatcccaattctggtttgccttcttccactctcctttagctcacaccctttcccttatcagacaggggattgttgtcccttaactagtcctcattggtcaggtgctggcaaggtgactgaagctcagctaccttctgcagtgtacatttgatctatggcaaactctggcattcttttcagtaaaaatgataaatggca

SEQ ID NO: 587027 - DNA, 4001 bp, Homo sapiens
aatgccatgtgtattaactgaatatgtttacaaatttgagaattcttcaggatattaagcaatatcttttcattgacatgtcaaaattgtaaataacaggaagtaaatcaatgcctatatacttctatttaaataaaagtgattaaacttacaaaattcacttatattacatttgataaaactgtaattttaaaaccaggtaggcatcttggtcaaaaataaaaacaaaactacttggtcttttgcccaatctacaaaataattacttgaaaatgtactttagcaaaatgatcatgaaatgcaagattgaattggaatctagaatctaaaggtcttgattttctttccactgttttcatcattacacaatgtgtttgtgggaactggaatcatatggaaattgctgttgctgcacaatccaatattagcgcaataatagccttcacttactgagtactgtacacaacacactgtgctaaaatggccagtagggatcagaagagggaatcagacaggtaattaaagtaactcaccagaggccaaaaatcttggccagaatcagaattcaaacccacatctataggactgcaaagcttttgctctttccttcaagtctactatgtaattttatgtttatcactgttagtatctaatttaagttgaaactagtaatcagactcattatgtcgagctgatgattattaaaatacagcaccatatgtttatagtgagagtgttcttacgacatggtcatttccaagactactactcctgcaccctccccacctccgcaaccaccatacagagagaggctgtgagaagcgtggctttcaccttggaacaagtgcccagggaccaggggcaaagcagtcagtgtttctctcctactgatgttatggaactggtaacataggaaggtcaggaagagtcctgtagtcttgagccaggccaaaaggctcaagggctccaccccatgccctctgttactctaagagaaaatgggtcccttggatccaggcttcagatgaccagactcacaccggagcatcactacaaatgtctgcttcagcttactgttccccagaatgagaataaatgagtggccagcaggataaaacattgtcattacttcgccaatcatcttagccatcttggtttttggtaggaaattaccaaatgatgcaattaagaaagcaagaaagtaaagtaagaagagaaagaagaaggaaaggatgattctgatggccctcttgtgggcctcagtggttggatctctggagcttgtcccattttgcagcatctgccgtgtgtgcctccccagggagaagatgagcaaagagtaggaggccagggacacaattaagggaggcaggtaccacagagtcccaagaacatggatcagataatactcactcctcttctttctgaagtgttcagtcacattcctggtggcctcaattcccctaaagacagaatagagcttaaactcattgatcagagatgcggtactaccacaggataagagcagtgcacccaacagcatccataccatcaccctagaaactctccacttgagccagaggaatgtggggtgagagaaactggcgattttcaggcagtagaggacaccaagacaggtggcaagccaaatgctcagatggtttgtaaatgtccaggaaacatcaataatttgcattattatccctgaatcatgtgtgttgggagagaattctattaaaaaactatcagtcaagataatacacagcagaatgatcctcaagagtgccagggtggtgatgatgaagtcagacaaagacattctcttggtcttgaaccagctgctaccattgaccaactcaatgaaacaattgaccagaattcccagtgtgaactgagtgccagacagaatcaggaacaccccctcggtgagtcccatcatgtcagcaattaggcagccctgatctttgttctttctgttgatacatagaatctcctcactgatgtgatatttttctcgttaatctactcctctacctgttgcttcactgtacctgtctcttgtctctgcccaatttagtctgtcgtagagcacaatttaggaaatcctctctggctctttcaggttagtctgtcctcttcacagatgatatggattgtcatattccatcaatgaacctaaactttgcagctctttgctaaaatgcaaatgagtagtgtccagtgtcacatagagaaggaagagatctaggtcacaaagatgatggaggacttggactcagtttcaaagggtgtagggctctgagttacccaaaacagaaagatgagcggcaccaaatggaggcggctcagaattactcagaagagtaaaaagtctcattcctcaggagggaggactcagagatacagaaaaggaattccactaggagccactatccacctggagtgaggtttaagtgcataaaattgtaaaagttcagtgccattgatcatggattagaattaaaaggcatgccccttggagcctggcttacatgcagagagatggctgtaagctataagctagcaagagaagcctcaccagaaagtggccaagcttacatcccgaacttggacttgcagtgggaagtctcagacccactctggattgctagtctgctataatactgtccagggaggcataagaacaatacttctgttcttaacctaagagctcctctatttaacaagcggctattaattaaggatcttcattcaggactatatgcagaattaagcagtacgtagtttgtattaaagtatgcttatgttgactctttttaaagctaattgctaaggtttgtatactttttatgtcctactcccttccctaaatttaatgagacattagtttaaaacctaaaggattgtgggaataaagaaaagattttacttctacttgccgtgaaaggtcatgtaagagaaagataagagtaaagagttgctcatgtatacggagataaagtcaacaatatatgaataagaaagaattaggtttaagtacacaacacaagtaaatggcttagaggagaggtatatttttgtctcccaaagcagtccagaggcaaactgtccaggctggtatggtggttgcatagtgattgcagatcccagcttcttctaccttccattctgaagactgcctcatggtccaagatggcaactggaaatccagccatgaaatgtccacatttcagacaaaaaagaaaatgctgtaggacgagagtctggggaagcacacaggatacgcctcccaagagtaactcatatagaaagttccctgagagcatcaccaagtgacttctgcctatagccccttggcaacccctaactgaaaagaacaggaatgcagtacatgtgctgtgcaccctgtcacatctgggttctataaatacagaagggacaatagatactgggtagtgcattaatcatgtttattttctgtattttatgctttgacacttttgggccttgcagacccagagagggcatgccctcccaaggttagctaattcctggagttagccaacttgcctgagaaaactcctttgataagcaaaccagccaatcctgaatccacactgcccctcccatctacctcctttgcttaggtagaaaacgagcccaggacactatgaccttgccttcaatcaccccagggccaggcacctgataactagggaccatcttgagaacctgcagcctgctgaaattattcaaactacccaatcctaaccttgcttagctttccactggtgccttactcattgcttccctatgaaaaacacaacaaagcctctggcttatgttttcccccctccttcttcctcctgaccaactccagtgcatccctgagtggccttgcatggcatagcatgcaacctcctattgggaactgtgaaataaaagactcttctttcaaagcagttgtctgtgtgacatgattaaagcagctgtctccgtga

SEQ ID NO: 587028 - DNA, 4001 bp, Homo sapiens
gatttaaatgtctggtataccttgttttctcctgagtctttcagtacctgatttgaggaaagccttcctggctgggttcctgtgcaggaatacagacaatgccaaatctctacaaatttacctttcagctaggtgattttggtagggtctccaaccagagagaccaatacttggtaccaggcaaagcaccatcttcaaaggcaaattgggcatagccagaaagcccacacagggcacctactggcatccaggtcacctactgagcaaatatctgcttctcttccatcattatagagtaggtaaaagtgcatttctggatcagtgtattttcagacaaaacgacccctatcctctcgtgcctcttgaagttgaagttatgtggtacctcttgaagctggaattatgacataattatcattccaagtttgtctttgtttccatgaaaattgcgaagtttgaagaggattatatccttattgtagtagtgaatatttccaaaaatgatgctagcacaagttccgagaaagaggtttaacagtcatgttaaaagccaaacatattatcttgggatttagatattatttcagaagagatgatttctcatggtttgatttataccaataataagctatagtatataaaggatttacaccaaatacttaattattttgttcattttatcaaaacaaacctagggtaccaacattattcttgcctaggccatgtatagtgcttaattattttattcatctataagtgagttcattgatacaaagtggagagactttcaattgtgttttatagaagaaattggaaggctttgtgaggaatcagagttgtattcctgaagaatcagaggcatatttatgaagactcacaggcgtattaatgaagagctcatttcatgtccattctcagcacagtgtccgggaatctgccttgtggtcggctcttaccttcaggctgctctgagcccagagcagaatggtcatcacagctctcctcaacttggcattgcctgagatcaggatggctgcatgcccagagggacaagctgccattatcccaacacaaaccatcacccctattttgtcgcgccacagaatcagtaggggcacagagatgaaggcagcacaggatgatatcacaaagaagcagaaaaaggagacaagagacttgagggctttaatgtgggcctccaggctggggtcacgagagtttctggtatagaccttcattgtcctcatgtgccttcccagggagacagtcagcatcccagaagaaaccagaaacaataggaaaggaggcacagaccacagatagcagaagagaaaggaataaaataaattgagatctttaatctgccagttgagccttgtattgttattcatgaatagcacagttgtgactgtgaagtgaggtctgctaaaaaagcaccaaacacagaggacagtgcagatgcaggagcaaagaataatacccaggagcatctgggagatcttcctggagacccagcttgccaagcagatcaggaaggtgtgagagaaacggatgagcttggagcagtaaagcaggctgaggcaggcagcaagccagaggttggcttggtttgcaatcatccatagcatgatgatggcttggtagctgtggttcagtggttcactcaacttctggaagtgggtaagctggatagcactcaggaacagcagtccatgcaggaaaagccggctgatgctgagacacagcagcacacaatcactgttgctcagtgcctgcctcttcactacatcccaaaaattcaccaagaaaacgaaggcattggtcagaaaccccactgcaaactccaggactgaaatgaacagaaatgtactcctgacttcataggacacagtgcggatgcgagttagagtcaacatgatgtcacttctctaattggctattctacttctcttctctagttggctaatctaaagacctggttgccacccagtgcagaaaggtaaatgtacgttccaagccaggacctttccttcacaaagcatccagctctttgcctagatctatcccaaagcgagcgcataaaaagttctggcaggaaacttagagggatgttgtttctctagaacatctcttggatacacgtaagagcttatcatagggtggaagactgatggttctacctcttgggtgatgcaagattaataaatccaggtgttcctgtacaaccgccttcccagaaggccatagcacagcatcacggatgcaaacaaaacagggcctcaatttccccaatccagttttgcatgcccatctggacctgtgggggtggcgaagagaacaggatttgcttatgggttttgaggcaccctgcagcaggcaaagcagatattcttggtgatctaaggtttgaaatagagtctcttttcatttgcattccttctctcatctgtgaagtaatgactcttatcacagactgtgtttttaatatagataaatgcatggttcctttccatgtgtcagtgtatgattgcagttttatttgctgttgccaaaggtttcatgcaatcatcattattatgccaggcactgtgcctggcaaggagaatattaacatgaacaagactagcacgctgtcatgaagggagaggaaagggggcatagctggtttggattattattatgtttattttttaattagtataagttctggggtacatgtgcagaacatgcaggcttgttacataggcatacacctgccatggtggttcgctgcacccatcaacccgttatctatattaggtatttctcctaatggtctccttccccttgccccctaccccctgacaggccctggtgtttgatgttcccctccctgtgtccatgtgttctcattgttcaactgccacttatgagtgaatttcccccgataaatcctttaagagttattggtgctgccccattggtgtttttcgatactttctctttgtattttttatgttttcttttgactaaagctccttttttattattagtagtgacataagtcagtgattactaaagatgttcacttttgttttattctgaactgttcatacgcagatatttatgtagtccttatttgtgcatcatgatgtagcagttgtatttaattaattgtgtttgtgaccacttcatttgggtcattcatgcttacagagtgtcaaacacagaattctgcactttcaacttaagctaattttctccttgtcttcaccacaccaggtggcggtgttgcactaaaggtgtttagaaaagatgtttgcctccctaaaaagtctaggtagaaacttgctctactgcacaagcagagatatataactatacagttagaaccatttatatcaagattataatcttttattaaaaaataaagttctttatgttatttcttggaacaccagatccaatcttaatttttcaataatcaagggctctttcagagaaaggtaacacaaaccttcattgatacaccccctccatttgacttatgtacacacagtgtttgggattatctaagtaatctcctttgcagatagtccttagctattggctattttttgaaaaatggtttactcaggaagctaaaaacagtaaagtcaactgcaatgccagtaagagcagtggtaggaacacaaaagctccttatttgttattagtagtgatataagtcagtgactacatctttatcagatgtaattaaaaaaatcttagtccctggattttgcaactaaacagatgttaaaaattcttaacctatataaattggtgtttcgacttttgctgccatttatttttggagattggaattacattctttggattgatttttaaaaattggtctttgttagcttgacagaagaacactattattagtaatatcaaacctcattcccttaaaataccttgcttagatgtttccaatgactagagaaatggacataccaatatatgtttattaagag

SEQ ID NO: 587029 - DNA, 4001 bp, Homo sapiens
taaaggcataaaataaacggtaaatatttcatttattccccagatacccagtgacaccactcagaagccctctgtgaattatttttggtatatttgtccagaaactttgcatgtacatatatatacatacaaatatataagtattatgaaaaaaagaaatacagatggaatcataaaatatctccttgctttttgcactgtgtattggaaatcttttcatctcaggaagcatgcatctatctcatttaaaaaaggttaacataatattcatttcagacattcaattcccgtcattcatgaacagtgcagctgtgaagagcctcttgcacatatttttgcttatttatacaaaaccatgcttagaaaaaattcttagtaatttttaggatgaaaggtgttttatgcattattaattttgataaatagttccacattattttggttatatctttgaaagatggagacaaaatgcatttcaaacttctgctcagaaaacttcccaagttatctaaatgtgtttaaaaggcatgtggagggagaaagagagttgtcaggaactagtttcagaacattcttctattttggtggctatacaaccctgctgcacagcagaatcacctggagatcttagaaaattgtgtgagttctaacactagaaattctgacttaatagatctgagattgggtttgaacattggtattttcaaaaatcaacctagagattctaatgggtagccagtgcttagaatcactgctttaaacagagcaaggggaggtagagggctcaggtaaagaatatgacagtaccactaagattgtacccatgaagcaaaaaagaaatgatcaatttcctatataaaaagccacatcaggcgaaaagggtcagatgagggttggagaagaaaagaagagagaaaagagaggtctaggtgagggaatggcagagctggtaaggccaggtcctgtggtcttcttgggtgctggtcacagagtccactcttttgggtaaagatgaagtcgaagctgaagccgcttccaggctcttctcagcccagggttatcttgaatcagtagaattgagtggctggcagggtaggcagccatgatgatctggcacaaattattccacagactgttgatgtcaaacatgttggacaggtagataaacagagcaactgcattgaaaatgtagagaatgagaaagtagctgatagctttgatggcccccatgtgagcctccatgctggggtcgttggaccctgtggcattgcttcccatgtgtagggtgtgtctcttgagagagaggatcagcagggtggctgtcaggatgaacatgatcagaggagtcacaatccccaggttaaagaaaaaagccagaccgaccacattgatctcagacaagtatgttttcttagtggagttggaggagtggatagggaaagaattgttacaatacacagtgcagatgttgatgcagaacatgctgtgactgaaggaaataaacacggacagccacagaagccagggtatcaatccagtaattctccacctcagtttgaggaaaagggggtaggagaaattggcaatcttcacaaagtagaagaaactgagccaggcagcaaaccacaggctacaaaaatttaagaatataaaacttattttgaatgcataatatacagcgtcttcagaataaaaacttagggaggttgagctgatggtaatttctaacatcatgaggctttggagagctattctggatacactcaggaaaaccaggatcctgccacttgtggaaactgccttattttgaacccattcagctgcatgtatagccatgatgaaaccatttgcaatgataccaatgaggtattcagcaagtaaaactgctaaaattaaggtgatgagaaatggcgacaattcactttctgcaggatcgcagagtttagtcattctgagctgttgcttctctttggtgtctggaggaaaacatctccctagcatttgatgggcagactcttgataactcccagtattgatgtcataggaggaagcaattgatgtatcatttccaaattcactgcatttgtttatttcagaattcttagctctacatctagagatgcaaatgttggaaggatttggtttctaatcctctctctatttttgaacatgttggtagtggttcaataatgaggcccagggaagcgcttgagtagactctttaaaagcagctaacatggtactgaggtccgtgttctttggtagcatcagttaatttgaacattggttaactgagtcatcatttaacttactttcacttgtgactgcagaaaatgattgaaaataaaaactgctacacacatacacacacacacacgcacttctcattttgtgctaagaaattttcaaatgatttatttataattactacatttaaacctcacaacaaccttatgagcatgtgcttctattacctccattttgcagatgaagaaactaaggcatacagaggttaaataacttggccaacatcacacaactagagcgtgatagaactgggattcaaacccaagtcacctggtcgcagagttcctcctcttatccaccatgttatgctacctagacctgtggattcttttgtgtgcccaagactaaatgcagggttgattccactatgacatttttttcctggtagccttttatgtccccaccctctaaagaaaaatcaataaagcaagaagacactgatttttaagagataggactctcttttcaaagtagattacttgagaggtaataaatttaattatacataaaagatcatacacacacacacacacacacacatattcacctttcattttaagcaaaactaggaaaataagagttgaaggtaaaactccctagttcctagcaaggtaagctagcgaacctgagaataaaagcaatgtcccaattcatccaattttggaatattaaaacaaaaagaaaggaaaaaagaatcacttttatcttaaggaatttttttctgattttaaaacgcaagcataggacacataatgataaaatggacttttcatttcagggtaaattaatttttatgaatgtatgtaactttaaaataatgatgaagtaataattctaataaagagaaagttggtgggtgagaagtctcagaaaatctttataacatttggtttttacttaaagccttttaaaaacaaggcaagaactcataaacgttttctggcttgattaatgattttagatgagttgttacgaattttaccatctcatttgaaaatcactattcctgaacaaatatttcccttgaatacagcgtaatagacaactgctcctctctgcttgtttctacccatttgcacaagtaggcctggagtatctcaggacctccagtttggttttaaagaggatttttcttgccactggctttcccctacttctgctgatccaggcttccaagagtgggaggagaaacaggacatggtcccttcagaggctgttgcgtctttcctcatttgatttgtttatccatgtatcccactctgagcccctagcccatgccagacacccaggaggcagtacatagatacttgctgggttgatatatggccttagtgaagaccttcagctcagagaagctctttatgagagacatgaggaggaatggcagttccacgtctcctcaaatttgaaaatctgcaggtcctatgcctaaatcaagtgtcagagcataaacagtgaggttcagtgagaacacagcagactgtagagaacatctgtgtaagaaacactggtgggtgacagaggggaacaaaggaaggggaagcagagacagagcagccagatgagaaagagctcagacagggtctggcttcacagtgtagggtgctgcagaggctgtgggcaggagctgggaccacagacatcaccaaaggcatttcagaagatgctctgcttgccacagcttatgaaagagg

SEQ ID NO: 587030 - DNA, 4001 bp, Homo sapiens
ttgtaaatttgtactcatatggtgttaatttcattatctagcacttgcctttgaccttaagctggtttccctggattttaagatttttggaaccattcttgattcagtttcttaaatactaatcactttcctctacttaccaactctggcaatatcctcttttccagaacaagcctagaaaccttagggtttcttgctaggaatagcacagttactattacccagcaagtgtgaggatactttttctgtcttgtcccagagtgtacgtctatttctttttttgagacagagtcttgctctgtcgcccagactggagtgcagtggcgcgatctcatctcactgcaagctccgcctcctgggttgaagccattctcctgcctcagcctcccgagtagctgggactacaggtgcccgccaccacgcccagctaatttttttgtatttttagtagagacagggtttcaccgtgttagccaggatggtctcgatctcctgacctcacgattcacctgcctcggcctcccaaagagctgggattacaagcatgagccaccgcgcctggcccagtgtacgcctatttctcttcacctttctctttccttcttttctctctgaaaccttccttttttccttttctctttgcactgaacccccttcctctgctttcggtcagtccagtggctcccagtgaccacctatccactgctgagcccttactcagggctcctcagctaaaccacaaatatctaactcatcacgtgcaccccaatgtgttctctaatttggaagaatttcccattatacttcaatagacaatgaaacaatgtgatgatttccattatacatggattcaatggccatgcaaaatacatgacaaataatgcctcaaaaaagtttcttacagaatgtgccttattttaaaatacttacataccaaaaaaaaaaaattacagaatgaactgaaattcaggcactcaaaagcctatgatgtcagatcagcaatcacaaaactgaattccccagatcactgggaaaactgcaaacagaaaatcttgcccccaaaccatcaggtaaatctaggtattgtttactgaaattccactattttttgaaacaaagaatcttctttgctgttgttttcagtttaggatgtgtgataataatgagaacagaatgtcctggagagtaaagggtggcaaaaatcagacaaatggatttggtccccatatccatccctgcataaaaggggagatactggaccagggtagcaactgaatatggaatgtagaggatgaggaaatagaccatcagcttcatagcacctacatgagcttccgtctggggattccagaaaccagtggcatttttctgcatcttctgtatatgtctcctcaaggagtgtattagcaaggaagcagaagtcacattaatgatgaactggagagatgagctcaagaccaaagaaaccactaaagacaagatgccctcactgatattaaatgatgtgttatttctcgtagtcacaagttcaggaaaaggtgatgcctggctaagcgtgatgtacaggcaagtggtgaaagcagaaatcagcacacaggccagcagcagcctggggatctttggggagatattccgcttcagcaggagaaacactgagtgttggaagttagtaatcttcacacagtacaagatattgagcaaggtcacaaaccagacactgctcgagtccaaaaacatgaaacacaacacaaaaaaagcagacaggtagactgacctttccgtatttgaagagacgaagtagatggtgttcaccagaaatagtcccagcataagaaacctggtgatgcccaggctgaacagaatcctatcagaagaggagattctatggcttttgacccaagttttgcaattgaccactgtaataaacagattcataatgattcctacaaaatttaaaataactgaggcaataatagcagagaaatagaataaccgaagcatctttactcattgaggattcagcagttgtggtgctgatagtggaggcagaagaaataccaaaatgtataagcagacaccagtatccagccaggaaggacatctcctttttaatttttcccagcatggcaaatgagccattcatgatcaagggccacctgattttactgagatgcaaatcttccaaggattacattactatttcttcattagtatcctgttctccttagaaatgcctaattacagcaagcctaggtgatgctgggagtccactcctccaagagcaggagggcgagagggaagagtcacagcaggctccaaaaacttagaatccaaaccagagagcttgagtccagcaatgtttctgtcaatgttttacggtaaagtttttcttcataaaaatgccagaatatggtggaaatcctaattcctcactcctacccacccacctcctagccacatattcatggatgaccagaatccaatttctctctcccctctaatctgttgctgccacaacaagtttcaccaattggccatgccaatgccactctttcaacctcagtgattcacctatagcgatttacagtgatctaatagatcaagttcaaagacccaatacctccttgagaaaacctttctcaattaatcccattctttctgatgccctttgctttgccttctctatctacatacatagatttgtgccataaccatttgctatgttctggttttccttagaaaaaattaagtcagcccttgtaggtgtttcctttataaatctgggtttatgtttagatcatatgtggctattttctcttaggcatttaactgtcaatccaggtaccctggaatgagatacacagtaatgcattagttgtagttttgtgagccaaacagctaggcatctcattgctggatttctctgtacttgctcagatgggaaatggcaaaatatccctggcaaatgatattatggaggcccataggtgaatgtaagagtatggcatctcttatcttctctagcagctgaatgaaaccaaggtgcaatcctggatgcagccacagatgttaccaaagtagcatcaaggtacagcacaaagtcctactgccaagtccaaatagaaacagacaagaaaaaggagctaagatttaataataatcaggtccagaagaggggaatacattcatgaggccctttaagacagatgacaggaagcctagcctggagaaattctctgacctggtgcccaggtgcttacagaagctttttattcaaaactaacaggcactgatagaggcatgcccacatcaggtaagcaggcaaacagaatgagccaggaagactatgactaaaaggaaaattatagcacagatttccaattacttatccatagatggctgcattaaagtggtgaagttgaaatattactaacatcacatttaaatagaataaatgatatagagtaagccataacagataaatgtggccaaaagagcaggaatcccagaattagatagtaacaaactctatctagaatgtactataccaaattgttgggttctctgtaggaggaagtgctataattaagatgtgataaggttggctagcacaatcaatgaatgagctcattcagttagaagttatttccacaagggtcagtataggaaaagtgttagcagaaccctttctccctatgcatgagaatttgacctatggttaaacttcctagctgttttccttatcatgatgataaggatgataaggataatcttatccttatatgataagggtaagaacatcaactatgtttctagaacaaaaaaaaaaaagactcttgattggaaaattgcatcttgactggaaggaactataagtgaactgtaataagtatcttatggagtctacatgcattgggcttccttcccatgtacctgtaccttgactcaaccctagaagctttgtctacaaaattaccacaaaataaattggatcttttggg

SEQ ID NO: 587031 - DNA, 4001 bp, Homo sapiens
ataatgtttttcctcttctccagcagcctgccccaagtaacccgctcttgccccactatttacttcaaggtaacccagaactggtaaaaccagaggcacaggtgccgctagcattgccacagagtcaggagctgagcaaaacagacgcttacttactctggcctcttccttttctctttctgcttcctgcccacttcactcttttccctgcattctttctttcctctctgctcactttgtcccctcccatttggagaaataaagcattgaactgacccttcacatatccatctgccgttctataactcatctttatctgcaaacatcctctctagactattggtttttacccatcccctcccttttggcattatcttctggaactcctgggatcaggatgtcaccctatcactccactaatggcacacatggcatccttttagtcaaatccagagcctttttcttcaccctttactttcctcggaactctgcagcacttgataatttccagcagcctttctttcctgaatcttctttttctgtagccactctggtttcccttctaccccgtggactgagtgctgtgctctgcttcaccagccctaactgtgtgttagttgggtgtcttaagtaggatgatcatgtaattcttcatccagaccatgatattcttgagaattaaaggatgctcaattgacaacagacaataaacagagattgtccctggcaaaccgatatgtctggccaccctctccttaaggctcaggaggagaagaaagtggagagatctcagggcaggatatgaatgaacatagttcaaggagctttcaaagtccatcttcaggtttcttagttacttctgtttagaatctcaagttaaaaattcagcttcatatttataaaaggatcacgttatctgagaagtgtcagagcaggtttgggagagaagagacgggtgaggagagagttctacctgaggcaaaggcagaagtggttggaccaggtcccgcagaactccgtgagttccagtcacagagtctgcccttttaggtaaagaggaacttggtgctgaaaccgcttccaggctcttctcagcccagggttgcccaagatcagttgtactgagtggccggcagggtaggcagccatgatgatcttgcacaaaatattccaggaactgtaagtgtcaaagatgttggacgtggaaagaaatagagcaattgcattgaaaatgtagaggatgagaaagtagctggtggctttgatggcccctatgtgagccttcatgctggggtccctggaccctgtggcattgcttcccatgtgtagggtgtgtctcttgagagagaggatcagcagggtggctgccaggatgaacatgatcagaggaacgaagatccccatgttatagaaaaataccaggttgaccatattggtctcagagaagtacttcttctccgtggagttggaggaggggataggaatggagctattcacatacacattgaagacatctctcgagagaggaaagctgaagcttaaggaaaccaacactgacagcctgagaagccaaggcatcagcactatgattttcctcttcatcaggaagaacaaaggatgattgaagtttgcaattctaagacaatagaagactttgagccaggcagcaaaccagagattggaatggttcagaaagacagtgatgactttgaagaggatatacactgagttttggttataaacaattcggaatagcagactgaaaatgttctccagcatcatccaaatctgtagcaagagcctggaaaagctcagcatcaacataatgcggtcaccagtggggagtgttttgcccctggcccactcagccccatagatggccgtgatgaagccactcccaaggatgccagtgatgcactctattccggagaccaccaaagtgaaggtgaccttgaacttggatatgtctttatctgtggcatctgtgttcaccgttgccattctctttgatcctgactttcaggtttctgcgccaagaatgggtaactgctctgcaatcttctgacccttgctcaatgttataatttctgccgccctcattaatggttatttccaatttttctccatttgtttatcacatgactacaagttagaggcttcacatgcaaataatgagaggatctggttactgggtctgtctcaatttttcataaagatacatttgtcttgggctttcagaagctcactggaaataatttgagacatgtttctagctcaacaccttcttaccttatttactttaagtccacatttacctgataagcaatgaatacaaggcctttttacttgtctcacaagatctctgttacctgctaaattatttgtaaaagctcatacagcttttaaaatctgttttccccacttcttttcttgtctctcttattttgggagagagttttattttgatagttaccatgtttgtgaataagaaattcccataagctcatatatgaacatcttttacttagaattgagtttcttccaaaaaggcctgctattataatgtcctcgaatagtatatagaaaagccaaaattggatgctattcgagttggagagaaggaagtctccatagtcccagtttttattgtttgtgtatgtgtcatcaatttcagcttactgagatcccacatgactatttgagctcagaatcaggtagaatgagcctggggagaattcagtgttctggacatggtgttgaagtttggaaatgtgataaggtactatgacttgaaatttaatttcctactttttaaccctggctgtgaaccagaatgaactctggcactttacaagaatatgtagatgcccaggactcgtccaaatctaggaaatcagaactggactagggctcaggcatgctatcttttaaaaaagccgaaaggtcttgttgctcatagtcaggattgagatccaaaatcttagctggaaaccaatgagccttgggtcagatttggcctgtagtcattttaccttgcattggttaatgctgtacagcattaatccaccagtgtgtaacttttctttttgaggggttctattggcaaacatttaaacttaggagattacttatatgcatgcacaaaaaatctatcttctcttgaaaaattagaagatttggcagtattgggtcttcatagtgaactggctgaagctgagtaatggctgcccattttaaacaaggtatatacttttcagtttgttgacaatactaattcctagtgtcttcttgacacagaagctgagtgccagttatcattttccagtgtgcttaccctgttatttttatttgattatttttctttttgagactgggtctcactctatcacccaggctggagtgcagtggtgtaatcatggctcactgcagccttgacctccatagctcaggtgatccccacacttcagccacctgagtagctgggactacagatgcatgccaacacacctggctaagttttgtattttttgtagagacagagtttcgccatgttggctaggctgatcttgaattcttgggctcaagcaatcctcccatctcagcctccgaaaatactgggactataggtgtgagctaccatccttcacaccttggtccattatattttgggccttggtccattatattttttaataatataaattgatgaatgataaaaatgggtttccccaccccaaattaattttatttaaaataaggaagttggctgggcgcagtggctcatgcccgcaatcctagcactttgggaggctgaggaggaggattgcttgagctcaggggtttgaggtcaggctgggcaacatagtgaaaccccttctctaccaaaaatacaaaaaattatctgggcatggtggcatgcacctgtggtctcaactactcgagaggctgaggtgggaggatccttgagcctgggaggcggaggtctcagtgagctgagatgg

SEQ ID NO: 587032 - DNA, 4001 bp, Homo sapiens
gtctcactctgttgcccaggctggagtacagtgatcacagctcaccgcagcctctatctcctgagctcaagtgatcctcccacctcagactcacgagtagctgggaccacaggtgcacaccaccacacctggctgatttttttgaatttttagtggagaggaggtctcgctatcttgcccaggctgctcttgaactcctgagctcgagcagtctgcctgactcagcttcccaaagtgttgggattacggacgtcaccactcccagtccagtgaaattcctgagtctgtttttcagattgaaaagtacatgtttattcaatgcagatgtgactctgtgacatatgcttgaggaagacaagaaagtcacaatgtgtctttttctaaaggaatgataaacaagaaaaaagtctggctactactcagacttcagagaagagaaaattgaagtcagaaatgttaatgagaaaagaaactgggtggtgtaaagaaaccttccagtaaacttaataaaattaaaaccagattatccaagtttgtgtggagacaaagtatcttcatgcagtaaagggcaatcagaactcacagcccaggccactgcctgccacaactgcctgtcccttggggctctcgtagtaaccatgacatttgtcctcaagaaggctgtcgcttcactatccacatctcagttcagccatagaggcaaatatttgctcttaactttctgaaaggcagtggagatgcgatggcacagttaatcaacacttttaatcgaagccttccagataacaaaggggtacaaacgtaaggagtagcacgacatcatattaacatattctgaacttctgggcaatactggctctctgggatccatgggactgcatctttataacattccaaagaagggaagcatgctcagagagttcccagatttccttgtctcctccgcttcccagaggaggagccccataacagtacccagtattcatctacctatgaaaacacctccatgtcagtgggccacagctctgccatcctcacctttcttttccgggggtctagataaggaaaccatgccatctaggccacccagaagccccttgccaacaacaggagctgcgagaacacgcttcgaagcttgaggttgctgaagatgaggatgaagggatggacagatatgcacaggtagactgcaatttgccatggccagtaaaagtcgttctgcatggagataaattttgcggcatcaatgatcagggacagaaaggacagagcataaagaatgaggaaggagatgagggacttcagagctctggtgtgagcctgggtgctggggtcctgcaggctgtgcccgttgtgctgcattctctgagtatgcctcctcagagaattaattaacagcataattgagaccagaaaaacagaaaaaggaattgaccagatgaccagtttcagggatgggaaatagtatgtttctatccttgtattccacttgtaggtcatgttcccagaaaattttctaattaaaaattcttgatatacagggtagttcacccaaaaaaacagcagggttatgatgaaggagatcaggacagagcccaacaggagccagggcacccaccctgggaacctccacttcagccacaggaaggtggagtgtgtgatgttagcaatcttcacacagaacaggacactgagccagctgcaaaaccagaaggtggctgagttcaggaagtgccagtgtagatggaagaactgtcggccgagacccccagagtactcgaccttctgggcagagtagtagaagttgtgcaccgtcccaaccaactgcaggcagaagcgggaggcacccaagctaatgaggatcatatccaagggcagcaacctgccatatcgcagccactccctgcccagcaccagcacaatgaagccattcgctgcaatccccagaagactcagcaggctaaagagcaacacgaagaaggccgtcagtgctgcttgcattctgacccctcctgcagtccccacttgagtgccttggtccctggcctcctccctgcccctagccacagtcctgtttttaatctttcctaggagtgctaaagagtggtcaggctctgcatctgaaccagagctcacttagagaggaggatgctcaggctaaagaggagaggtgtgctcttggctcagacaggatgcaaatttatcctagtgtcagttaccactaggcctgcaaattaccctaatttgccttgtccagttttcctgcatgctgccatggttagtatcaatgtctatgatttttctgggtctctgtgactgagttccatcctcaggccgtatgaacactcctcttcccatcagaacattcttaagactttaaatatagagacaagtataggagatacacaggaaaaatagtgacatcaaagaattctgtctcagtacttccctgttacacatccatgcttaccttactgcctttgcccacaaatcgcttcaaaatcaaacacttcgtctacctctccatccagatctctacttagatcctccatgaatcctgagatgtaaatgataatggtgtaaacgggttttgtatttccagtgagagaattcattatcatgtggttgaggggccttccgaagcaggactgagagcccctgtttcttcctgggtgttggtgggagactgctctctggtcctagaggcctctcacagtctctgccaggtaagctgtttcagcatggccactcacgtcaagtcagcagtctctaaagggagtctgctaacaagatggggtcttaaataacataacacaatcattggagtgacagcctatcacctttgccatagtctattggctagaagcaagtcactgtcaccaacaacactcaaaagaaggaggttacacaaaggcccaacaccagggttgagggacaggcagggccactttacagtctgtctgccaccctgagatacccgaggcatatgtgagtcctgtctaacaccaacatcaaaaagaagtccctatgagaccatgttgaaagtaaaaatattttcttttaaaatatatctatcacctcacataattcctgttttcaatttcttcatgtgtagtgagaacacttaagatctaccctctcatgaaagttcaagtatacagtgcagtattgtttactatactcatactaccataccttaggtttccaaagcatgttcacttagcataactgaaacttcataccccttgaccaatatctccccatttccccttccagaaccctggcaaccaccaatctactctctacttctgtgggtttgttttttcagattccacatgtaagtgagatcgtacaatatatgtatttctgtctctggagcatttcacatagcataatgtcctccagttccatctacgttgttgcaaatggcagaatcgccttttctaagactgaatcatattccattgtgtatgcacaccacattttctttgttcattcatctgttaatgggcttttagattgtttccatgtcttggctattgtgaataattttcaatgaacatgggagtgcagatatctcttcaaaatactagtttcatttcctttgcatatacacctaaaagtggaattactggataaggtaggtctgtttttaattttctgagaaatctttatagtgttttccataatttatattcctgtcaacagactgaaagagctgcttttctctgtatttttgccaacacttgttatccttcatctttttggtaacagccattctaacacatgtaagatgatacctcattgtggttttgatttgcatttctcaggtgatttgtgatattaaacatattttcatgaacgatttttgtcttcttttgagagatgttattcaggtcctttgcccattttaaaatcaggttatttatgttttttgtttatttctgcactacagttgaataagttccttgtatttttattatttgtatttatttatttca

SEQ ID NO: 587033 - DNA, 4001 bp, Homo sapiens
ccgcctcagcctcccgagtagctgggactacaggtgcccgccaacacaccaggctaattttttgtatttttagtagagatggggtttaatcatgttagccaggatggtcttgatctctttttttttttttttttgagacggagtcccgctctgtcgcccaggccggactgcggactgcagtggcgcaatctcggctcactgcaagctccgcttcccgggttcacgccattctcctgcctcagcctcccgagtagctgggactacaggcgcccgccaccgcgcccggctaatttggtcttgatctcttgacctcgtgatccgcccgcctcagcctcccaaagcgctgggattacaggcgtgagcctgatttttattctgaaagccaaggctagggctcaaagaaacttccagaaatataaagatgttttgttttgtttttcagttagataattagatacattacagcagagaaatggggaaattatttgatactttttaaaaagcatatctaaaatgactaacattaatgtataggtaaaatttcataaaaattaatgatcactataattgttcctaatctctgttttctatactaggaaaaacacaatttatatatgaatttttgctatatgtagacagaattgttcctaatctctgctttttataataggaaaaacacgatttatatatgaattatttgctatatgtagagagaatataatacctcttttaccaaacatgaagccctagccttgatttctgtggtacattaaaaaaatatactttgcattgccaaaagagacatagtattgggttttgatccgtattttctgttgctcattcattacattggtgtaaaagaaggaaaatcttaaaagacatggaaagcagctcccttatagagagctatcaaaagagcgtcccaagagtgtcctgaccacacttttcttcccagatcatgggccccagcatctccgagcacacactgtcttccacaggatcttctgacaagtctgcttcaccctaggaatccccatgatcaatatgagagaatgaagagaaggataggctgccatgagtgtctcccagatgaagacactggtgagatcaggaggataagtcttggaggtgatggagaaggggctggccatgatataaaccaggtgaagtaagaggaagcagcccaaggacttcagcgcagtgatgtgagccttggcccggacatccctcctaccagctgaatggaccttcatcttcttgtggtgtgtatacaaagagacaatcagcatcccagaggaaacaagaaacaccactaaaggcaaataacttcctgaattgagctgaaatgcatacaggtactgccagctttcaaagggataccgaatgctgctgtttccttggggaggatgatagaatgttaagccaatttggactgtaagtaacaaattgattataaagtagcccagaaggcaccagagactcaggttataggccctctgcttcagccacaagtaggccgggcgatcgaaggtcgtgatcttcttgcaatagaagacactgaggaaggtggcaaaccataagctggcctggcttaccaggacccagaagatactaagatagcgaagccaacggctgctctggaaaagtggaaacaagcttaagtccaaaatgatcagccactgcaggagaaatcggcagccagccaggcccaggataatgaggttatatgaggaccagttgaattttctgatccattctctaaaactccagaccaccaggcttccatttccaattaaaccgatgagaaattcaaccactgccaccagcatcagcagtcctaggccagcgctcagcatggctggggagaggaggctctcactgctcctggctgaggtcagatcccctggtagtgataacacaccagggtaaattttcacaccacaaaatctggatttggcctcgtccttccgtaatctgtcttcaagcgagactgaacagctgtgatgaggaacagagaggttggaagttatgataccatctgtatttgcatctacatgaatgaaccctgagtgtagaaccagagattgcaaacagtaccacagacaccggctctccatctcaaaggttttgggccaaagtctagacaccagggtataacgtaacaaggcccctcaacaagaaagaccaaatcaaaacatgctcaggtgctatacagtgccagttatgagctcatatgctatataaaaaaagaaattttattttcatgaaaagaacactgggccaggcatggtggctcacacctgtaatcccaacactttgagaggccaaggcgggtggatcacctgaagccaggagttcgagaccaccctggccaacatggtgaagccccatctctactaaaaatacaaaaattatctgggcgtggtggtggctgcctgtagtcccagctactcgggaggctgaggcaggagaaccacttgaacccaggagatggaagctgcagtgggccaagatcgcgccactgcactccagcctgggcgacagagcaagactccatctcaaaaaaaaaaagtaagcatgctgagaactctctacgaagctgtaggcaggcaggccactgcccgtctctgggcctcagttgctctattaataactgaatggattgtaggatgagatttccattccttcggactaaatttacaaagtgcttattttgtgtcaaactacggtgtactaggcacaggggacggcgccattataatacacagtccctgcctccaggtagcatccattgtacatcatctccaccaagctgcaaggcctggtactctaaaactctggctgtaggctatggaggggcagaggtggtcgcgatcttctactggactaaaaatctagatgaggcttgaactcgtccaaaaacagtgtttcttcagtgactttctgatagagacatagtgcctctctctccccacctgccccaatctagcctggcagtggaatttgccaccgatcctggtagccaactgacacgtttccagaaagctagtctggcatcaaaaaaaccaaagtatccagaaatataaaggtaggtttttgactactttactaccggtgttgagaggctaaactacatagaaaattgagataataatttagctaattcccctaagaaaagtgcttgcctaaaaaatatacaggctcacctctttttaaaatatattattttcaaactatagctattttctacttccttttatcaaaaacatagcatattggcaaagaaaacttgattatctgcagtaatttttaaaaatgtgatacttcccatgcaaaatatgaaaactcggttttgacttctgtagtttattaaaatgatgtgatttgcattgcttagagagcaataagctccagtttctagcctgtttttcatgttaccctttcattttgtttcaaaatcaaagaagaaatgaggagaattgagaataaaaatttcatttttctaaaatctacagttatttttactgttgtcagtgatacagttaagggcctgattagatccttcttccaagtcatggcctctaggatttccatgtacatatcatctcctacagaattctctgacaagtctgattcctcataaccattacaatagacggaaatgaagtataaacagccatgagtgttgcagagatggcaagaatggtgagatcagagggagattagaaggtcatggaaaagtgtctggccaaggcagaaaccatgtaaagggggaagttcagagcgatgagcaccttggtttgagcctcctcctgacagctgtgtggtcctccatcttcctgtgatgtctttacaaaaagacaagtggaacagaaacatcacaaatagcaatcagtctccttcactggacagcaatctataaaaataacagatttaaaatgggatgcaggatgttgctgtttcctgttaagggtttttaaagggtccagccaacaagagct

SEQ ID NO: 587034 - DNA, 4001 bp, Homo sapiens
gcagggctaggatcacagatgtcagccttgaaaagccaaaaacagagaccagtcctctaatgtagagtgtggtggaggtaaaaaccaggaaaggaggcggagagattttaaagtgaatggaggaaacttgagggttgtctcgtttgaatgattcagggagtaactgaacttaaagaacgtttgagaggagctgggaaaagcagaaaggcagtctgaacatggttcaccaaacacaaaggctttttcttcttaaatcttaggtcttagacagatacagataaacttccccatgtcagtaggggaattacaataggtcccaatatcaatcaaaagaagttacatctgaacccacagaccttaacaaatacagaggagactaacaggctgggctattatagagaacatgaaccacatacaaatcatagacccctggcactcagagggatctccaaaggtcatcggagaatacacacatccctggcaacacacactgccacacacatgcaccaattacactatgctctgtgtagaaggtttagacaccagaaactcttccatggaaagaaggagagaggcaccacattagatggccagaaaactttgaattgatgagaagggaaaggtggttcacaggacaaagcctgagaaaactgcagttccaaaaacatgccccagttcgattgaacagataaaatattgcatgaagtttgaggatctttgcatccagttcccagaatgattattttaaatacgaagagatcgatcacaggaaaaataaaggcttctggattctttgaccacatcaggtcccacaggaaccatggccacatgaactatgcacttggtgagtacataacatgacactagcccatatttcaggacctttactctcaccttgtatcctatttcattgaagttatttttctaatcattaactgtagcaacagagagaaaacattcaatgtggcaaagagagaagctatgtccctttgagtccatgccttctccacaagaatctccttgaagtttttcatcagctgtggctcaaggtgtcccacaccttgaggaacgacgactcttcagcacagctctcagcctgcagttgctgaagagcagaatgatggggtgaactgctgcacacagataaatcactgactcccacacccagaatttaaagtccagaggtggaaaaatacctgcagcactgaacaccagtgacaggaaatatgagatgaagagcatggcaaaagagaggagagccagcagagcctttatgtgtgcctgcacactgggctctcggaatcctgaggttgtaaggagagccttcttcctgtgtcttcccagagatgtgatgagcaaaatcatgcaaatgaaaaagacagcagtgggcattgtccaagtaatcatttttagagggaagagatagaatttctcacagtagctccgtatgctatcgccagtgacattccaaggttgtagatggttccttaaatagttctgatacattctgtggttgcctatgaaaaatagaatggtggtgaagctggagagccctacagagctgaagagcatccatggtagccacccagacaacttgtgctttagccagaagaagacagggtgggtgaaggtagcaattttcacacaatagaagacactgagccaggtagaggaccataaggtggcagcattcaggaagtcccactggaaagctagaaactgcagtacagggttgtatgggaaggccatcggatgcaagaaaacataaatggtcttacccattaccactgactgcagacagaagcgagaggcccctaggctaaccaataacttatcacaaggcaacaacattctccgtagcacccactccacgcccagagcagcagtgatgaagccattgcctgctattgctaccaggcgtaaaaggagtaaaatggtaaccaagatgatggccttcttgtcagtcaccgaagatcctagaaccatgtggtctccattcatctctctggtggacaagatgggtcccaaaacttcaagggctatctctgttgggttgctctggaaggtcctgtaggatatgtttgtccctccagctgccccaagcgcagaagctaggccagagtagaggacgcaggctatcagaggagggtgagaggttttttcttctcagagtagatgcaaatattgtcaaggctcaattttcaaagtccccatacctgcccaaaaatttgcctgctcttctgcctattctctgcccatgtcaacatcaaagtggataatatatcaggccctggcatttagtgtccttacacaggaggttatacttctctaagcggacacctatgacaggaccatgcacctgccagctcagtagtatcatccgtggggcacacccgctactgagacagcgctcacatccacggggggggggtgattgttatgttgcaggcattgttctgagtgctctccttagttctcacaacaactctatgcggggagtagtatggcaagacccctttaactgagacagagagaaaactgagcaaacctttacagagaaggattaattcaagtcttattactcacagtgaccatcatcataaaaaaagaacactggagacaattatacataatgaggcaggcaacttttttcaaaatttaaaaatatatatttgataactggtggcctctaaaatagcacttcacagaggaacccccagtagcgataagccaatgggatatggcagaatgagccctgtgctaggagtcgagacagcctttagtccaaactttaccccttactgtgagttgctggatatgtcagcccctctgcgcctcattttgtccatctgtaaaatatgaaaagtatcctatgttctaattcacaaagatgtcttagaatctcggcttagaatgaaagaagacatgaaagataatcttacagataaaagaaataagaccccaaattatatattacaactcccacctaaagtcacagttacacagaggaaagaccaagatccaaactgattccaggaccaggaatctctgccatggttagcaatacatgttacacctccatcttcttcatccctagctgaactcagaagcccaagttttgagtcttgtcacaatcactacggatcctcaagcagttaacctctctgaacacccccctttcttcacctataaaaaatatgggtcacaaataaatatgaccataaatatggtaaatatattggaaattataaacctctgcatatggacaaggagcaatgatgatgatgacaattactttattagaatggctatcttctattccatccatcctgtggcataataagtagcataaggagaattcaggagagcatcagggatgcaacagaagttcagggcaccaaatgtcagaccactgatatcaaccagagaaggacagagtaaaaaaaagaccacattctttatagaaatcagcttcaaagagtcaaaaaaatcagcaatcaacacccaggtgagtgtaagtaggttaacgtgtcacagggagataggaaagcaggaattgttctgggtcaaatacagcaatattgaaggctcaggatcaagtaacatgacagtaaggggatttgtaatgaatacacatctgctgacaccacaacctaccagttccatatataggacccccacaaaaagggaatagaacgcatgtcagcatctcttcccagttcccagtctacttcccagtagtccacttccaggtggaattgtttctttaacacatacgccaaccatagtggacataggtcttcggagtaaaggaaataagatgaactaaggtaattcactctgcctttctgtgaagatgcaaatttccaggagatagagttcccaactgctctcttccttgcccttgttcttctggctgacatttggctgttttctactggaacttggagaaatggggcaaacttcgggcttatagctctggagtatggccacctacaaac

SEQ ID NO: 587035 - DNA, 4001 bp, Homo sapiens
tcagtataaaacccgattgtacgttccatctactgagatagggaaaaaccgccttagggctggaggtgggacatgtgggcagcaatactgctttgtaaagcattgagatgtttatgtgtatgcatatctaaaagcacagcacttgattctttaccttgtctatgatgcaaagacctttgttcacgtgtttgtctgctgaccctctccccactattgtcttgtgaccctgacatagccccctctcggagaaacacccacaaatgatcaataaatactaagggaactcagaggctggcgggatcctccatatgctgaacgctggttccccggatccccttatttctttctctgtactttgtgtctttttcttttccaagtctctcattccacctaacgagaaacacccacaggtgtggaggggcaacccaccccttcagtgtggtggtgcgcgcctgtaatcccaggtactcaggaggctgaggcaggagaatcgcttgaacctgggaggcggaggttgcaatgagccgcgatcgcgccactgcactccagcctgggagacagagcaagactccatctcaaggaaaaaaaaaaaaaaagaacgtgatgactagaaaacaaaaactacaatgttctttgaagttgaacaatcagtttgaaaaataaataaaaccttattagaagtcggcatcatcaaacaatccttcaagtttacccttgaaaggaacagaacgaaagagaaaggctgtcctaagctccttccctaaacccgaaaagcactttgaggacgatcgacccacttttagtttctattcaaatgatctctttaaatcctttaggaattgagcaccaaacttgtaactattaattgttcgtgcacagctcgtagaaattttaacattagcagaatgcagacagctgaaaaatcaagatttattttcccatctaaagcctaacataatagcaattcataaccactgtgtgaaaccggaaatctaacactgtgtatgtctaaagtcaaatgccagtgttttctaacaaaacttttaccaataaggtgtgtacacacacccacacagacgcacgctaagctcaattttttactaataaggtgtacgcgcgcgcgcgcacgctaaactctagccacagattccctaagccaggagtgcaagtcggtcgggactagtccacaccttgcgaacggggcggggtggggaatggattccaggtgaagcaggccatcagccagaaccgccaactccgcccgcggccctcaaaagtaggcggcgcagggagtctccgcccccttcgccaccggcgactcaaaccaaaacagctgggtttctctccgcaaaggcaaaccccagcgtccttctcggacgcgacctacgtgttttctcagcttactgcgccggtaaaacccacactgccctcaaaacagtcaccccagagtttagccttggacaccagaagcttttccttcgggggtcgccagcgtcactcgtccccagccaaagggcccccgtcccacacgcctcccccaaatcgcgaaggcctgtcccacgggcctcccaccgcgtggggcggccacccgttgccattccaaaactccacagctgatccgagtcgcccacacccccgtcacaatcgcagtctggaaaggaaggtttgtcttcgggaaggaaagcctcgtcaccacagagacctctcccgagaccggccaggcccctacagtacaggggctgaagggtgtagcacgagccctaaaagagatgcagctggaggccgccccgcacaaggcgctggggtggaccggggaggcgccttacccagtggaaagactcccggatcaagggagaaagttacgcaggcttccgatcctgatccgccatcagccgccgaacctcttccgccactaccgcctacccccaaagaccggctacacctcccctcccagccgacagtaggccttgcgtcacttccgcccacggggcggtctcttccgcctcctgcctggttcgccgctcccctccgcgacgacacgcccccagcccactccgccgcgggacgcctcatcccgcgggtaggctggctctctccttacttcgtccttgctattttcgttcaacttaatcgcagcaaaacaatgcgtctggatttacattctgattttatgttattattttgacatacgaaagggggaaacacacaggaggtttaagtaactcaccagcgatgtggaaagggcagctcagaggtccatggacagtaccgtatccctgtctgcgtctcagtcggcctaaactagcccactcattttatagataaggaaatagccagagaagcaagggagtgaccacacggctagggctgcaaacccctgagcaccaagactgtctctgaactcctggcccagtcgtgtgcttttttggctatgaagttttgttcactgaaagctcctaggagcttttcagttctaatgccctctgattctatttgctctcgctccagcagaggcctcttttctagccgcatttctgtgagttacctgcttttgttatccgtatcattttccgtgtgtgaattttctcccgcgttctgttatttctaaaatcacttttgcttgttgtatatgttgccttcctatattggacattcagtttgaatcgtaactccacagaagcaaatgtgtcccattcgaattcatcatagtcttctgttgccgtaaaaccctgacaaaccttgcaatagcaccagaaaggatatgtaaattagatcgcattaaatgttgaagcacattctaaatacagaacattcaaaattatctttcatatactttcatctttacttccagttatttcagaagacattagctttgataacataggttctcaatatttacagactgatttgtttcctgtgtattgacatttttgaacttggtcttgtgctgggtattatacttgatcatagaatttcagaagaaccttaataggccatttagtcccagtctccttattttatggatgaagaaaacggtgtgaataatcaacataagttatcacttgcgttactggtagcaaccttctggtagtagaaataactgtgtcccttaagaaatgtaaacatagcagtgaattttataagcacaatttgtcagagatgtcactctttgtttaaatcacattcctatttatatgtaatacatttttaattaccactaattttcagttaatgaaatcagaaaaacagtatgcttaataaaaaccataattgaaagacttttttttttgccctgagagggacggagtttcgctcttgttgctcaggctgcagtacagtggcgcgatctcggctcactgcaacctccgcctcccgggttcaagcaattctcctgcctcagcctcccaagtagctgggattacaggagccagccaccacgcctggctaatttttgtatttttagtagagaggaggtttcgccgtgttggtcaggctggtctcaaaggacattttcacaggtatttttactttgttatttttaattatttcttgaatttttagaccttattttccccaggaaggtatttgttctggaattttagcttgcttcattcattttaataatgatcctttaatttttagaccaagtttttcccaccaagataaatagataccctcttagtatttaattgaatttctgggttttgggggagtagggtttgggttttttgtttgtttgttttttgagacagagtctcgctctgtcacctagggtgtagtgcagtggcatgatctcgggtcactgcaacctccacctcccagattcaagcaattctcctgcctcagcctccccagtggctaggattacaggcgcacaccaccacactgggctaatttttatatctttagtagagacggggtttctccatgttggccaggctggtctccaactcctgacctcaggtgatctgcctgcctcagcctcccaaagtgctgggatt

SEQ ID NO: 587036 - DNA, 4001 bp, Homo sapiens
aacagaacgaaagagaaaggctgtcctaagctccttccctaaacccgaaaagcactttgaggacgatcgacccacttttagtttctattcaaatgatctctttaaatcctttaggaattgagcaccaaacttgtaactattaattgttcgtgcacagctcgtagaaattttaacattagcagaatgcagacagctgaaaaatcaagatttattttcccatctaaagcctaacataatagcaattcataaccactgtgtgaaaccggaaatctaacactgtgtatgtctaaagtcaaatgccagtgttttctaacaaaacttttaccaataaggtgtgtacacacacccacacagacgcacgctaagctcaattttttactaataaggtgtacgcgcgcgcgcgcacgctaaactctagccacagattccctaagccaggagtgcaagtcggtcgggactagtccacaccttgcgaacggggcggggtggggaatggattccaggtgaagcaggccatcagccagaaccgccaactccgcccgcggccctcaaaagtaggcggcgcagggagtctccgcccccttcgccaccggcgactcaaaccaaaacagctgggtttctctccgcaaaggcaaaccccagcgtccttctcggacgcgacctacgtgttttctcagcttactgcgccggtaaaacccacactgccctcaaaacagtcaccccagagtttagccttggacaccagaagcttttccttcgggggtcgccagcgtcactcgtccccagccaaagggcccccgtcccacacgcctcccccaaatcgcgaaggcctgtcccacgggcctcccaccgcgtggggcggccacccgttgccattccaaaactccacagctgatccgagtcgcccacacccccgtcacaatcgcagtctggaaaggaaggtttgtcttcgggaaggaaagcctcgtcaccacagagacctctcccgagaccggccaggcccctacagtacaggggctgaagggtgtagcacgagccctaaaagagatgcagctggaggccgccccgcacaaggcgctggggtggaccggggaggcgccttacccagtggaaagactcccggatcaagggagaaagttacgcaggcttccgatcctgatccgccatcagccgccgaacctcttccgccactaccgcctacccccaaagaccggctacacctcccctcccagccgacagtaggccttgcgtcacttccgcccacggggcggtctcttccgcctcctgcctggttcgccgctcccctccgcgacgacacgcccccagcccactccgccgcgggacgcctcatcccgcgggtaggctggctctctccttacttcgtccttgctattttcgttcaacttaatcgcagcaaaacaatgcgtctggatttacattctgattttatgttattattttgacatacgaaagggggaaacacacaggaggtttaagtaactcaccagcgatgtggaaagggcagctcagaggtccatggacagtaccgtatccctgtctgcgtctcagtcggcctaaactagcccactcattttatagataaggaaatagccagagaagcaagggagtgaccacacggctagggctgcaaacccctgagcaccaagactgtctctgaactcctggcccagtcgtgtgcttttttggctatgaagttttgttcactgaaagctcctaggagcttttcagttctaatgccctctgattctatttgctctcgctccagcagaggcctcttttctagccgcatttctgtgagttacctgcttttgttatccgtatcattttccgtgtgtgaattttctcccgcgttctgttatttctaaaatcacttttgcttgttgtatatgttgccttcctatattggacattcagtttgaatcgtaactccacagaagcaaatgtgtcccattcgaattcatcatagtcttctgttgccgtaaaaccctgacaaaccttgcaatagcaccagaaaggatatgtaaattagatcgcattaaatgttgaagcacattctaaatacagaacattcaaaattatctttcatatactttcatctttacttccagttatttcagaagacattagctttgataacataggttctcaatatttacagactgatttgtttcctgtgtattgacatttttgaacttggtcttgtgctgggtattatacttgatcatagaatttcagaagaaccttaataggccatttagtcccagtctccttattttatggatgaagaaaacggtgtgaataatcaacataagttatcacttgcgttactggtagcaaccttctggtagtagaaataactgtgtcccttaagaaatgtaaacatagcagtgaattttataagcacaatttgtcagagatgtcactctttgtttaaatcacattcctatttatatgtaatacatttttaattaccactaattttcagttaatgaaatcagaaaaacagtatgcttaataaaaaccataattgaaagacttttttttttgccctgagagggacggagtttcgctcttgttgctcaggctgcagtacagtggcgcgatctcggctcactgcaacctccgcctcccgggttcaagcaattctcctgcctcagcctcccaagtagctgggattacaggagccagccaccacgcctggctaatttttgtatttttagtagagaggaggtttcgccgtgttggtcaggctggtctcaaaggacattttcacaggtatttttactttgttatttttaattatttcttgaatttttagaccttattttccccaggaaggtatttgttctggaattttagcttgcttcattcattttaataatgatcctttaatttttagaccaagtttttcccaccaagataaatagataccctcttagtatttaattgaatttctgggttttgggggagtagggtttgggttttttgtttgtttgttttttgagacagagtctcgctctgtcacctagggtgtagtgcagtggcatgatctcgggtcactgcaacctccacctcccagattcaagcaattctcctgcctcagcctccccagtggctaggattacaggcgcacaccaccacactgggctaatttttatatctttagtagagacggggtttctccatgttggccaggctggtctccaactcctgacctcaggtgatctgcctgcctcagcctcccaaagtgctgggattacaagcatgagagaccgcacccggctttaattgaatttcttaaagttagcctcttatttgtatggcagtggactatggctagaagagatatggattcacttcctttaagtgaaatctttctgccagatggatttcagaattcagaatttttcagactttagagaggtgtgctttatgtgacattcctcactatctggggcagcacccacagtcaacttttttttccggaacaattatgaatatcacactaagataaatgaaatgtatagtctcactcaagtcaagtttttcaggtcaggttctgccactttgcccttgggttcaggtcaagttttaatgacaaatgagtcaggtcaaacaggttttgccaccaaatgttgagaaaacatttgattttcagagctttttctttttttttttttttttgagacggggtctctgccctcttccctgtcacccaggctggagagcagtggcaagatttcggctcactgcaacctctgcctcccaggttcgagtgattctccttctgggattacaggcatgagccaccgcacctggccaattttcagagctttttagatttcgaagtggtgaatattgagagaattattggaaagtaaatcagtgagtaacccatgatttttctggagcaactacagtgtcaagtagtttctaggcagttgtcctgtgtttgattgggaaaatatgctgactatatt

SEQ ID NO: 587037 - DNA, 4001 bp, Homo sapiens
gaaaaaagctcctgggccctgcaaacaaacacagccacaatctgtcctctgcttccttctctccaggcatgtctaacaagcccccctcctcacacttaagtcataccaaatgctgtttggggactccttgccttctcgggtattgccattggcaggaatgtcttttttccttggccttctggcaaactcttcttctagaaccatcctttgagaccccacactacctcatgtgccccctattctcagtaatgatttccctaacaaccacctcccccataaaagaacaggactcggccaggcagggtggctcacgcctgtaatcccagcactttgggaggccgaggcaggtggatcacaagaggttaggagattgagaccatcctggctaacacagtgaaaccccgtctctactcaaaaaatacaaaaaattagccgggtgtggtgtcggacgcctgtagtcccagctactcaggaggctgaggcaggagaatggcgtgaacccagaggcggagcttgcagtgagccgagatcccgccactagactccagattgggcgacagagcaaaactccgtccccctgcaaaaaaaaaaaaaaaaaaaatgcagggctggccgggcacagtggttcacgcctgtaatctcagcacttttggaggccaggacgagtggatcacctgagatcaggcgttcgagaccagcctgaccaacgtggcgaaaccccgtctactaaatatacaaaaattagccaggcgtggtggtgtgtgcctgtagtcccagctactcgggaggcagaggcagaagaatcgcttgaacctggcaggcggaagttgcaacgagccaagattgtgccactgcactccagcctgggcaagaagagcgaaactctgtctgaaaaataaataaaaagagcagggctgcccactgactctctggtgtttcccatttctagtactaacctcttctatgaaacttttcagagacaggctcttgccgtcacccaggctgaagtacagtggcgcgatctatcacaactcactgcagccttgaattcctggactcacgacaccctcctgcctcggcctcccatggagctgggactacaggggcgtgcacaaccacacccagctaattttgcgtagagatggggtcttgctatgttgctcaggctggtcccaaactcctgggctcaagcgatctccctgcctcggcctcccaaagtgctgggaatacaggcgtgagccacttcgcctggcctcagtgaaacttatttcaccgtgtttttcacttacatatttaggtgttcataatacagatgtacttctcctttactggactccttacagaaaaagaccccaaagcctatcacagggtcatagatgcccagtaaatgctgctgcacatcacagaattggtgctttttccgagatcgcggccacggagcaggctgaagagtttacggtgctctcctggccaccccggggacggcctggcctcggccacagagaaagccgcagtaaggggcccaggttggagccagtcccgccccaggaggtgcgcctaacccggcaaggcgggtccccgtctctggaagcgaagctcacgttaccagaggagaaactgaggcccatggagtcgccgggccccaccagccgcgggcccaaaccgcaggtcggaccacgaggaggccgggagccgggacaccgcgggccgcccccacccgacccggccccacttacaggcgggccggccgctcctctcctcccccgcgcgcagccacccccgcgctaccgccgccgtcgccatcagggccagcagcccaagcaacaccgacagccccatgagctccgacatctgcgagagctccatgttggtggaaccactgccacctcagctagtgagtacgcgggcgcccgcacggctctgccgggccgcgcacgcacgcgggggcgcggcctggccgttggggagcctcaagcggctgggcctggccgttagagcgcctgggggcggagcctggttgttacaacgccttcagggcggggcctggccgttaaagcacctcaaggggtggggcccggctgttgtggcgctcgaggggcggggcctggagttagagcatctccacccgccgagcctagttattagagcgcctcgagaggcagagtctggagttagcgcgtctcgaggggcggggctgggttgttagagcgtctcgaggggcagaacccggaggtagagtgtctcgaggggcggggcctggaagtagaacatctcgaggggcagggctcgacccttggtgcgtttcgaggggcgggtcgcctggcggttgagattgcagggctgcggagggcggaggaaggcgggatttgcgatcactgctcacgcctcctcctgaagaactcactgataattgtttattaaaggcattattccagccatcaccacactggatcctttcaaggaagcggggcggggattattattaccatttaacggataggaaactcagcatcagcgaaagttcagatgggcttttaaggaagagtaggccaggcgcgtggagtggaacagcctccgcaaagacctgagaagctgggatgtgggaaatggctagaggggcggaaaggtctgggggacgttgagcgctggctccatccaacaagctgctcattacagggagaggtggggcaaaagctgtgtctgaggattccctggatggacctttgtgtgaaaagaccaaaatcagaaaaccggcagtggcttcaaggatccgagagggaggtgacgagggcctggatttggggctggcctggcaagtcgaaagttaaaagggagaatttttaatagaaaacttattttatttatttatttatgtatttacttttgagacggttgcccaggttggagtgcagtgacgcgtctcggctcactgcaacctccgtctcccgggtgcaagagattctcctgcctcagcctccagagtagctgggattacaggcgcgtgccaccatgccctgctactttttgtgttttttatagagacgggggttttgccatgttggccaggctggtctcgaactcctgacctcaggtgatccacctgcttcggcctcccaaagtgctgggattacaggcgtgagccaccatgccgagctgggagattatttttattttttattttttgagatggagtctcgttgcactgtcgcccaggctggagtgcaatggcgccatctctgctcactgcaacctctgcctcccgggttcaagcgattcgcttgcctcagcctcccgagtagctgggattacgggtgcccgctagcatgccccgctaattttttgtattttttagtagagacggggtttcgctatattggtcaggctggtcttgaactcctgacctcgtgatccgcccgcctcagcctctcaaagtgctgggattacaggtgtgagccaccgcgactggcccagaccaggaaattttttcatagaaaacttatttttttttttgagacagagtcttgctctattgcccaggttggagcgcagtggcgcgatctcggctcactgcaacctccgcctcctgggtttatgccattctcctgcctcagcctcccgagtagctgggattacaggcgcccgccaccacgcccggctaattttttaaaaatatttttagtagagacgggatttcaccgtgttagccaggatggtctcgatctcctgacctcatgatctgcccgcctcggcctcccaaagtgcttgggggattacaggcttgagccaccgcgcccggccagaaaacttcttttaaggccgggtgcggtggcccatgcctgtaatcccagcactttgggaggccgaggcgggaggatcacctgaggtcaggacttcgagaccagcctggccaacatggtgaaaccccgtctctggccaacatggcgaaaccccgtctctaccaaaagtacaaaaattagctgggcgtggtgtcccacgcctct

SEQ ID NO: 587038 - DNA, 4001 bp, Homo sapiens
gggtggatcacttgaggtcaggagtttgagaccagcctggccaacatggtgaaaccccatctttactaaaaatataaaaattagctgggcatcatggtgcacgcctgtaatcccagctacttgggaggctaaggcacaagaattgcttgaacctgagaggcggagattgcagtgagctgagattgcaccactggactccagcctgggtgagagactccatctcaaaaaaaaaaaaaaaaaaaaattcacattcccaaagcctctgtggatatattttaacactgtagacataggtgtgagcctctcgaaaccaaggtagattacatcactagcctactaaaacccccccaccaaatttctaacagcaaaaattctgaaccaataataagaagcacttcataacatggcccagaatgattttctcagtcttagctttttctgcctcccagcaacacaaggccccattttaaacaggccttgcacttccacttcaccttacagggcttgttatctgggtctcctcctccccctataagaccctttaaaatacatctcatccttccaaggccaaactcaatgttgccatctccagcaatgtgttacatatagccttgatgttgcttttaacaattctatcggccaggcgcagtggctcacgcctgtaatcccagtactttgggaggctgaggcgggcagatcacgaggtcaggagatcgagaccatcctggctaacacggtgaaacaccgtctctactaaaaatacaaaaaaattagccgggcgtggtggcgggcacctgtagtcccagctactagggagggtgaggcagagcttgaagtgagccgagatcgcgccactgcactccagcctgggtggcagagcgagactctgtcacaaaaaaaaaaaaaaagaaaaaaaattctatcagctagtctagctccctacggtgattacatgatccagggaagacatgcgacaagggcaagataaaacgttcacctaggcctcatttctgccaaagcagaatgtacgtttgatctttctccacttcctggaacttggtatatggccagcacattttctttttatatgaggggattaaagcagctgtaaaaagcttagtctaactccacttaaagaaaaaaaaaaagagagagagatcagagagtcggagtatttgcccaaacgcaacatctaccacttcctgagcctaagcacagtgtagaaatctttccgacttatttttttgagacggagtctcgctctgtcgcccagactggagtgcaatgctgcgatctcgagtcactgcaacctcagcctcccggattcaagcgattctcctgcctcagcctcccaaatagctgggactacaggcccgcgccaccacacctggctaatttttgtatttttagtagagacagggtttcaccatgacctcaagtgatccacccgtctcggcctcccaaagtgctgggattaccggagtgagccaccgcgcccggccgcctttccaattttttaagagccctaagagcagtttagccgagtaaacggaagcccaggagccagacttgagtttaggcaaacagcaatccaaaactttagttctaaaatgcagagagaaaacaacttgcactaagtcacgaaaactggctcgctggggtcatggacggtcaacaggggcggcgtcttccaggcctggccgcgcgggctagagaggaagcgtgcgcactggcaagccagcacggaacgagcagacggccaggcccacggcatcccaccgcgtcccagcctgctccccagttccaccgcatcccaggaccttcccagccacgcctgtgttgtgcactcgaaacccacgatcagccgccccttctccccgtgccacaagacctacgcagcgagcaccaccgctgacctccatccgccgccctaactgtccccggaaccatgaggtgcgcggcgcgcttccctacgtcactcggagcgccggcggaaacgagacgagcctcgccccgcacgtccggaagccacgcctccagcttccggccacacctttcggcgggtgacatctttgctgagggctcaagcggagcgataggtcatgggaaacttagaaaagataaagaacctaggaagaaaggcttcggttgccccccgaccagtacgccatcctcatacggagtgcgggagacgaccctttgttgtcggtgctgtcaccctatccctccctgcttgcgtaggcgtaggagagttcctagggcggtggaagactgggctggtggagtgggataggcgacgttgaggcctgtgggggctgggaggacgagtgagtggagactggggaactccagagcgcccacttgcagctggatttttatgtgcaattttcctgatttttaaatagtggtgtttaattacaaagtaaagtgcaggatagcccaaacgaaatgtatctgaggtctatatatggacttgattaatttttacttcctgcacagccttttattttctgtggagttaataattacttggctacgcacggtggctcacgcctgtaatcccaggcctcggtgggcggatcacttgagttcaggagttcgagaccagcttggccaacatggcgaaaccccgtctctactaaaaatacaaaaaaattagccgggcgtggtagggcgcacctgtagtcccagctactagggaggctgaggcatgagaatcgcttgaatccgggaggtggaggttgcagtgagcagcgatcttgccactgcactcagcctggttgacagagcaagactctgtcgcaaaaaacaaaacaaaaaacataaaaataaataattacgtttgtttgtgtttgtaaactaaaaataaaattgtaagccccccaagcactgaacggacctcctcttagccaaggagaccccagagaaaccttaaaaactgagttcccagccattctggaaagggaggttgaacaccccttgttaaagtagagatcataagactaacagactttgtggtagtaagataccaaattataaacaagacctaaggccgtgcaaggcaagggttaagtcaagcttgcagaccatcaatcttgctgaagaggtcttttttgacccagtgtattgtggctgattctggcatactatcttaaacattcttttctgctgactccaaattttacacagagcctcactcttttaaccagttgcaaattaaaaaatctcttggtcaagctggctgaggtgggaggatcacttgaggccaagagttcaagactagcctgggcaacatagggagaccctatctacccctaccaagagatctatctatctatctatcaatcaatcatatatcgtgtatatatctatgtatttgagtccacatataacttgtaaaccccccacatcaagacatcctgtcttttggagccaaaccagtgtataccttccacacattgatttatgtctttgcctgtaacccctggctccctgaaatgtataaaaccaaactataatctgactgcctcgggaacacttaaggctttttgggtttgtattttcctggggctgtggtcactcattggccctgaataaacctctttaagtaatttacagagtttgatttttctgttaacagttaattaagattccatgtatttatcacaaattctactccaaatccttcacaagttgtctgtcaaaagacaatattacaacagatttatagatctgttaaaagaaaagctttagacaaactaatggagttttgttgaggaaagaaccttgaaaacatgctaagggaaagaagttagacacatgaggccacatattgtatagttccatttatatttgcaatgtccagagtaggtgaattgatagagtcacctatgtgatgttgaggtggggagaatagggagtgacttctgatgggtttgaggtttctttttgagatggtaaaagtgtcctggaattggataatagggatggttgcacaacac

SEQ ID NO: 587039 - DNA, 4001 bp, Homo sapiens
ggggctggcatgtttcccaatttgctgtctacacttctgtcgggaatcctcttttcctgctatgtaacaagctgagatgtttacaaagaattcaggggcccctaaacagcaatgtataatgttgagaagtcgcacaatataactttgaaattgttagttatatttttctaaacaattggattttgtttgattgattgtctccattctttggcaggtttagatttagatgggaggtgggtgggaagaaccaggggaagggggtgaaaacttagaggacagatttttttttttttttgacattctgttttctacagatctactagtttctttttccttggtttcaagtagctacaggaattttacttctctcatctttaagcccaaacaccttatttttgatctctaacacttcctttttttcatgttatcattattttggatgtgatatgttaagtgtgggaaggacagagagaagaaaggaaaaattggggagggttaaaaaagaaaaattaacttaagtttgctatctgattttcacattgtagtgataccagacgatcaggctgtgtaacaattatttcctggggatccacgaggcaatgatgagaacacttctttttccctcagttgtaaagagattcttaaatatttatcttggggtggttcttttccatgtaattcactagtgttaagaagaacataatccctgttctccctttactcctagcctagtgtcttctataaatggtaaaggttgttaaacaaacaacataactaaaagtagaggaatttgagaaatggttactggttagtgtttttgccaacctcaactgaaaatgacgacagttataaaatgatgtcttggtgataagtctagagcttcagtgaataaaatggttcgtgtagggagaactggcttattctgctttacagtggtttcaaagagcttgctctgttttgtctattcaagtcagaggaaaaccaaaattaaactggtttcttatgaagtcctttagcgtctccgtttcaaacgcacaagcaggtgttacatgcacagtaaatcctgttgagccttaaaaggggttttattattatttttccatgaatgtttttaacccaacaaacatacacacacaccatatgtctgatctgatatatggattctagacaacttaggagaccgacgggcccagatataagatgcacattcacagcattcaacagactgaagcctccaaagaaaacttggacccaaaagaaaaagatctcccacccgcgatgtatggctcatggcttgagcatcagacgttgctgcgagccgcctgcagccaggggcacagacggatgcgcagcatccccagtcctcggcggacagccgggtagcccaacttacccaggggtttgattgtgttctccgtcgcctccttctccttagagccgccgctcgacatgagcgcggcaatggagaaggcgttggcccgagaggagagttggggcttgggggacgccgtgaactccatggtccccagcacgcggtcctggccagggacggggtcgtccgaactgccgtccagattccccaagggagacaaagacccgaaacacagctcaaagtttccgagagcagtcacagcggggccagggactccagaagtgtcagctccaacgactccagagctgcacactggcctctattccccaccgcaaagccccagagccgcagagacttcgaaggcagccggagaggagagggcccaccgagcactacggcgggtgcgcacgccccggggcgctcggcaggacgacagtctgcacagcccgaaggcggaaacgagcatcaactgcacaaagtcctggggtcctggagcatcccctccgcgtccttcctccctctggggctggggacagccgggatgtcccaggctgaggtggccaccagccgagcgcggctgctaggacgctggcgtggggagcgcggcgcggaactacggacagtgagccctggcgctcgctgccctgcgccttaatttgctggcggcggcgatcccggaggcccgcagccagtcagcgccgtctcacgtcaccgcttcctgattccgccgccgggggcggggccgcgggccgggcgcggagggcgcgcccagggtgcggcgcccgcgtggcctgtcgccccggctgttcggtaccccagcacaggttcagggaaaagggtgccaccactaggctgacgcagcagccatggacatccccacctggtctcacagccccgggcgggagggcggtgcgcgctgtcgggagaggacacatcaccgcggcctaacgcccgagatccgggcatggcccagttggggaagctatgaccagaccagtggaagcctcgggagttctcgctttttccattctttttcttacctgcgctcaaagttccaaaagaaagtagggaagcgctcagtagaatccggcgcctctgagccggcgccaactggccaggtccatactcggggcagatcccagggctgggactctcattcgatggtcccaaatttgatctctttgacagtggggctgagcaaatgcagccctgaaaaagataagcttagcgagagctgcgggcatttggcaaaggatgctgctctcagaaccgtggcttctgctcctcaccagtgcgtctctagcctggggctcctattttccctagagggaccctggaaaatgggacggctgccgaagagaaggcgaaggtcagggcgcggagctctacggtaaccacgcgacgcgtagtgggagagtgcgaaccttatggtagcgcccggactaagcggacacagacccctctggttttacaaaggcggctgtgacgaggacttcccacggccttgttggagggcgtcctgttagccctgctcagcctgaataactcaaattctccgaattcgcagggtaatccgcttcgcttggagccgtgtaaactcaggctgacatacacactcaagctgtatatgtaaatatttgttctcttttccagccagtcggtctggctattagaagcctcttcgtgggtcttaaaattaaaataataataataatttttaaaactccaacttttcactgcaccaccccctactcctgaaataaatttgtgagggaaaacggcaagttaaaatagctgtcgaaaacgtttgtgtgaacaaaatgatgacatctggaagagtcgtgatttcagcctgtcttggtcatcgtgtgtcaatagtttttaacaaggtgctggatgaaggtgactaaaaaatgcattctcatatcactatcgaagttcgaagtgtcgatttataaatgtttgaggaaattcgtaaaaccatagactttggtgctggaaggaatttacgctgtcttctagccggtctccatgtgcgtttgagagagaaaaacagggcccgacgtggcagagcgcgcatctccccccagtccacctcagcggctagaagcagacggaagggcaggactcacactccgggccccgaccctcatcagcccctggccctgcagctgtggctgggctgttagctgaagagccagagtagagttaacgacggctggcaagcagagggctttcagattaaaccgcaggatgcatctgaggatccgtttctattcttaaattttttgctggttttggacaacccagacccaatccagaccccttttttggttattaaagtcccccgccccaacctgtctctccccagacacaccttctcaatgtaagtgacatttctttgtattgagtggaaggcacacactgattcctttcctatatcaaatgcttaggatttgtccagaaagaaagatttccctcaagaagtggggattttggaaggtcggggaatgttatggttagtctagaccttgatatatgcttcaacagggtgtggcaaaccttgttagctgaatttagttttcaaaaacttgccgcaaaattatacttcataaaaaaacccttttga

SEQ ID NO: 587040 - DNA, 4001 bp, Homo sapiens
ctgaccttgtaccagggcctcctccagactgggcacacattaacaggttaataaatatttttgcaataacaaatagaagtcagctctcacttcctgtttaccacttctgcttggtacatttatcttaatctctgcatctttgaaccaggttattaatatggcccaagaatagacagcaaacacatagctgccctgctgaatggtgtggtgttcctacatggcaggcactgagctggaggctcagacacaacaaagactgaaacaaaagtgtaaaaaagtgtccgctttgagaaccacagtcagagcatagctattgatgagattaatatgaataagcacattagtaagaaattaaaaataaacctaaaccactaaagacttattttcttttaggttacatagatgatagatggttaattatagtggctgacatcgactaagcactttctgcatgtcagacactgtgcttcgggcttcccggagcataaaaacacattgagatggattattgggggctgggggtagggaaggagctaccatttgctcttggttttacatgtggccagtttcaatccaaggtaagctacaatgagataaaaaagttcaaaaaaaaaattaaaccagttaaaaagaaaaacagcactgggactgaggctgggtttcagagccaatttccaagaagtaatttcatcatcatagaacatcaaacgtgaattccactctcagctatgcaaattccaaaagaataatacctcacatttgcataatgcttgatgcttttcaaagtgctttcccagttattaatctagagaaggctttattactactgaaaacataaattaaaattctgttcggactccagtcctccattattttttccactcactttgccctcaaaagccagagccatctaaatccaggtgcttttgattgaatgggtaactctaataagtttaactgacagggcgaatatgcataaatgtagcatattatgaggccttcgacctacagacaccagagtcagccttaggaaaatttgctgttgaattaacaaaaccacaggggagcaactcggagttcaagtttgagatcctttcagggtctcaaattttgtaggagctgcacacactatgttcatcagaatccatctccctctatcaactatgagaaattagatctaccactttgtccttaaccctacagaaatccccctcaatgacttcctgcaaagaggcccacatttgccaaacagctcctacgtcttgttttgttttgaatgtaatatgaaccaagaggctgaattcactgtaaatccaacaaggacagaggattttagaaaaatgaggtgaggagatatgacggggttcaaggaaatgcttctacccaaacctaatgcctttccaatttgtttctttttccatctctttcaaacttaattatgtgtagcgttctcagtcactgaatcaccagcctttcctgacacttcaatctcatgcattttagcaaaagattaacctggctgtttgcttttaattctgaagctgtgttaatactcactcccgctagattagaaaagaagaaaaacacactcccacataccccgccatggcaccagcaaggctccagggtgagacggctgacgctgtcacagtccctagggctggctgcacttaccatttcaggagggccaagagagccactgacagggccaccgtcaccatggggccattcacttccaattttagaaaccccaaggcttccatcattcctctgagaccccagagtggtggtcttccagatgagacaggaggctgatctcgccgcccttatgggaaccgtgctctgcaggtagaaaagggaacaggcaaccaagcaaacatcacatggagtgggcccccacaatgtgctctttctcagagtgtctccctataaagaggaaggaagaggagggcacaacaaagggtttcagtgtaaaggaatgaatcagcaactttattccttgatgactgcactgtcaataaacatttatattaacttcctcagagaagaaaagcaaacttccccatgtttgctgagaaacaaaatggttgtaaccacggacttgtactctgagaggaagtcttcaaagagagactcttctccaaaatgtctatctatatctatctctatgtctatatctatatctatatctacatccatctataattttttaaattcacaattaagtgaagatacatgtcaagagattctgaatatcccagaaaaatacaggaccagacgccagcctgatcaaaatgctggctgctttgaggacaaccatcccaccaagtccattagttgctgggtctgaggacctgtctgagtgtctggctgttggagcaaagcaaagatcccgattggggtcagtgttctcatggtgagttggagggcttctcaagtgtttgaaggcagatccgtaggctcatatatgggtcctttgttctagctttgagcttatctgactaaagtggacagagagatggaggggatcatagtggctgggtggcaggactagattgcagcttcagacagagcagcatctggaggcttccatggtgaattttagctccagatcaactgcaagaaaaaaccagcaatcccaaaaggacccacagactctctgaaggaaccagactgctcctgcaggacccagaagacactccaaatactgtgagtgccccatttgcggaagtgggaaagggagaccctcctctcccaacacaatcccccaatattgaatgggagaaatattcaatgaaatagcttaaagaaaaaataattgaaaattcaggaaactttggacacacttttagaaatgtgaaatgctctggaaagtctcagcaatagaattgaacaagtagaagaaagaaaatcagagctcaaagacaaggtcttcaaattaacccaattcaacaaagacaaagaaaaaagaataagaaaatatgaacaaagcctccaagaagtctgggattatgttaaatgaccaaacctaagaataattggtgttcctgaggaagaagagaattctaaaagcttggaaaacatatttgggggaagaatcaaggaaaacttctgcagccatctagagacctagacatccaaatacaagaagtacaaagaacacatgggaaattcattgtaaaaagatctttgcctcagcacattgtcatcaggttatccagagttgagacaaaggaaagaatcttaagagctgtgagacagaagaaccaggtaacctgtaaaggaaaaccaatcagatgaacagcagatttctcagcagaaaacctacaagctggaagggattggggccctgtcttccggctcctcaacaaaccaattatcagccaagaattttgtatccagtgaaactaagcaccatatatgaaggaaagatacagtcattttcagacaaacaaatcctgagagaattcgtcattaccaagccaccactacaagaactggtaaaaggagttctaaatcttgaaacaaatcctggaaacacatcaaaacagaacctctttaaagcataaatcacacaggacctataaaacaaaaatacaagttaaaaaacaaaagcaaaaaacaaacaaagaagtacacaggcaacaaagagcccgatgaatgcaatggtacctcacatttcaatattaacactgaatgtaaatggcctaaatgctgcacttaaaagatacagaactgcagaatggataagaactcaccaactaactatctgctgccttcaggagactcacctgacacataaggactcatgtaaacttaaagtaaaggggtggaaaaagacacttcatgcaaatggacaccaaaagccagcaggggtagctatgggcttccttttctgtgcccccacaggtcttaggatggtcacaggtacatttgttacagaaggctgtggtcacaggtgcagattccctggaaaggagtgagagaaaagacagggaggg

SEQ ID NO: 587041 - DNA, 4001 bp, Homo sapiens
gaaaggggcagagagacatgcatgtagggtatgtattaacagggagttacatacctgtgtggtgaaggctatgatagagatttacagatgcaaaaggagaacattactattgttctccttctcataatcaaaatacagacactgaggctcagagaggttaagcattttgaccaagatcacatagttaagtggaagagctaggatttgaacctaggtctgacttactcccacgctatctcgggctgttttgtggaggaggtgagccaggcacaggtagaatctgcttaaagagagaagatggagaaggtacccctctgggaaagtgggtgggaaagtgaccgcttgggcaaaggcacagtgacagagatgggtgaagctggcactgggctacaagtaaaccagtttggctagagaagcagtgacttgctgaactcatgtccttagaaagctaagtcaggactcgcctgccttgatgaaaagccaaggcactcagccccacctgcagaggttgagtccttagaggatgttagccaggagcgtggcatggccagaaccacgtattatgaagatggcaatatttaggatgacctgggccaagactaaagttaaagattgcagggaggatagaagggaaggagataaatgaccggtgtggagcaaaaaacactagagtgggagccacgagacctattcctaagcttcaatactgtgtgacattgggcaacagattttacttctctggactccatttcttcaactctaaaagggcagggctggcccagatgacctctgaggtccttttagcaacagtagtctaggattctgcaaacgtgaatggcattaggttaagagaagggataggaagtgtagcattgattatgggggcaaggaagaccgcagagtacaagatcacacagaggaaggtgtcgtgatgtaccactaaaaaagtgtgaaagagcttgccttttttgggaaggactgaaggatgggaacggaggatggagaccggaaaggataagaagtagtgagaaaatcacgaggttgtttttaagaaagttatacagtgttagagatcattattttacacagatagcttttcaacttttttaaacccacgattcacagacggaaataaaattgacatcatggtccagtacacttgtccagtacctataatcgaaacaaaaggtttatgaaacaatagttgcccttactaagggcaatggactctaatattttctattggattccatttcgttctttttgaaagctggttgccttccgctgcatttattttatgatctattactgtgtcacgacccacagttttaaaaacagtgcctaagaggagactcaacaagtcttcctaagttggaggggatggcagggcatcctatccaagcatccgggaggcagctggagaagcaaacctggagaggctcccggctggggagagtctggagagtgtttagcggaagccctgataggagagagcgctgagaaaagcgaggacccagagagttgtgagctcccattcaagtgatggagtggcggccctcgggacagtgtagacgcgaggaggagaagatcagggtggcgtggaagccagactccggcaggaacccagcgaccaccccgggggctgcatttccgcggcgtgcacggcagggcttcggtgcctctgacctcgtgtggctttccgaagctcctccactcacccgccctcctccggagcacggcgcgcgcccactccttcattcattcattccactcctacctccgcgagcgccaaccggctgtgagatgggcgagccactttgccagcgtggggctctctttcgggtcggttccctccccgccagcacacgcgcgaaccctcgcacctgggcacacacgcgcgcgcgtgcacacacacacacaaagttctgggggcccctctgcagaccggctcggctgcgctgggctcggagccgtgcgcccgccgggtccaggccggccctctcacccactacccggggcccgccctgcgcccagtccccccgcgctgcgcggcagcccctcccagcgcggtcccctcgggccgccggcgcggctctgcccttcggttcggccttccccgcctcgcatccgtgccatcggcgctcgattgcgcgcggactccctgtggctctcccggccccgcgccccgcccccgcccccgcccgccgcccccctccgccagcaacttttgcggagcccccgcgcccagccatgctgagctgagccccgccggccctggccgcgcgctgcccccggctcccgcccctccgcggatccgctcgggggccgcggccgctcggcgcctcggcctcggccgctccgcccgcccggccgccccgagccccgagccccgagccccccgcgccgggcccgggcggcagcggcggcggcggcggcggcggcgcgcccggccccctcccccggcgccggccacgggaggcggtgatgcgggcgcgggcggcctcggctgcgccgagagcggagacacaggctcaagatggcagattccgactgaggctgggggggccgagctcgcgcgccgctttcccgtccccgttgccatgaaccgcggacaccccggccccgatggcccccgtgtacgaaggtaaggggcgcccggccccgccgaccccgcgcccgccgccctccgcggcccccgcagctttgttctgcccgcggccccgcgcccgcagcccccggcgcctgccccagcccccacccggggcccgagggggccgcgaccccctccctcgcccggaagatgaccgggacccggcgccggcagggtcttgcttccagggcggggagaggggccgggggcgcaggaggggagggggcgtgtgcgagggtgggcggctgcccggggagggcagggacgccggggaaggcggaccggtgactgtgctttttatttatttgcgataaatgaaggtgatgcggcttagcttccaccgcccccccacattacctttcggagcacctcctttccacttcgctctccgccccgcgccccttcccatttctttccgcgcccaccccacgctcctttattctccgcgagcctccgattttgggggggctgtggaatcggaatgcacggggctaggtggggagagaggagagagatgaaaagtccatgtcagagccaggcagaacaatgaaataggcgaaaatctcccctcattagcgtgtggaaggggacgtggactttgggttttccagccgggggagcggcggagacgtttttctggctcggtctgggtcgatctgtgttgtgcaccttcacctggcatcggggtatttttccccatttgactgcctttagcaagaaagaaaagaacgcaaggcagaaaagcagtaggtctgcctcgcacactgtctttcgtttctcttcagtccgttctgtcagcttccagccagaaagcaacccagaatcaactaagtttttacacttcgatgtgtttttgtgtgcttgtagtaggagaaattttaaacccaagtgtgtctgatttttcagtcgtttcatcgtgtaaatgtttgtctcatgaaatcattgaaatcgcagccttcacatacttttagcgtgggtcccccggctttctttcggttttgttcagatattctgtggatgaaatcgcaaatgagaggggacagggtttgtgtggcacagaggagggcacgaggggggaatgtaatcctcctgtaaatccggagaacagttgtggccagtgagacagggaaggcattaatagttttatctctgttataagaggctgattaaaaaaaaaaaaacttaaaagaaaatctgttattagtttcagggctccaaatgaattaggtttctggccggaataaagttaccagtcaggccctggataacgaggctgtaaataacctatagactgtaaatatttttttttcagactctcttagaaacaaaggggctgtttagaaggcaacag

SEQ ID NO: 587042 - DNA, 4001 bp, Homo sapiens
ctcaataaaatgctaggggaagacgaaggtttttttttttaattgtcactttctatagtgttaaatataagttagccttcaaagatagctcagaggccaggtgcagtagctcatgcctgtaatcccagccctttccggggctgaggtgggaggatcgcttgagccgaggagttcaaaaccagcctaagcaacacagggagaccccatctctgtaaaaataaaaagttaaaaaaaaaattagccaggtgtggtggcacatgcctgtgatcctagctacttgggaggctgaggcaggaggatcacttgagcccaggagtttgaggctacagtgagctatgattgtgccactgcactccagcctgggcagcagagcgagaccctgtctcaaaaaggaaaacaaacaacaacaacaacaacaacaaaacaaagatagctcagaattcactggataagcaagcagtttagctagactcagtctgcaggttgagctcaatgaaaggagattttgactttccttcaaataaatgactaagcactaatttcctcatagacatcattgaatcttctgggcagttaatgggagaagactctgctacagtgaaagggaggggtggggggttgctgtatttacaaactcccttcagagtagagacccaggcacctgtcgtcacttcctagctacagttgacatccggtaaccatccttggtcagccacactttctttctgcctctgccaagaggctccccctagctcctcatgggccactttctggctgtgagctgatcaggcaacttacacagggtcactgggtcagaggactcttgaaaggggggttggaacatgaagccccatgattcagggatcctgggacttgtttgttttgtagggttagagggatggaggaaaatcttccaaatcagcagcctcgaattcaccaagaatttctacaagatgaatttgagttgaaccttcagtctttccacgaagaaggtctgctcgccaccctcaaagccatctgcctttctgtctcagtttattcacagatcctttcagagaccaaaaaaagcacccaagagaggcggggacagagatgtggtagaggaaaagacacagtacaaagaacgctccgcaagcacttacttcctctgagccttaggagtcctacctaaaaggtttcttgcttgtttttctattacactgtcactcccatccggtatgcaaacagtcggcaatgcctactacagtagctcgctggctgccaggtgcaggggctgttcaaaagcgacatcagggtcctaaaaggtgggaaaaagcagcagaacttgcatggtagttgattctttcctgaagaatagggtccgcccagccccaccgggcaggaggtgtcctgagtcagcctggcgttcagcccagtgctgtgcacttgggtgacaggtggggcccctgcactgccaccagtagcatatgtcggagctctgggccctgaccatctgccaaagctaatcttacgacaagcagatttgctcccatcaatacccagggagagggataggcaggccccttgctgcgtgattctcgaaaacaaccaggatcccgcgatccgcttctcctatggctccagtccaaaggctggaatgggggcgtcacctgcaccaggcaacttcgctagcctgtgggcgttccagggcaggggacgggggcggcaccttccaggtgtgcaggcgagatgacaagtgcggtccctccttcctccctccccgcgagcaaacagcctgggggtggtggggaaggcggcgtgcccagcccttcatcgccccattctttcccacggccctggccgccgctgcagctggggcgccactctgcactcacctgggcccgcgccgggcggggcgaagtcgcggtggtaggtcctcggcgtccgggaggagcggaccggccctcccggggaccgggcaagagggtgggccggaagcggcatcaggccccgtgcccattggccagcctcgccaggacgctgcgacctgggacgtgcgattggctgcggtgcgccgcgtcggtgctggcttcgaggtcgcgcgcccgcccacttccggggtcgcgccaggtcaggagtccagagtcggctgaagcgagttgccgcgttctctctggcggcgcgacaccggcccgtggaccgcccggccgccctccaggacccggtctgcaggagcggagagggcggtgtggacaccgcctgcaggcgaggagaaggggtggcggagagggtacctgggtgcgtggctgtgcggcgtcaggaggagcagggtgtgggcgcccggcctggggcgtggagaggacgcagggaacaggtgtcttcctggtatccatcgaactgaaacgtagcccttgagcacacactacacttaaagctttactctttcgaggaggagtcctggaagcatatgtgattttgtgactatagcatggtgtggtgtcagtaacaggccctggattgctcaaactctattgtcagtgacaaaacccagtgtaagctggcctaatatattaatagtaatatgcgagtcctcccggggtggcgggcactgacgtaagtgctttacttgggtcttctcatttcatcctcccagcaacccaaagagctggcggcgtcattcccattttacaaatgcgaacacgggctcagagatggagcgactcacgttgtaagcgatggaactgggatttgaaaacactgtatcccgcctggcagaaaactggcaaggttaggatggagaaaggagaaaaaagaaagatgtcggccaggtgcggcggttcatacctgtaatcccagcactttgggaggccaaggcgggcggatcacttgaggtcaggggtttgagaccagcctggccaagatggtgaaaccccgtctctagtaaaaatgcaaaattagccaggggtggtggcgcatgcctgtaatctcagctactcgggagactgaggcaggaaaatcgcttgaactggggaggtggaggttgcagtgagctgagatcgtgccactgtgccaccgcactacagcctgggcgacaagagcaaaactccttctcaaaaaagaaaaaaaagggcatctgatggaaggctagatactacccgacattgagctaaaccaatgtcacctggttggacctagggacctattcctgctccccctctagttctgtctcatttctggggttgcacacaggcttttcctgggccttcatgtttggggaagccccacacaggccagctccagtggaagaaaacgcccccagaagcctcttgttcaccccggatggctctgtggagtcctgtgtctgaccctgactttagcttgggcctgagggactggcatttgtggacttggtctggagatgtgggcagagcccccctcaagcataagggctcagccaggcacagggggtggctcctcagaggaagatcagggtgctattagcagaaggacgatgagtgggccgggcgcagtggttcacgcctgtaatcccagccctttgggaggccgaggcgggtggatcatgaggtcaggagatgagaccatcctggctaacatggtgaaacaccgtctctactaaaaacacaaaaaattagccgggcgtggtggcgggcgcctgtagtcccagctactcgggaggctgaggcaggataatgaggtgaacccaggaggcggagcttgcagtgagctgagattgtgccactacactccagcctgggcaacagagcaaaactctgtctcaaaaaaaaaaaaaaaaaaaaaaaaggaggatgagtggtcgctagactgctggagaaacagtctagaggtagggagccctgggttctgtcctgcctgtgacactctgtagccatttatctcctctttagctttagtttccacattaaaagaggcattgaaaaaaaatgaaaaagaggcattgaattaggagctttctgtggccccttgcagttttcatgtgtggt

SEQ ID NO: 587043 - DNA, 4001 bp, Homo sapiens
gtctccagcagcctcccggactaccaacaacccgtatcagtgcagtacatttgttacaagtgatgaaacacattgacacatcattatccccaacatacatagtttacattagggtttactcttggtgttctacattctatggattttgattaatgtataattacatgtatcagccattttatagtatcatacagaatagtgtcattaccctaaaaatcctgtgcttcacctgttcatcctcggcagcccaaaatatgtttacttttgcaaagttgtcttcaaataaatacttaaaagcaaggacaagaccccccaagttttagacaagtactaaattaagtagctcttacctacttgaaaactaaatgagagtagtattcatcaacagaaagctaagcgggcaaaatgctttccccgcttttcccccatgacaagcaagattaaccaaaaatattacagttatttaaaagaaaaaaagaaagaaaccaaatgggaagagaatagaatgcaatcacgctaccattaacaatttatgtttttctgttcttggatacctttttgagtgcctgagaattttagtcgcaaggaatgaaaaaaactgttttctcatttcgagtttttattggtcaatagcttcctaaccgaaaactctgcagtcctaacacaatattttgtatccattttcaaaaatccagttctgggcataaaatagaattaatgctcaagtcaaaaactttgtgtttagaagataaaatattaggaaccatgagtatgagaaaaacaaaaactgttttctgtatttttcccttcctctctctgcaaaacttctctatttgataagggacagctagcttaaatttaccacaaagtaaaacatgagcaaatcccctggaacgaggagaactttcgcacagggcaattcactcgaatgtgacatcagcattccttctgagtcatagtctggtccccacccttttctcccaggcgacaccaggctccgcataacccgggagtggctcaggtagggccgtcggttccagtgcctgcgaggcagcagccaagctgaaaatgtctccctgcgctgagacgctggtgacaaccgccctttgggactacctgccaaacaaggagaatgcgctctttgacagataattccctaagagggaggcactgcctcggtcggtagacaagtaatgaatgaccgaaaaaaaaatcacattagaagttatcaccagcacgggtgcgaaggcagtgcattaaatcaacactcattttagagcgccccagacagcccagccggaagggaggagatcagagctgtcaaagcacagcagagccccaaaccacaaaggcttaatgaaattcaacttcctgagccaggaagtgtcacggtctcgcccgcactcgccctaagctcgtcctttccttttgaggaggcacaggcagagctgaaacatcttaagtaaagtttccaacacctacaaccactgggattccgtgagactggagagaagagtcccgcgcccgccctcgctcgcgcttccaattctgtcgctcccgagtgtggggagctggcggggccgccgagcacctcctctacccagggggccaggtccctgggcccggggcaccgcagacccagagccgggctcacaccggggggcccgcgagccccacccacctcggcacctccggccgccgcgcgccgcgcgacccgcgcaggtgaagcagccgccgcccgccacgagcgcccccctaccttcttcactttgttttccaggtccatgttaacgcgtcctatgggtcccctcctcctcctatccgggatcccacggccgggttcagctggcctccggctccgctgcgaacacgggaaacctgcggaactcccgcggcgccgctcaacagccactcgcccggcgccgtcgaacttccgccgcccagtccgccgcagcgggcctgcggcccggacccgggaacaaagggggccgggcagccaatggcagccgggcagctccgggccgccgccaatcaccgagcgccgcacgcaccttcgcggcccgagcgcggcgctggcaaggtgagaggcggggcggcgtccgaggcggcgccctgctgggcaagctcagtgaccctgacctggtctccgaagggattctctgggcgtccacgggccggcttctaaagagctgggatccccagcctccctctagctgaagatggagaagaactttttccatttggcaatttgtacctgtgtttgcccaggactttttatttgggtcaaggggaatagttatcccaatactaacttctcagtttattttcagggtaaagagagaaaaaaaagagagagagagagattgtagggatcgttagggattcctgtgatggaccttgggcactaaattcaatattgcgttgtggagatgccctttcctcaattgcttttttccacaatcccaaatactgtcaagaaaccgtatcttacatccctaaagtcagcgaagattcttagattgttttctgagcattgggttgttcaaaagtaaagatgatgtgaatcacttcagaaacaggttgtgtcattcctttggaagcagagggttgccctttgtctctgtgtgagatggtgctaggcctatcgcgtgctcaggctttgatgaagcagagtcatcacattggtgcaccaaagctgaattcatttcatgccctaattcaggagcaattgcatctaataccatcagattggtcggtctggaagggagcctaacgattacttagtctagcttcctcactttgcagggaactgaggactccagaggtgcagggacctgcctaatgtcttagcctgttggggacagaggcattgctcatgaatctaaacaacttctcaaagatgtttggggctggaagcacagcatgttgactaaggaaaaagagcagtcaattttcttcaatttgtggttatggcaaaaaataacattgcccagacagcaggtgacctaatttggcacctacttttaaaaataacaaaacaatataaaacaaacaaacaaaaattccctaataatgcagatattcaggtccagatgtatgtctgccttgcctcgagaaatttggtagctaaaaatatccaaaattcattttagccaatacttgcaactctgcttacttgattatttgttaacacagagcattgatttataatgtgcatgtttcctttatcctattaagaattaaaactgaaattaccaaaatgagttatgcatttttcttttcagctgatgtaaaacttttctgtgtcattttcccaaaccaccttgaaaggtgtgggcccctgcaaagtctgcccgttgtaagtgtataggatcatgaggtctagctatgacaaggcaattttgtttctttcagagagcttaacagatggaaaatgtccagtaaagcaatttaaataaggcatcaaacaaatgttgtaacataaattttggacccttatttgatgaggttgcagagatgacactaagaaaaccatctggaaactttttttttttaactgtcaacttctgcctttctcccattcttccttcccaaccctctcagcattacattgtgtgtgtgtatcattggcaaggatggaaatagaaattcagtgagttttatctggaattatcactgtgccaattatataaaaataattatagattatgtataaattataaaaataaaattgaggtagataagtgttaagagagttaaattgtaagtttttgttcagttattcaggtgttaagctacagttattaaggaggtagaactggcatggtttgatgagtacatgtagttgatgacagtggaatgaatagaagatggcacacatttctatcttgatcacctctatggatagctcagaaagagagaaaatataggatgatggtcagggttttgttcagttgtgcattctttggggctggtggtggacataaaggatacaactttta

SEQ ID NO: 587044 - DNA, 4001 bp, Homo sapiens
caagtggcagaagtgagatttgcatcttggcatttctcactcaaactctatgcactcactacaaagtcactgtttttttttccctccaaactgaaactaaaaaggtaaatagtaatgtaaagggtaatattcctcttctgtaacttctctagagtaatcaattttgatcttaaagactgctcattgtttgctaggcaggaattcctccatcctaggcaaaacctgggacttattatgaggaagctgaatgtctgcacatcagctacactaacatggaagtccccgaggtgataaattcacacacaaggggatcctcagaagaatgaggtgtgagtcaacaaaaatctccagggtcctgacgcaaaataggtctctttcaatgttacagcaagagaaaaaaaaaattaaaagaatgagcaagaaatacaaatgaacaaattatatttcaaaattgaaaggtgtttactcaaaacatgtagacacgactagtactaaaaattatctgctatattatatgtaagattacatacattatgcagtactcagggcaatgaagcaaaatatcattcttttcaaatttttcaaatcactgaatttctagattcataatggaacacctctgtattcgctgcaaactaccccaaaacttagggtttgaaaatacgatttatcatgtcatagtttgtgtgtgtcaggaatttggaagtggcttaggtagatgggcaggtttacggtctcttacaagtttgcaatcggggtcagctgggctgcaaggatcgactagggagagacccacttctaagatttctcacatgggcctgcccacatgggtacctcaggacatggtagctggttctccccagggcaagtgatcccagagagagcaagagaaccacaagatagaagctgtaatccctaatctcggaagtgatgccattgcttctgccacatttcattttttggcaactgatcaggctagcctgcattcaatggcagggcaatatgtaagggtgtgactactagtaggtgggagtaattgggaaccatcttagatgctgcctactatatcctcttttctgttttgattttaaatccaaagactaagtgatttgtgacgagacagacatattataaaggggaacaggggtatatggggtacttatctaccacttctctttattttgcccatttcaaatatttaaattctcttcacccaatgggcatctaaagcagaactttgttccttcctcattaatacttattcccttcaatttgttagttgttcactcagtaagaaccaggaaatgatctttcagaagacagggtagaatatgatttttagcctctaagtctcattttctttctcaatatatagttacacacacttgggtacacacacatacacacacacttgtgttacagaagacagctgcaaaccagattattaaaataccaaatatacttgggagaaaattttcgcaatgtttatattatgccacagtcatccttaaagaacacagaataaaaattggaaaagatttacataaacttttaaattccattatataaatccacctggagatggaattaagtaaaagaaaataaatttcagtacctccatgtgacatcaggagccaaaattacttgattcaaattaggtagtatttacagttagcagttccttccctcacagtactacttatctatttgaaacttaatatgtaaccttacaatattattaggagcgaaatttaggccccccttttaaaaaataaaaaaggtttgtacttatttcaggtaagcgactgatgaaaatatattccatctgatcagtttaagctggttccttataaacatttttcaaacggactgctatcaaattatttttatactactgtatgaaggaagtcatttgaaatgcttaccaatagaatacctcttctgtggactctactcagaaaaggactcctcctgaatccgttactttgagaaagacaatgtagggctataaaaatgtcacaattattataataagcaatgactgcagctgaaattgcttcttaattaggattggctgagctctggctccgctgaaagacactgtaatggaatgcgctcataaacagccctcaaaacctcctatttatttgctataaaagggactttaaaaacctgattccaaaacgcatctgtaggagttccataaaagaatctggatcatggcaaccattcctaatttggtcttgtgtcactatctccacagctgcttctaaagggtggatcccacagagagctgctttgagaggtcttaattaaggctctttatccccaaacttgaatactgcgatcattcttgcgatgcctaaaggctatggtattatttcttcaggggtaacccatcataatacatgggtgaggggatgagtagattgactgtacaattaagtgatttattgccactaattctttaactatctaactggagcacatgcagaaaaagacggcagtacagatgtgttttcacagactggagaatgaaagaaaaggctcatggcattggctgagggcttcactgaaggaggctgcccagaggagcaggaggatccaaggaaacctagagagtaatgcccaacagagacagcaaagaaaacagaaaagggggtgcaaaaagacagtcttctcgtttttctcttttgccccaaattagcattcacaggcatttagaacaaaaacaaagtcttatagcaaggagaggggtcttggaaaccaggaaaggaagggagagatgtaagaaccctactgccaggtcctcatgcttgcttatttatttattgcatacccttttcacaccatcccttattctggaaaaaaaagaattctgtttattgatatgttgtgctgcataaatcaaagagccttaactaatttttgacccatgttttaacttttgatgtatcagagaagtggtttggattaccatactttttgctctatatttagactataccactaaagaaggtgcacagacatcatttaaaatttgtctagtgattcaaggaaatcagacaattttcaaaatatgcatataccacctatttacaactaagataaaattgcagttgcatgttaatttaattttccttcactttaatggaacaacaagcacaaaaatcaaaatcagattcgtctagagcagaaagtgggctcaatcttaagccaccaatgaaattagagcagtttcagtacattgattcttgattctttcagatgtacagaggaatatgagagtaattcagagtggggacagtcttctgtaagactccttccacagctttcactgtgggaagctgtgaagacttaaatcccagcaacagagcaatagaagcaagcaaggtctcttgaggtccaagcttaggattcacacaccacttctaccacattctactgatccaagtaagtcagaaagcagtccagattcaaagggaaggaaaacagactccactttttaatgggaggtgctgcaaagaatagtaaccatttctgtaatttacctcagaaactctgaggaagattccaatcagggaaacataccaattccctatacgggaccacaatacgttgcagtgttcaatcaagtgctttctcagggaacctaatatacccagctttgaatcctttgcatagcgattggcacatggtaggtactcaagttccagaaatatttataaattttaatttcattataaaaatataaatcagaataatttttaaattagcaaaaggatacattaaatatattaaatttttaaattagcaaaaggatatattaaatccagtaatttaatatatcccccagttatcgaactttaaatggatatttgtgtccaacaaagtaccaagtggcaataatttactgagagcatgccatcataaaattcttgacaatatattcaggtgtctgttaaatagcatgaagatctatgcaggattttcttccctct

SEQ ID NO: 587045 - DNA, 4001 bp, Homo sapiens
tagtttatctaaaaccattgtgtaagaatattttgtttctttcagtttcttctttccttatttctcctttctgactattcaaaccactgttttcaaaactatttttacttccactatataagttagtagtatttctgaaaatttcactatgctacaaatttgtaccttatttaaatgtcttgtaattattttgggctatctagaacttacaacaaaccttatgccgcagtcgttaaaattaaactgacttttaagaaacatttttcagcttgtttcatttttgacatgagctccaagtttcagttcaacaaaatgtactacattgaactattctactgttttggaataaaattgaaaacttaaaaaaaaagtaataataacccaaaccaaggaaatagacatgaaaattatatgtattccatttgttttagagctaaaaaaaaaagtttaaaaaaacttcttaaaaggagatcttaaagtttagcctacttaaagtagcttccatccaaaagtaaaatatttaacataaatttaaaagatacttgcaagtgcactgctacactcagattcatctaaaatagaagtgaagcagaattgtccgaataatgctgataataaactgcgtaccatttcactttgctgtgctgacacactttctgaatacgaaagaatcatgaaggttattttacactcttatagttaaatgaagtttcttataaactatccaaaatgaatttgaaattacctcaggtttctccttcccttaaaatgcatattcccagtgaaatattctaagacaatattgaaagtatggagttataacttatataaatatatatgaaattatatctattgtaatttatataagcaaatgtatatatacagcatatatatatgtatgtacatgtgtataaatatcttcatatgtatcttaatcttaaagtttctactacaactcttttgattattacaattgaaaactattactttaaaaaagtaattgctgggaggccaaggcaggcagatcatgaggtcaggagttcaagacaagcctggccaacatggtgaaactgcgtctctactaaagatacaaaaaaaaaaaattagccaggtgtggtggcgcatgcctgtaatcccagctacttggaaggctgaggcaggagaatcacttcaacccgggaggcagacgttgcagtgagcagagatcacgccattgcactccagcctgggtgacagggtgagactccatctcaaaaaaaggttgttgcattgggatacttgacatcttctacacaagctatttagatccacatctacataaaaataggaattaatttttagtcctggaataagaatatatgctaatatactatctggtactattttgctataaatagagctcatattttcttacctttaaagccaataaaatagatattgctcaaatgtaaacaaaaattaatatttactcataaaataacatatataagaggcaacaaaatgttaaatcatgttccaatttagtaaatatctgaaaatattaaacttgaaaaataaataactttggttaccatgaactaaaacagtgatttccacatcttggttgaaataagacattaatagagtttcagacatattttccccaaataatagcaaatcacaacttgactactcagatatcctgatacctagttatcataaaagatgaaattataattataagcaagccacacatatcaaaataaaacaagtattgattagtttgtcttcctagtttgtttaaagtacagaaaattaacctgccggtttagttacctaccagcaatgagtggattttatcagtgttgtcatctctacaaacagcaccaaattataatccctcttcccataacatatgcaccatgccagaagggacaaccaaagtaaacgatctagccgtgagtaatgaatactttgggctggttggaatccagttagttgaggaaagagaaaagagaagtggctcattagggcatttcctgaaccctggttggaatttcagttaaggaagaagaaatgacacagcagtttcaagttaagacgacttcctttctttatctgaaatatgccactaatttgagaaagagcactcctagaaaactactccacaatactgtggccacagtaaaagctcttgttggtcccattgtggctccataattaacaattcttaccagaatatacacaagcagtacatggttgttatcataatggactgagatcctacatttattgcaacatgttatgtttcacaatgaacatttcttcaacaaattgacctgcatcatttttttttcaattttaggaattgcacatttctttagagcattaatagattttgagtttttaaggccattgcattttccatattttctataattacatttttcttacatatgattttactcctaaagtgaccccaggataatttttatcttgtccaagaatattttatcttcccatgtagattaaaaatacacagttcagcttatgagatttctttgtcttataattattatttacatcccaatttcatttgtatttttaagggacatgaatataggatactcatgcctttaccaatgtgataaaagaggtctcatttcatgtgttaggtatctcaggaacttaaaatggaaaggtacaactttgttcccaccctgtaattcacactgtgaaaatctgaattcattcttgtaacagttacatgactttcttgtcttacctatattttaaaaaatatatgcaaagcaaggcatttatgcaagctactgaagtttaatgtgaaggttacattcagatttctcttgcctttgtgatctaaaaattgtgcaattaaattgacatttgtgtttgtcaagaagtggagattatatgaaaatatttcagcactatatcttctgtaagaacttcaaagctattaagtaaaaaaattgttctgtcactatcaatagcacatttttgagtcaccttaccttttctggttgttttatcatacatctaaatctcctaaggtgaatggaaatagtaaataattaagtgtaaaatcaatttatttaggttagtattagaaataaacaacattgatattagaaacattgtgagaaaagaaaatatttgggattttaactcattagaaaatactttagattgaattagagtttaatacatttgtatgatacaacatgtttaacatatttaatgtatttgtatgaaatacatttgcgagcttcagaaggtaaattttaaagctgtattactatgtgggcttcaaaagttggaaacatgcacatagatacatattcacacctgaaagaataagcatctatttgttaatatcagttatttcttaatggtggcataatcgggtagttactttttttacatttttatctattgcttctatattttatataaagtgtggcaattcctctatctaaaaccagaaataccattcaacctggcaatcccattactaggtatatgcccaaaggaatataaatcaatctattataaagacacatgcacacgtatgttcactgcagcactattcacggaggaaagacatggaatcaacctaaatgcccatcaatggtagactggataaagaaaatgtggtacatatacatcacagaatactatacagtcataaaaaagaatgagatcatgtcctttgcaggaacatggatggagctggaggccattatccttaggaaattaatgcaggaacagaaaaccaaatattgcatcttctctcttataagtgggagctaaatgatgagaacacaaggacacatagaggggaacaacacacactggggcctatcagagggtggaaggctggaggagtgagaggatcaggaaaaataattaatgggcactaggcttaatatctgggtgacaaaataatctgtacagcaaacccccatgacacaagtttacctatgtaacaaacctgcaca

SEQ ID NO: 587046 - DNA, 4001 bp, Homo sapiens
gagggggaagaatgttactgcaaggaatctgtgaatttatatatggggaatttttttaagaagataataaaatacaagcatgatcctaacatacgtgctatgtcatagacagctgagtatttattacataccaggtactaaaccaagcatatttcatagtaataatttaaataactatatctcaagtaatctttacaacaactctagtattataattgtcattttaaacataaaataattaaagctctaagaaatgaaatcatcatttcatgatcatatagctttataaagaagtagagagcttggattcaaaccaaggaatgtctaacacaatgtctggattctttattatctaccctataggtagaagggccttgcctttaaaacttttagtcttaagtgttttgagtgctaaaaaaagttacaaggcattggatttaatttttctcagttatattctttcccactgctgttttctgcactaccaatgtccccattccttcaataagcatccaaatctaaggctcaacgttgggaaagccctcttcagcactcctcctcaggccagcctggtttatttttcctttcaccctaataacatggggctaacaaacttgcaatacattttctaattgaatttaaattaattgttttatctttctccatttttattcactcagcaagagaaaaggcattatagtatgtatttaccatgttcctgaaaatggattatatatgtaaagctaagaatctttggcatatatatgtgtatatacatatacatatatataatgtcctagataatttcattataaatacaaaaatgtaaaaaagtcttatatatagtcacatattatatttccagataatttattagtagagataacaaaagaaaaaaataccttatatatatgtgtctgtgcactatgatatatttaatatgagtgtcaagggaaactgaggcagtattttgagttgtttggatcctatattgtgtttttttgtgaaaacattcattgtgaccctaagatggtaaaagattagatagaataattgtagacataaaaggaaaataaacttcatgtataaagaggatcactgtaggagagcctagagtgcacaatgcatgcaaaaaattggcgtttgaaagattattgtctttccttttgggtgtttattaatgtagatgcaataaacaaggtctttatagtttcaggacacacaccattaatattcctctaaatttgttttctttgctactaaagcagaggtatacagtttaaatgacatgcactgaatagagaaatcccactgtgttattgctgttattatttttgtcctattatgacacatgtaaatataatgtgttgagctggaataggagatcccctgtccttggtgagctggtttataatatagtggcagattatctggaaatacaatatgtgactatatacaataatagaagagataaaatataaaacaaagaatgataatttataaatacttttgcatcatgcatattatatacatatgacctatttagtaataaataaaaacaattaatttaatgtaaacactgcaacaattagtttgaaaccctcatcttttgattaaaaagtaataataaacaggagtttgaatattttttactaaatatactgttataattttttactatagtccagagcactaaaaataatcttgtaagtaagcatgcttgtcaatacagcagaatatattttatgcgtttcaaagctcaatgttcacataccttattttattgactataagtttataaagtttaaattcagtatttaaggtggtttcatctccaaacactgaaagaattccaaaatatacttgctcaccagttttaactttgaagtgtctataaccttcacaatagcaatggttttctctttctccttcatcattttcttttccttaaacttgcaaacaataaccaagagaactgtgtggaaacttctacactaaagtgaactttggttcttctttggactttaagactaatcttgtctagattgtgattgacaaaagcttgctcactgatgttatgcagtcctttcaagttccaaccaagcacagggggttgttaatatttactcattcctcgtctctggaatgatcttgaactataacagtttacttagactaccaaatgccaccagcatttacagacacttgattgaaaaaatacctatatatgttaaaagaaatgagttactatgcacaaccacgtctctgaaagaaaggggtgaaactaagaccaatgggtgtaaataatacacagatctaaactcagaggctaagcaatcattcagctggagtgtgccagatgataagatctgtctcagaccccttcaaatcataggattctatagttctatgcaatggctacttccctgagaccgctggcacagcagaatgggtaagatagttgcactggtttcatgcagggctggattcaaggccctactttgccattcattaactatatgaacttgggcaagttactgaactctctaagcttctttcctcatttgtaaaattttaataggcaataacagtctctatctcataggtttgttgtgaaattaaatgtagtttttcactaaaagtattttgcataattcttgtcacctagtaagtaaccaatgcatggtagctattattattgttgtctttattcttgttgcagtagtaccatgctactgcaacaagaataaagtattcctgaataggaattataatgaaaacaattatttcaatactatgtgtgaattttagtcatttatttaacatgcatttgctgagcacctgtgatgtgttagtcactatgctgggtactaacaacaacaaaacaggctactgttttaggctccagagacacagcagtaaatgagacatacaaaatccctgtcttcaaggggtttgcattctacagggggaagcatagaataaataggtaaatgcagtaataaagaagatcatttgtgttacactactcataagtcagagggtaaataaaataagacattgatttgaggagtcatggagttagggtaattgtgaaaggcccctttgacaagctgacattgactaaagatctgaatcataaagaggtaaccatgcaaagatctgagacaaaagcattccaaactaagcaaaggaagtgcaatggttgtaagatgataatattcctgtcatgtttgaggagaaaggatgccattgaatccagaccctgaagtcaaagggaagtgctgactataataaagtgtctggattatattccgaatatttcagaaagttaataaaatgttaagcaaggagaaacaggatctgattatttctttaggaagattattctggctgctctgtgaagaacagctgtaagggaacaaaatgtagcaggaaagctaggtcagagcctgtggctgtagggagagatgatggaacttgttttacaagaggacatgataggaacctgtgagattctggaaatcttggatgtagattacaaaaacatattgatagatgtgagtatgggagtaagagagagaaaagcaaagaatgaccatttttgtttgtttctttcacatcaactaaaagcagattttggaggaaggacttcttttcagccatgctatgtttaagatacctgttagaaccacaaaagatatcaagtaagcagtagaatatataagtctggcatataggggattgatctaggctagagatgtgttgatgttacctataggacatgtattgatatatgagaaaagaggaccaaagactgagccttaggacactccagaatttagacatctgtgagaagaaaaagaaccagtaaaatgagtgaaaaatcagagaatccacagaaccccagatagctcttcaagaagaaggaagtggtgaaccatgttaaatgccactgaggagccaagtcaggtgacaatggagaatttgctactggatta

SEQ ID NO: 587047 - DNA, 4001 bp, Homo sapiens
tttcaaaaaagtgaaatagaaataccataaaaatcgtatttacttttctttggtgcgcagaagcccatacaagtagcttcatctggaaacctgttctcaatccggttccggtgacacccaccggaaaagaatttttcacatgtcatggaacttagattaaagaaatacttttctgtggacccctcacactggtcgtccacactcacttgcagccggcaaactttgggaacttctaggaaaaggagggtaatagaacaatgttagtcaaaagtagccttcttattaaaccatcactgtattttcagcaacattttgtggggggagagaagttgtattagtgttgggatagtaaatacccagaatactcccatgaatccagatatttactttttttttttctaacagtgtattcagagctgactcagctgtgatgtatctttcaagttcagtagaaagactctctgttttctctgggtgttctctgattgtacatatgcagtgaatcaaagcttattcacatgaatacgcattttcccctggctcagttccttgaatggaaaagccccatgttctcttacaggccttaaccgatataatttaaaaattaaaaataaattaaaatataacagtattatgaatctccaccatgtcccgcaactaatccaacacatgtttgggtatcgggacaaaagtagagttatataatgagctaagtcacacttcaataataaaatccactaaaaatatttcagattgatggataatcgacagaaggaaatgatgtactccaggagagataaaaatcataggtttggaattaatgaaaaatacagagaagcacttacgttgtacctaacacgttattctcttgcatttattataccccatggtgagggaacaaatctttccctgagtccgcacaggcactgaattatgatcaatgtcagttgggagacaggaaatgtgttagtggttgtaaatttgtgattacttttaagaaactgaaaaccatgaggtttgcttaacacttgagaaaacccaggctaaaacttcctgtagaaagcgagacgtgggaaactggcgaagctgctaccagccgccggcgcaaggagcgcgagagtcctgggtgcgcgcagggcacttactttctatcctccagcaagcatcgtcgcaagcctcccaggtgtagaaattgttggcgttgccctcgcagcccccgtacaggaactggcggcagctctgcgtgtacctgtcgtagtagtaacggagaagtagggcccggcagggtccgtagtctaggggcaggagacagatctccgcgttatttcctgaagaaggggcagaaggagagcaaaagagagggaaagtggtcaggcgtagctcctaggaggaaagaacatcccggggagttctgtccccttccgagcggaggggcctctgcagagaaagtgcaaacttgggagcgagtcccccctgccagcggagcgcgcggcagggacctggagaaagcgaggcttggagggcgcctacacggggccccatggcccgctgcgccctctccgccggttggggagagaagctcctggagcggccagatacctgttggctcctgagcagcatcgcccagtgcagcctccgtcaggaaaagcagcagaatcgacagccccagggggcgagcggggtccatggtgcagggggtcgggcggcccgctgggcaaggcgtccgagaaagcgcctggcgggaggaggtgcgcggctttctgctccaggcggcccgggtgcccgctttatgcggggcgagcgtccggccgacccccgccggggcggagcctgaggggtggctgattcatgcacggggactgtcaccccgccgcccccgcgctgcaaactgtgtaagagggagaggaattccccgccaagttgaaaagttgaacctgcctcccaaactttctcctgtagtccagacggggacgccctgagggagcgtttgtgtcagtaatgggaaatctgcaagctagacggaaatgacctgctagtgattgcgctgtaaagaagccggaatccacctcttgaaggcatgaagttcaggtatttgaaaggctggtggagagaaagtgcggagttcttgggtcagagcggagcgggattcgttgcaatggaccttcagattagattagaaatgtaaataagtgtatatttatatttatacacacagatttcaatcgagttctaatttacatttaatacaggcttataatatatcgtaggtggacagtttgataaattttgacaactgtgtagccaccaataaagaattagaacattttggctgggcgcggtagctcgcgcctgtaatcccagcactttgggaggccaaggcgggtggatcacctgaaatcaggagttcgagactagcctggccaacatggcgaaaccccgtctctattaaaaacacaaaaaattagccgggcgtggtggcgggcacctgtagtcccagcccctcgggaggctgaggcaggagaatggcttgaacccaggaggcggaggctgcagtgagcccagatggcgccactgcactccagtctgggcggcagagtggaactccgtctcgaaacgaagaaaaagaagaagaagaagaaaaaaaaaagagttagaacatttccatcactccagaaagctcctgcagactttttcctaaatcaatccttccatccttaggccaggggcaaacactcttctcatttcgattaccatagattagatttgcctattcttgaatttcatataaacggaattataaagtattcactgtgtagtatttctttctcacacttcctgtttttgagatacgcccaggtcactgcatcaatagtctgtttcttttaattcctgcgtagtccaaggtatgaatttaccaaaacgtatgaatatcccacaatgtataaatatgttgctgtgtgtatcaatagtctgttcctttaaatcattgagtaatattctaatatatcacaaatgtcttattactggaatttgtgttgtttctagtttgtttgggggctcttatgaaaaaagctgctttgtgtggacctgcaatttttattactcttggataaaatacttagaaatgttagacactgccaaaggattttttcaagatgattgtaccattttacaccccaaccaagcatgtatgaagctatgtttttgtatgtatctatgtttttggagaagaaccatagcagcccagagagatagccttggggagttctgaagatttgaccagatcagtgtattcccacacatttcctaatgtcagtgcatccattaaagttccctgttcctttgacatattagcttgtgatccacttttttttttaatacaaacaattacctacagtgaaattttacataaaatattaaagatatttttgaagacattttaatatacttgtcttcccttccccttttctcttgttgtattcaacattctcaagtaaataattattcttgacttctgaggatactgggggtagtttacagaagttctctttcaagttttcaggaagccctgaaaagtataggacacacttgctcaaagtgggttaataatctgaggtattttgcacattatatccttgtgccagttttcagtcattctgatgtcatgttacaaggtcacagtcctaggaaaaccagcctgatctggaaatgctgtcagctttgattagcagatgtctatgattaagaatgatagttgaaactataaggataaatgtttaattatcacctctccagtagggaaaaataaatgggatggggatgctttgtatagttaactgatttctgtgatgtaaatgtgctcactaaggtcaatttcaagctgccactgcagaatcactgaatgccgaggtgggaaaagatctccaagagccagagctccccatggccaaaatctgtgtgagctggctctaatgcaccaaccactgagacagacagccagt

SEQ ID NO: 587048 - DNA, 4001 bp, Homo sapiens
tgtctcccaggctggagtgcagtggtgtagtcatggctcactgcaggcttaaacaagagtcacctttttctagttcacccacaatcaccctgtggcctcgctgcagccttcctctctctgcttcctcctcttctggtccccaacactcccctcacctcagcaggcgggaggcaatgtctgcactgatgggctgggctgggatgctgggaaggcctgatgatgcaactggagggaactgggtttgattgaaggaagggaagccaggtgtgtaggggtctccagttcccaggtgcacctgcagggaaaggggtgcccacgcaaagctgcgagctgggcttccaggaaaaacgaaaaacatgccagccctattctgagcaagaaggtgtggcctcgggacctgggaacagcacgaccagcctccccagactcacatgtccatacactgcctgctggctggacaggcttggcttgggtgggtcctgggagaagtccgctggctctgggtatatgagcactccttgagccccgaagtcctgagcattggtcacctggggaggaaggtgactagaggactcctcccagaaaaaaacccgattcataagggcaggagaaaccaggaaatggcaaggcctttgcttgcaactgtccatcccacggagaggatgtgggggcactacctggcctgtgtcttcccaacctcagcagctcctaggcagccctcaaaccccaccgggctccagggtaccccatgtttctgttcccttccccatctgatttcccccaacacccaatttgttcccagccaacattttcttttttccttctgattcaattcccagaccagccaacattttccttccttccttcctccctccctccctcccttctctgtttctctctcttttttttttttttctttttgagacagagtctctcttgcccaggctggagtgcagtggcgcgatcatagctcactgcagcctggcactcctgggctcaagcgatcctcccaccggagcctccggagtagctgggaccacatgcatgtgccaccagcccagctaactaaaaaaaaaaaaaaaagaacctttttttttttttttttttttagtagagagggggttctcaccgtgttgccttgaattcctggcctcaagcgatcctcctgtcttggcctcctaaagtgctgggattgcaggtgagaaccatcgtgcccagcttatattttcttaccatccagccacatggttctttcctgtctccctctcacagcaccctgaacgattctcactggcagtccgaccctccggttcccgggctcaagccctccctctgtccagggacacttaccttctgggcgaagctgatcacccccacgcgcaccagcagcaggcggcccactggatccacgcccctggcccgcaggtcctgcaggtcttcgggccgcccgtagtgggcgtacaccagctctccctggggacacgaggacggtgaggcgcgctccccgcgtccctccttcgagacccaggaaagggctcgtgccgcgccccatcctaggagcgggcagggggtgctcaccgtgacgttgccgatggcgctgtaggggcagtagacgtcagggtcctccagcggcagctgctctccgaccttcccggcctcatcgacccagtgcagggtgttggggtgagccctggggagcggggctggtgagcgccccgagccgcgtccccctccccgcgcgccccccgcccgcgcgcgcactcacggatccgggaattgcagccccacgtagtgcgtgtcggtccacacgtggtccagcttctggcgggagagcgccgcgcgaatgtcctgagtcagagcggccatcccggccgagcctgccacccgttcccgaaggctggtttgcctaagcggggagaggtggggacttttctgggcgcccggaggagagggagggaagagggaaggatgccagagacgtggggtcgccaggggcaggggcggcgaggggttcctgagtttaggaaaagagcgctccccgcggacgcttttttttttttttttttttttttttttgagacggagtgtcgctctgtcgcccaggctggagtgcagtggaccaatctcggctctctgcaacttccgccttcctggttcaagccattttcctgcctcggcctccctcgtatcagggattacaggcacgtgccatcacgcccggctaatttttgtatttttagtagagacgggtttcaccatgttgaccaggttggtctcaaactcctgatctcaggtgatctgcccgcctcggcctcccaaagtgctggcattacaggcgcgagccgcagtgcagggccctccgcggacccattttctcccatcaccaccagggcggcgccggagactctcaggacctcactctgcttaaaacctgacttcccatagctgggggtcctgcccatcatcctgtaggttcttcccggctcaagccaaactctctcccccaacctcgttcctcccgacgtcaacacacacacacacacacacacacacacacacacacacacacagcacccaaacactttccttcgaaagagctaactgggcaggcagcagaccctcctcatctcccccatcctccacgtgggcctcatggagacactttacaccaaggtactcaggggaatcaccggttcctgggctcaagccatcctcccgcctcagcctcctgagcagctgggactacaggtgtacgccaccaaccgctgatttttaaaaattttttgtagacgagaagtcttgctgtgtttcccaagctggtcttgaactcctggcctcaagcgatcctcccaaagtgctgggactacaggcatgaaccatgacgacccgccccatatgtgtatttaaagctacacatcaaaagcgtgagataaggtgcttatggggaggggagtggggaggatcactcagggatgaggcaggaaaattcaattcaaaacagttaaagtagccagtaaggccctttagggcctgagctacatccacctcaccggccacatggaccatctttcccttcctccaagaggccaccatcttcacatttcagacccttcgcaaatggtgaatctcagcctgaatgtttttccacagtctctttgcctggcaaattactcatcttggcagtttagactcgtcagttcctcaacgaagccttccctgaactgcaatctaaatcaggatcctggttatagtctttctttacacacttttcttttcttttttctttctttctttctttttttttttgagacggagtctcgctctgtcgcccaggctggtgtgtagtcgtgcaatctcagctcactgcaacctctgcctcctgggtacaagtgattctcctgcctcagcctcctgagtagctaggaccacaggcgcctaccaccacactcagctagttttgtatttttttagtagagacagggtttcggcatgtcggctaggctggtctcaaactcctggcctcaggcaatcagcccaccttcacctcccaaaatgctgggattacaggtatgagccatggcgcccggccccttttcttttctttttttggagatagggtctcactctgtcacccagcctggagtgcagtggcatgaccatagctcactgcaaccttcagctcctaagctcaagccatcctcctgcctcagcctcctgaatagccgggactctaggcatgcaccaccatactgggctaattttttatttttcttttttaaaaaattattattattattattattattatttttgacatggagtttcactcttgttgcccaagctggaatgcaatggcgcaatcttggctcactgcaacctccacctcccaggttcaaacaattctcctgcctcagcctcccaagtagctgggattataggtgcccgccaacatgcccagctaattttttttgtatttttagtagagcctaaaaagggtgaaa

SEQ ID NO: 587049 - DNA, 4001 bp, Homo sapiens
tcatgtcctctcaaatgcaatgagaaatgaaaaaaaaaaaaacgtagaaggtataagcattggaaaagagaatctccatctcctactatctgtagcttagctgattacctacttagaaaacccaggcgaatccactgaaaaattactcccgtcccaaaagagggctatgggtggacctagcttttggatctgcacccacaaatgcatttgcttacttgtttttctttttttcttttctttttttttttttttgagatggagtctcgctctgttgcccaggctgaagtgcagtggcgtgatctcggctcaatgcatgctccacctcctgggttcaagccattctcctgcctcagcctcccgaatagctgggactagaggcgcccgccaccatgcccggctaatattttgtgtttttagtacagacggggtttcaccgtgttagccaagatggtctcgatatcctgacctagtgatctgcccgcctccgcctcccaaagtgctgggattacaggcctgagccaccgcaccctgccgttattttgtttttgaaacagggtctcgctctgtctcccaggctggagtgcagtggcataatctcggctcactgcaacctccgcctccccggctcaggcaatcctcccccgtcaagctcccaagtaactgggactacaggcactcgccatcatccccagctaatttttgtgttttctttggtagagacggggtttcatcgtattgcccaggcttgcttgcttggttttctgattccctagaatgcggcttctcagaacccctcagcgctccctgctccaaatctaggcgcctgggtgaggcattcaaggcttttctgggtctgtccagtctgatactggatgctgcacccctctgatctcagacagtcagctccctcacctcccaaatatgccaccctcagagcctcagtcccctggaacctcagctccgaatgcctgccatccttcccaggaccgctgaacaggggggccaggaaggcagatgggaggactcaggagggggacccagacaccagaggcctgggccaggaggcagggaggcccagtctgagcggatgaggggagggacactcgagaacaggatggggcagggccatccctacctgatggtgtcctccaggcgcccctcccccaggaactgcaggaacatggcctggaggtcgctccagtagagtctgccctggtggaaatccaggtcaggctcatagttgacatcctcactgaccaccaacacagagtctccgcacgcctggcaggaccctcggaaggcgacgtagcccagtaggaaggctggcgggtggcaagatggggattctctttatgcccacctctggaccccagaaatctcccccagcccaagcccttcacttctggggagggggacggctctcacccccagtgaagatcagcagggccgtcaggaccaggtagggggcagccctccgtcctgctgccgcccagggaatgaggtttggctgcctgggtctagagcccaggggctcagggcccctcagctccatggggcagaagtgggccaatgtctccgccccctcctccccgtcttcctcttcctcctccaggtgccctttccgggggccttccacacgctggtagacggtctgagaggatcttggggacagttgttgctgtgcaggcgaggtgggcatgagattggggcaagaggcctggggggtggggaggcatctggcaataatgaggtcagtgacttgggggtgtcaaatgagcatggtggtgggggcgtgggggaggggcaggggtgggaagaagcgaggtcaggacacggtccaggaggggccagcctcaggggcttgggagggggctgagggacttagagagaaggcctaaggggtcttcccaatcccactagtcttaccgctctctggaatagaccccaaagccgctccatgcttgtgtcccctcctgaagcctgcaggctgtcccccagcgataaaccgataaaccgtttgtgggagccctaggagggccccttatcagtcctggcaggcagcctgaaccaaggctgctcctcaccacccccaagggtgggggcacagtcctggcctcagtccagccttccagacgtggcccccgggtccaggccagagcacaaggggctgtgctctcccctgccaatctctccacagccccacgcctgcctcctccctgcaaaacaatcaattttttgaccttggggcggactttggcctcctagttcccatcaggggtgggggaagggggccgatagtgggggagggcagagacatgggtgccccctcccctctcctgcttttacccctccctggatcctggggaccccttcctaagccccgccatgcccaggtggaagattcacccctaagacatctgccccttcctcatctggccttcagagtcccccagtgccccggtcctgtgacatatcagctgtcctccctgtcctgacacttgccccagtggcattctaagctggaggcaccacagtggtgtgacttgggggtctggtctggtggtgtgcatgtgtgtctcttttgaaaggtcgttctcagactcctgctggctgctggagaaggaggggcacaggtgggagcacatggtcagatgagaccagcgagagctcccagataggggtcctggggtcagggatatgtgggtcagtggggaggagtgatcagagtccccgccaaggtgtgggcagagctgggtgaccctggacaagtcatggtcctccctgggcaccggcccgtttggtcaccgaaggacttggatcacatgggtttctacctctttgggttctgaggctgatgaaaggccagttagcctcaccccagaaacatgtcacaggcataaactgctaaacaggcagggggcgcaggtccccaaacccttccgagggccccaagacaagtagctctgaagaggagggctcagggtcccaccaagtttccctttcgggtttcccctgggaaacatcagctcctactcaggtccagagaagttccgagctgctgggatgcaccagcgccctagtccccgccccatgtctgtcaccaccaagagccccaggaaggaaggcatagcgcatctcacctgagcgcaggtcctggggtgctcaggcgtgctgctcccctgagacctaaggcctacgctgaggccccgcccaccaggccccacctcctgttccgcccatccaggcttcacctcctgctccacccacctcctgccacactcaccccaggccgtgcccctccactgcaccctgcagcccctcccacctcccaccacaactgttagcccccagcaactcccccaacccccggtcctcgtcatgtggccctccctgggtcacaacccctaggaaacctgaggaatccatggcccctggggctgtgtcccagcacccactgtgggatcggcatgggtgtagaagtgagactccctcccctcacctccctccagacccctgtgcccactccccaccccacggaggccaaacttttttttcttaaaacatttttacttctttcaacccagaaacatcaccattaatgaggacaagagggaaaggaggaggggggcaatgtggcatgggggttaagggacttccatctgagcttgggagcaggtgtgtggggaggagtgccatcaggggcactttcgctccacgcactgcttcccgccctcctcatattcctgcttggagatccacatctgctggaaagtgccctgggtggagggggtaatatcagggtcagggtggccttggagggaggtgtggacaggcaggtgcagcccctgggaatcctccaacaggccccaaccaccccttgggttcacatccctctgaagcccctccccacctcatcctcccctcctcggtctgtcccctttcatattcagagggagagtatcctcttcatatcattcaatcaataattcattcattcaaca

SEQ ID NO: 587050 - DNA, 4001 bp, Homo sapiens
ataaaactaattcaatttttattttgtggattacacaagaaaattttttaaaaaccctagaaataatacaacttttactaaattcacattttcagtgaaaaaaatctttacaattcacttgcattattttttccttcctaaaaagttactgtaaggtccacaaagtttagttaaaaatttcagtgtggggttataccccatctccaatatcaaaggccaaataaatctgggaaatacggggttaaatcaagttcaacatgatcttttgctacaaacattctcagagatagagccattagtacagtagtatttccctataaactgaaagtggattagattgttttcctcccccaaacatctctttgcatcttgaggctgggcttcaagggagacaatcctggaaatattgccatggattgtgaattacttggggttatcagtttttttttcttttgagacggagtttcgctcttgttgctcaggctgtggtgcaatggtgtgatctcggctcacctcaacctccacctcccaggttcaagcgattcacctgcctcagcctcccgagcagctgagatcacaggcatgcgccgccacgcgcagctaattttgtatttttagtacagacggggtttctccatgttggtcaggctggtctcagactgccgacctcaggtgatctgcccgcctcagcctcccaaagtgctgggattacaggcgtgagccaccgcgcctggtggggttatcaattttttttccattaattaaaatactggaaagcagccgaatcattaatgaataagtccttcaggtctaaagtaaaatgagcacaaaacaactgctgaaaatctgaaccaggttagatctaaatgaattgtttttaaatacaagaaaaaatggaaatgcagtattttaaatatgttgcttttcatgtgttattaatcatgtgagtactattaacatctccatgttacagatgagatatgtgagacaccaaagcttaaatactttccaagaggtcattaagctacagaatagtggaaccaggatctagcattgaagcctggacccctaattattatacgacactgcttgtctgtacttctgaataaaaatcagtgcttcagtagtttgatggaaatatatcgtggctctagtaattcagagtaacagaataaaaccttgttctccgcagagtatctacagccctaagcagaagactagtttataattctggctctgacactaaactttcaaggtcggttacctaatcattccgggcctcagtttcctcaggagaaaagtgggatgaaattatacctatgcgacctacctcgcggggggtgtaaattaactttgcgtgcacctttccacttcgcaggtttcacgtatcttaaatggtggttaatgttgttcaatgaaatgagatcacgtgaagtggggaaaagactgaaaaccacagaagcccgcgcaaactttactgttttaactgttaacacccaaacaggctcctgggcctcgccaccagccagcagtcctcgcgcaagaagggcattgctagctaaactgaactagcgccttccctccgtcttgccgcgggcgacgggccacgtacggagagctgaggactcactggcagagcggacaggagacacccaagcccaaaggccacaggtccaaggcctcacggcgaggctgacgcttctgctccagaaacaacttacggataaaaactcagcttccggtctttattgtttcgtccccggcggttcttacaacaaatcgctgcgcaatagcggggcatgactcgggtgaggcccctggagaccggggccggcgacggatgcagggcggccctcctcactgaggatgcgccacaggtccaggcctctcgagcccctgcgcctgcgctagcattctgccgggaaagccgcctcgtctgtcgactcacttccgcctcctccggtttaagcaccgccttttcgggggttgaagccggaagtggcgcacagccctagcagcaacaacagttttccacgtgcgcgtagggcgccgggatcacgtggggaggcagaagccaatggggaagcgtttcgtgtaggtcttctgaggtggtggcgccagcggctacctcctgcctgtgaggagctggctgagaggggactgggcgccggcggggaaggaggagcgctaggtcggtgtacgaccgagattagggtgcgtgccagctccgggaggccgcggtgaggggccgggcccaagctgccgacccgagccgatcgtcagggtcgccagcgcctcagctctgtggaggagcagcagtagtcggagggtgcaggtgagggacgaggccggggtcgtggggaggggagttcggagggtccccgtagcccaggcctgtctttgtgagctgacttggcctcggtgtccgccacggtcgccgcagggacaatgggctgcatgtttttggccgagagaatggaagaacggagacagccgcatcacagaatcgtgttttgggttgtggcgccggctttcacgggcgccggattagagcccgggtctcgggcagcttctgcggcggggcctgggcgggcagggaaagtgccagtcgcctttaggtgaaggttggagggtctagcccagccgcccaccgaggctggggaataaggcacgggctgctggctggcggggccgtcttggggatgagaagtctgtacaatacaaaactagtctgctaaaaaaaaatcattagatgtccaccttgagaccgtggaataacgtctgctgaaccagtgaggcgcctccctgtcagttttagatccgccctttgactagggagcaacctgcagttgacgcagcgtccatgggacacactgttgtgttccttaaaccgagaagtggttcttgattcttggtacccgtgactacgagtaactctctggaaataagtaatctacctgcctgctaattactctcaggaaaggccgctggagaggaagccaggcaatttccacaaaccgtagtgtttttcgtcagccttattatggcattataggttactaaggactctggtggtcccgtattcaaaaaacaggatccatcccttcgttttgaatctcaagtcattgaatacatattgtcaagaattctaagttaacatttctttaatggtttaaaggtaaaagaaatattttaactactgagtttgtgaaagtaagaatctgccttaaccacagtacaaactatcaaagttcatttttctggcagctttagcagaaatcttaaattctgttcatcatgagttttaaacaatatttagccatgcttcctggttaaacatttgggatcttacatttgggaaaaagacaacattctattgtattgtcagtattagtattgtgatattaagattctctatttgcagtccttggctcacctgctgaaatgaaagctgaatttttggagcgagattaataatactaatttagatatactgggctatttaccttggtgcgccaccttttttttttaatgttttttttttctgtgaagttaaatacattattactttcaggatatgaagtcttgaaaggaaagttgggatcttatattatttggttttctttttttttcttacaatgcttgcatatgatgaatcttcaatataaactggttaaaagtcagttattgataattttctatctcctctgtgtatggccagagtattagtagacagacaaagccaagaattatttttgttctcaataaggttaagccagtttgagagttataaaactaaaagtgaaattacatgtggacaggtaatagatactgtatgcttactattttgatactgcattaggtttaccttgtgttggatttcttttaaaagaaaaacgttttaagattagctccatccataacatttttttttcttttctgttttaggatattagaaatggctactccccagtcaattttcatctttgcaatctgcattt

SEQ ID NO: 587051 - DNA, 4001 bp, Homo sapiens
ctatatgctaagttatcaactcattaaaaaaaactttgtgaatatccttattgtttactggattgtattgcttcaataggtaaatctctaagaaatcttgatcatgtttcctgaataaattatgtctttatattggttcaattcatttgataattttgtttcattgtcttatgtaattccccaaaaggcataagataatcacagtacaaactggacactatattaactgaattcccaaattcatatacatttaaactacagtttgctgtagtgttaacatgagcaaattcaattcaagtttgacgctactggagaataaaactaattcaatttttattttgtggattacacaagaaaattttttaaaaaccctagaaataatacaacttttactaaattcacattttcagtgaaaaaaatctttacaattcacttgcattattttttccttcctaaaaagttactgtaaggtccacaaagtttagttaaaaatttcagtgtggggttataccccatctccaatatcaaaggccaaataaatctgggaaatacggggttaaatcaagttcaacatgatcttttgctacaaacattctcagagatagagccattagtacagtagtatttccctataaactgaaagtggattagattgttttcctcccccaaacatctctttgcatcttgaggctgggcttcaagggagacaatcctggaaatattgccatggattgtgaattacttggggttatcagtttttttttcttttgagacggagtttcgctcttgttgctcaggctgtggtgcaatggtgtgatctcggctcacctcaacctccacctcccaggttcaagcgattcacctgcctcagcctcccgagcagctgagatcacaggcatgcgccgccacgcgcagctaattttgtatttttagtacagacggggtttctccatgttggtcaggctggtctcagactgccgacctcaggtgatctgcccgcctcagcctcccaaagtgctgggattacaggcgtgagccaccgcgcctggtggggttatcaattttttttccattaattaaaatactggaaagcagccgaatcattaatgaataagtccttcaggtctaaagtaaaatgagcacaaaacaactgctgaaaatctgaaccaggttagatctaaatgaattgtttttaaatacaagaaaaaatggaaatgcagtattttaaatatgttgcttttcatgtgttattaatcatgtgagtactattaacatctccatgttacagatgagatatgtgagacaccaaagcttaaatactttccaagaggtcattaagctacagaatagtggaaccaggatctagcattgaagcctggacccctaattattatacgacactgcttgtctgtacttctgaataaaaatcagtgcttcagtagtttgatggaaatatatcgtggctctagtaattcagagtaacagaataaaaccttgttctccgcagagtatctacagccctaagcagaagactagtttataattctggctctgacactaaactttcaaggtcggttacctaatcattccgggcctcagtttcctcaggagaaaagtgggatgaaattatacctatgcgacctacctcgcggggggtgtaaattaactttgcgtgcacctttccacttcgcaggtttcacgtatcttaaatggtggttaatgttgttcaatgaaatgagatcacgtgaagtggggaaaagactgaaaaccacagaagcccgcgcaaactttactgttttaactgttaacacccaaacaggctcctgggcctcgccaccagccagcagtcctcgcgcaagaagggcattgctagctaaactgaactagcgccttccctccgtcttgccgcgggcgacgggccacgtacggagagctgaggactcactggcagagcggacaggagacacccaagcccaaaggccacaggtccaaggcctcacggcgaggctgacgcttctgctccagaaacaacttacggataaaaactcagcttccggtctttattgtttcgtccccggcggttcttacaacaaatcgctgcgcaatagcggggcatgactcgggtgaggcccctggagaccggggccggcgacggatgcagggcggccctcctcactgaggatgcgccacaggtccaggcctctcgagcccctgcgcctgcgctagcattctgccgggaaagccgcctcgtctgtcgactcacttccgcctcctccggtttaagcaccgccttttcgggggttgaagccggaagtggcgcacagccctagcagcaacaacagttttccacgtgcgcgtagggcgccgggatcacgtggggaggcagaagccaatggggaagcgtttcgtgtaggtcttctgaggtggtggcgccagcggctacctcctgcctgtgaggagctggctgagaggggactgggcgccggcggggaaggaggagcgctaggtcggtgtacgaccgagattagggtgcgtgccagctccgggaggccgcggtgaggggccgggcccaagctgccgacccgagccgatcgtcagggtcgccagcgcctcagctctgtggaggagcagcagtagtcggagggtgcaggtgagggacgaggccggggtcgtggggaggggagttcggagggtccccgtagcccaggcctgtctttgtgagctgacttggcctcggtgtccgccacggtcgccgcagggacaatgggctgcatgtttttggccgagagaatggaagaacggagacagccgcatcacagaatcgtgttttgggttgtggcgccggctttcacgggcgccggattagagcccgggtctcgggcagcttctgcggcggggcctgggcgggcagggaaagtgccagtcgcctttaggtgaaggttggagggtctagcccagccgcccaccgaggctggggaataaggcacgggctgctggctggcggggccgtcttggggatgagaagtctgtacaatacaaaactagtctgctaaaaaaaaatcattagatgtccaccttgagaccgtggaataacgtctgctgaaccagtgaggcgcctccctgtcagttttagatccgccctttgactagggagcaacctgcagttgacgcagcgtccatgggacacactgttgtgttccttaaaccgagaagtggttcttgattcttggtacccgtgactacgagtaactctctggaaataagtaatctacctgcctgctaattactctcaggaaaggccgctggagaggaagccaggcaatttccacaaaccgtagtgtttttcgtcagccttattatggcattataggttactaaggactctggtggtcccgtattcaaaaaacaggatccatcccttcgttttgaatctcaagtcattgaatacatattgtcaagaattctaagttaacatttctttaatggtttaaaggtaaaagaaatattttaactactgagtttgtgaaagtaagaatctgccttaaccacagtacaaactatcaaagttcatttttctggcagctttagcagaaatcttaaattctgttcatcatgagttttaaacaatatttagccatgcttcctggttaaacatttgggatcttacatttgggaaaaagacaacattctattgtattgtcagtattagtattgtgatattaagattctctatttgcagtccttggctcacctgctgaaatgaaagctgaatttttggagcgagattaataatactaatttagatatactgggctatttaccttggtgcgccaccttttttttttaatgttttttttttctgtgaagttaaatacattattactttcaggatatgaagtcttgaaaggaaagttgggatcttatattatttggttttctttttttttcttacaatgcttgcatatgatgaatcttcaatataaactggttaaaagtcagtt

SEQ ID NO: 587052 - DNA, 4001 bp, Homo sapiens
tattgacacctcagatgctgtacagtgaatgttggctgggctcttttccatctgaattattgcttggctcttgttactttgctagtataaatttcaactaggcaactactatttcatcctacactgacttacctaagaagctctccccaagcatccatatgataccatttaatggtaaattataatttgattaatgtttgtcattatgaatgtgcttttaacaagtaaaaccctagcttacgctaaattagagatcttcaaatcttcgtttcaaattgaagtaaattaattttatttcatttgaattcattactcaactgatcttcaaacttaaggtgttagcaagaataatcttgctttttaaaatgtgtatatgtttcatgtaatcttctaagacaaattgtgtactttgactttaaataaatttctgtttaatctcctcactaaatttctggatagctgcaacttctttaaaaattccagatatcgatagtgatgcaattgtagagtagactgagctgtctcttcagtagtggtgcagagatgggctgaagcaggaaaagacactcactccctgaaacctgtttgcaaccccatgacgaatacatactttccctttcaactacaacattctcttaatgtttggcatgaccaagttattcttaaattaccccctagctctaagcaacaggaataatcttttcccattttattcctatgaacatgtgaagtttcaggtcccctaaggaattctcaatgtttttttaatgcagagagaaagcgaacccgcagaaaaggggttggtaattcctcactccgtattgttttcctgcctgtcacggcccccgccagaaactccaagcattttgccaatgggtaatgatgggcagttagtagctgcttttgttgggtggttgaaaaacaaagcaaaacaattctcaaggaaggaagagaaagtttgaacccagacatcctaaaagttgtacactttaaaaatcctccgactcgctagttaataattgagttttcagtctttccctgaaggctcactggagccccatttgcctttaattgttggaaccgccctcacttggcttgtttctgaggtgtcccacatatcacaaagctaaagttaacaaattcaactctatatccacaaatgtcatgacagtgagcatattgctttgcctaaagaataaagactgagactaaactctttgcttgttctttgctagaaatctgtttgagaaactcctagtagaatgaaaatccaggggttaaaaataatgcacttcatcatggaagtgcgcgttgccctcattacagagctgcgagagaaatattccagctactcactgttgcctcttagttgttatgcttttctttcctaattgcatcggacatgacctatttgcttcctaagaaatcatactttttaccttaggataccagcataaccaagccatccaaaagcaccggggtccctacagaagcccaccagctccttaatgtggccccagatgtgaagatggggaaagggtaactccgtcccacttaccagtcttccacagatagagggtgggcgcctccgcctcgccctgcgccgcagccctgccggcgcccgggcgtagcagcagcagcaggagcagcggcagcggcagcggcagcggcagcagctgcaggacgccccggcgcggccccgcagcgccccggctcccggacgcccagcgcctggcttgcagccccatgccgcctgcagccactccagggtccagagccgtagcacgctcggcagggaatttttctccgctcttggaacgtcttttcaaagagtacagaaagcaaagctctttcctgctattgttcgcttcagatgagaaggagggagagcgcgtctaacaccagggaacaatagcgtccgcggtggtggccgtggccgctgccgccgccgccgccgcctctggcggggatgctgctgccgctgccattcctcgcagaatggcaggtcccggcggctccggaggcaactgtcctcagggggccccagctgactgagcaggtctgctaggtctgggaggcagcgcagcccccgccagctggagggggaggaggggggcgtgagcccaaaggagcagagggggctggaggcagagggaggcgagagcgcgagggcgagaaagggggcgagcaaaggggagaggggccagccaggcgacacccacctccgacatacccgcctaaagaactccggtgcacatggtgcgatgaaatatgtttggaaggatgcaccaataaaaagaatcatcacccggcagatttcagaatgacaaataacaggcattgatattcactgtcatccaaggagtcaaatgctagatctagtggcatgctattcttagtacgtatttacacaaagcatcagtgtttattatctatttttaagccatggcttctgaattactttgtgtggggagcagtatttgagatcaggtgtgaaaacacgagagcagaaatgttgacttgtcaaaatgcacttaaacccttctttaaatgttgtttttaacttaatctattatcaataaaaatatgagcaatattgatgctctgtgacaaattaaattgtcttttaatagcctttaaaactgaattagtgttaatgagtatttgcaatgctacctaattacataaatacaattgtacaaaaaaaaaacccttaaaattaaaattatatttcaggtatagagttctgtcccttcatctacttctttccctcaaaaatatgctacttctaagtattcagatagttgtgagtcaaactgagtcagtaatgctgtctggatatcttggaattagtaaattcttcatttaaaatttccctgacaccgatttttcttaactcttactgtagcaaaatgcctgtcgcaatctaaataaggaaccacatgtgtttgcatcttttgtcctttgtgttttcactttcttctaccagtagtaatagaagaatgtgtgtgaagtcggataatgctttcccctttctccttctccctttagctaataataatatattttattattaattcatttcacagtaaagctaaaatagtaggcatttaaccattaaaaattcagcaaacggaaagccaaagaaaactactatcccatcagcaattttcagccaaataaaataaaattttaaaagcaggaaaactactttttatgaatttactccaacatagctaccctagagtttaagatgaggaagctactctttctgaaagaggaaaccttccataaggctcccttgggacccttgtcattttgcaaagccttccagacacagcccctctgcatgcattagattaaaagcgggtttgatcaaataattcccaggtcctgcctgtttaagtattctgacatcagaggaaattagctacgttgaaggttgcaaatttggtctttgtttactttccgctctgttaggcctctaagaaggaattaaaagctcagagagcccgagcgctgtgagtctgtgattaggagagataagctagtgtggcttactatttcttcactcgtgaaaaacaggcaacaatcaaaagattataggttgataaggaataaaaaggaagcctgatcttaactaatgtatggttccctgaaggatcacttcttttgacagttacaccacagaaggaaatgggacctgctattgcttcctgggttctgtcgtttcaggaaaatttccatgtccactccacaaggaatcattttcccatcctttctgcttgtatttctcagctactgttagtgccctaaaccttgaaatcctctaactctggcacaggaagtatttcaaactggacatactctgctaacagcagccattctacgcattcgtgggaagcgccaatcaattcaccaagtgggaattcattatataacagaggacagagagtctgaggaattaagttaatgtgcaaggtcatttacctagcccttca

SEQ ID NO: 587053 - DNA, 4001 bp, Homo sapiens
aacactttgggaggctgcggcagtggattgcctgaggccaggagttcaagaccagcctggccaacatggtgaaacccagtctctactaaaaacacaaaaatgagccacgcatggtggcacttgcctgtaatcccagctacttgggaggctgaggcaggagaatcgcttgaacctgggaggcggagggtgcagtgagccgagatggcgccactgcgctccagcctgggcaacagagcgagactccatctcaaaaacaaaacaaaataagtacagatttttagtttgagaagatgaaaaagttctggagctggatgatggtgttggtagcacaacattatgaaggcacttaataccactgaactatatagacagttaaaatgacacatttggtgttatattttaccacaataaaatgttttgataaaaaagcaaaacaggcagggcgcggtagctcacacctgtaatcccagcactttgggaggctgaggcgggcggatcacttgatgtcgggagttcgagaccagcctgaccaacgtggagaaacccccgtctctactaaaagtacaaaattagccaggcatggtggcgcatgcctgtaatcccagctactcaggaggctgaggcaggagaatcgcttgaacctggggaggcggaggttgcagtgagccaagatcatggcattgcactccagcatgggcaacaagagtgaaactccgtctcaaaaacaacaaacaaacaacctatctaaaccaatacttctcattccattctctgcagagctgatctcccaagcagaaacttgagtaggtatagtgggtataaaggtcaactgccctctcaaattacaaggagatatgcacttgccctttggtaatcctgctccttctgaatctgttccacctgatcaagcaactggcgggcgcggagctgtagctccgtcagcttatcttttgcagcaatctcagggtagttgttggcatgctccccaacctggatgtcgagatgcacccgctacaaggaaacatggaatgtatgagtggtggggcctccagttgtctgttccagggtatggaacccactattgtccctggctgtggagcagaaggcaacatctgtctccccaattctgactgtgctacaaagtttcacaatcttgataaatcaaaatttggaaacaagtgagagattctaagctgaagccaaagagaaaatcctcttaccagtttgccaccagcgaagagagccatcctggtagaattggagtgcagacagatttgatggtcaccgggcgtgtgggaggtgaacgtgaagcggccctccgagccgtactgccgggacagcaccacctgcaacatatgtgagtgaaggccccacctttataccgcaggctctccaagtgcaagttcctgtcccttgaggcctcctccaggcagtgctttacaccccacgggagctccactgaagaacggctgcgtgggccaacgccagccttaccttgccgtcggggtccttcacttccacgtgcatgcccaggccaggggtcgagggcaggaagacctccttctgcttatcccacatctgggtacgatagttgcctgcggggcagacacatagtcacgaccggccctagtgggccgcctctccgcccggccccctccgacgtgcggcccggagctctaggcagggggcctggcgtcctcggggcaccctcaggctaggtactgggggagccagcgacccggctgggctcgggaggagggagcgccgccgagggctgagctgggtacaaagggcctccccaccctcagcccgcctgaccgatgaccatggtctcgtcggggatttcctcgatgaaacagcgcttctcggtctcgccgatgtggaagtagagcccctgggcgcctgtggcgcacagcgcgagaagcagcagggcctgccgccccatcgcccgcagaggcccagccccgacacctgccatcgcgcctcagcccctaagcgcctgcgcacatttgcgcatcgctctgcgcctgcgcgccaccctagcgaccctgagagttaggggaagaggacgcctgcgcagtgatatgtactcgccgtctcctgcaactccatccgtaccgaacactgccgcgccccgccccctcacacagcccggcgcccgcctacccccgcaacgagagtagagggcgcatgcgcaatgacgttcgcccttaatttctcgccccttaccccgcagcttacctccggcatctcgcaggggaggcacgcctgcgcagtcacgcccgccctcggccccagtcagcgatttgggtctcggagcaccaaggagacggtggacggaatctgaccaggcttggtggctacgatggcctgaagcgtgccttttgggttctcagctcgggctcacaagtgttttctgtgctaaatacaaaaagccctgtgatgttttgctttgcgtgtccacctatctgactcgtaagaaccgaggctgaatccagacccacactctgtcacgtcgggagagcctgccgcggcgagcctctgcgagcgggcatttcttgggtggggaccaaaagcccagtgctgccatagtttcggatcattcttttaagaagctggggccgggcgcggtggctggcacctgtaatcccagcactctgggaggctgaggcgggcggatcccttgagcccaggagttcgggaccagcctgggcaacatggtgaaacccccgtctctacaaaaaattaaccggtgtggtggtgtgcgcatgtagtcccagctacttgggaggctgaggcaggagaatcgcttgaacccaggaggtcgaggatgcattaagcagtgatcgcgctccagcctgggcgaccgagggtgataccttgtcttaaaaaaaaggtgggagagtggaacgaaaacttggaataagtagggtcatggagcttgtttacatcccctagttacagcacatccttttgaaagtgaaaaacaaactggaatgttacttagtgggcatggaatcgaagcaacggaaggttaaaactgtttttatcaaggccaggcgggcgcggtggctcacgcctgtaatgctaacactttgggcggccaaggctggtggatcatctgaggttagaaattcgagaccagttgggccaacaaggtgaaacccccgtctctactaaaaatacattttatcaacagaatttcgaaacttttatataatagaataattacaatgaactttcataaagaacttgagcatacctggattttggtatccgtaggggtccaggaattatcccccttggataataacggagggctgtactcatcatccaacttcaacaacagtttgctgcctttctcatttcatgtatccctttctgcatttttttttgaagtgctgtatattaaagcaaatcctggacatcatgtcatttcacctataaatacgtcagtgtgtgtctctaacagataaggactttatactattatcacacccaccaaaattttaaaaattatttaacatcacttaatacctagtatgtgtttaattttccccattgccttaaaaaattttgtacattagatatttagggtccaaacaaggtttacttactgcatttcatacaaatatatgtctcttaatatataacaattttggctgggcacagtggctcatgcctgtaatcccagcactttgggaggctgaggtggaaggatcacttgaggtcaggagtttgagaccagcctggccaacatggtgaaaccctgtttctactaaaaatacaaaaattagccaggtgtggtggtgcacacctgtaatctcagctacttgggaggctgaggcaggagaattgctagaatcagggaggtggaggttgcagtgggctgagatgatgccactgtactccagcctaggcaacagagtgagattctatctcaaaacaaacaaaaacagggccgggcgcagtggctcacacctgtaatcccagcactttgg

SEQ ID NO: 587054 - DNA, 4001 bp, Homo sapiens
gcagcaaaatttagaacactaacttcaaaaattttaggataagagtatcaaaataacaatacaaatgtaaaaatctaagtagaaataaataattagtactagtgcctacacaaaaataacttctgcaggtagataatgaagtaactttatacttaaggtcatacccttttaaagctgaaaagaacttaacagtcatataatacaccctgctggtattttcctgcttatatcctgagaaaaaataaagtgaaaaagtaaaactgaaaaataacataattatactccttctaaatttgatatgtcttttagcggttcctaaaaatagattacatacattcagacagatagtatttctttcaaaaattctcacttatttgattaaacaaaacagacattccaagtaagtcagttcatcctagagtatgaagaaaattttactttctagaactggcatgcctgataggagcctgcttggtgggtacaatgtgtgttgctccagtgctggatgcactaagggctctgacttcaccaggatgttgtgtatcaatgtagcaaatggcacttgtactccatgaatatacacaaaataaatacaaagataaaaaaataaataaaattcgcatgccatccacttgttgctgtcactcaaataaacagaatttaaaaaactatacaaatggtatgcaaacaaatgtaaaatgagattttcactctttcaaaaaaaaaaaactatgtatttataaaaatcactgcccacatcaaaaatacaaatgatttatgacttctaaaaaatcattgtcttaatcaacacctgtcagccacaggtaggatagggaagacttaacatcactgtccccacacactgtaaccttggggtctatgcggaacactagatgaattgggatcattgggccttatcagcaaggccttaagggcactctttctgggatctcagtcaacacagccaggctgtaagctgcatcttaactggagcgcgttgagaaaaaagacacagaaaggcagactcaagtggctctccgtttgagcctgttttctgtcctaatctaatagctgccatgatcgattctgctttagggtaggtgtttggacaagtgccagactctgtgagaaactgggaatcccttgccttctctactagattttccttagagaactgacaagtgtaaccacttttattcttgggagactcaatggtttaaaaaaggggtgctagaccctcttctgcaacctctgtgggctcagtgttatttattatagcggttccttagtttactgaaagtcaacatggatatcagactcagtttggagagaaaaaatatatcacagcactccaatttaaatggctcctgatcttctgtgtagacactggttttagttctaaaagggcttgagaactaaggaaacaagcgcctttgaaaagctccataaacaacacctagcacaaagcctactctgtaaagctgcaaaataagatcccggcaccacggcaagaacattcatcaacagcaaaaggaagagggccacctggcgctcaaggtgtgagggcctagaggcaacccagaggtagggcttgggccgaagccgagtgttccctggctgggcctcattagaggcgacacagcaactcgatcaccagccctgaccgccgccgtacctgcggctggcccagcaccccagcggcctcccctccttgtcaggcccggctcaagccgcggcgcagccgctcagcctcgctccggaaggggacctggggactgcacgtccggggtcgctcaccggcacgcggggcgctgcgcagtcccgggctgcttcggcgcggacagggccgaggacagggtcgtggagtccacagtcccgggagccggggggtggagcgaccggcctggagcgcgcggccgccgtagagctgggacgggggaggggtaggataacgacggcatcagcagaggccaagcgctgctgtaacctgcgtccgcgcctgcgcagagcgctcccggagggacacccctggcgtgcgcgtgacgcatgcgtccttcttcctcctgtttgagcccagaggcgtcgatcgtgtgagattgtgcgctcttcaggtttcattaccttcgcgtcccccagacttcaaagtgtccactgtagccacgaattacctaggaacagtcgctcctcctatttcccatatcagaccatttccttttgcaaagggtataaatgtgcaccatctgcctcagctttcagctgagcagcctcctcgctcacgcaatgcgagttgtcgctgacagtctggtccttaggaatggaataaactggtccgtacacacgccgctgacagcagcaaagctacctctattttaatttagaaactggccaactagaaggagacagcaagcggcaaggccgtagtttttgtttttgctcggtttcgtttcgctttgcccacgctgcccctccccaccccttaactctggtgctagttacaggtgtgtgaaatcccgtctcggatcccagtacttaagctcttcgctgtgggttggggctgccctcccccaacgtctaggtcatttcacttagaagataagaacaacgacaaggagtcgttttgagggatcaatgagatgccggtaataatattaagggcactctagtctcattcctgcggagagtttaacgtttaatgaatggtaggcattcttacagtcacaggagcaaggaagtgagagtcatatatttctctcttctaacaggatcagtgtgatcctgttagaatcagggaattctaacaggaattgggaaatgaagctatgtaaaagtaggaaatacaagtcagaacgatatacaatttaagaggattactgtagatccatatgtgagataatgagctttctcatacaatgttgtcggagatttaaaactcctaagttttctggcagacagtcagtatgtatcaagactattaaaatgttcacatcgtttggtccagcaattccaccctttcagaagtatcctaaacctaatgagaactctaaaaagatttgggtatgaggtgtatccatttaaataaactgaatgtccaacaagggacattgataaaatcattatttttcaaccgcttttatttagcccatattttccaaagggaagggtcagggtgtcttccattaacactgtttgaaatttcaaaattaataggttggttaaaacaaatcagaatcatgggggaaaatttttctcaaaattattgacagtccacctgtggagatatgatgttccccttggaattactgagtttttaaaattatggaatagccatctattgagtttttataaagccagtaaaaaccatcttataaggctgttatacgcggagtgatataaaattaaaatcaggatgcaaagtataggatatgaggtattgtaataggatgtaaactatattcacatatagataacatatagatataaatatattacatatctgccttgaaatggaaagaaatatacaaaatataaacagttgcctgtagtttgagagcatggatgttttttctttattattgttaaataggcaaatggttctataatgtaatatatattattcttaagtgaaaaagttacttttttctttaattcttaagggagtatttagtattttctcaacctcatcatttaacttaaaacgtgctggccatatagcacagttccttatccaaattcctggaattcacataggaataagtcttcctgggagaatgttgctgtaagaagcagttcagtagcagggttgggaacacagccttgggagccatatggcctgaaaatgagcccagcctgacagagatatacaaaatctctgtaagagtgggcaaaatacttagccttctttatacctaatttttattatctgcaaaatgaagatagtaataatgtctgtctcaaagggttatggatgggagctgatacctgcagagcaatcagtaaatatt

SEQ ID NO: 587055 - DNA, 4001 bp, Homo sapiens
aaggaggtagaactgtgcctgcccagggatgaggtggctgtctccccaaggcaggcaaggacctgggtgtcctcctgtgagcccagagacccccacagcacccctcctccaaaaacagactaggtgtttttgtttttgtttttgttttgagacagtcttgttctgttgcccaggctgaagtgcaatggcaggatctcagctcactccaacctccgcctcccgggttcaaaccattcttctgcctcagcctcccaagtagctaggattacaggcacctgccatcatgcctggctaatttttgtatttttgtagagacagggtttcaccatgttggccaggctggtcttgaactcctgacctcaggtgatctgcctgcctcggcctcccaaagtgctgggattacaggcataagccaccgcacccagccaaggttttcttagtctcagcccatctgctagttgtccccaccctacaaggacagactctttctcctaccttgagtctggagcttaggcccccagggccacctcctggaccaagcaggcagcccagagccacccctctatcctctcagctcctcctgcctatctagccttccagtacaggaggagctcaggttctcaggaatccctgacatcttcttcccaggttaaaggtcatcaggtttcaaccctagagcctcctgctctaaggccagccccactcccttcccctagcacctttggcccaaggattccccaagcactttgccctggtaggtgagtctcaagaaggcgcagcctagagatggggcaaggggcagtgtgaggagagccaagcaggggctgtggccaggacagcggcggccaggcggggagactgggtctgctcagtctctggggagaagcaccaatggcaggggccttggcagggccaggggcagctgggtttcaatgcccacaggaagcagttggaaccagtccaggagaggccaagggctaaccaagccatcagctggccagggctctactctgtctggatcttgtttctcatgcccaggaggggtcaccacgccccctcggaccccagcacgtgccacttctgcccacccacagccaccgccctcttccctgcctggatgaggccaacagcctcctcctccctggcctctggacagaacagccacggtggccctggggagctcagtccagacaattcctcccgtagctttccactggcctcggagggactctgatctctgccaggccagagcgtccctgcagggcctagccccgcccacccctcccacccgtcccacccctcccctggttctccttgatgcagccacatgggcctgtcaagtcccctctttccttccaaaggcctcggcggcgcgcggtatccctctgcctggggcgtcccccatccaggccgaggacacccccctaaacgctgctcccccgacctgggctgcctctcgggcgctgcccgctgcgcgtttgctgagtggctgacccaaggctgggcccgcccgtgtgtgactcaggcggccgctctcttctgggaagggacggggtcggggtctgggcccctttccaaggccctcattggaagccgaggtcgcccagcgcgatggggtcccgccggggttcccggacactggaggtggtggcagtggacaccaggaccaggggcctcgccccccttggcagtgacgccagggccccgacccctgacccttagctccccactgcctgacccagggctgcccgacccttgaccctgagccagcgagacgcggctcgggggcgacccggcgtccgcagcggcgctaacctggatgttctggaagtcctgctgtagatcctcccagtcccgcaggcagtcgcccagcgggcccgggggcgggggctgcatggctgcagcgccagtagccagtagtggaggacggcgcagcaaccccggcccacccgaggctcctccgccaccgcccccgtccgcttccgggctcgcgccgccacgggcaccaatggggaaaggccacgccccccaccccagccaatccgggacaggggcggggtatgggcggggccgtatgcaagggcggttgctagccccgggactcgcggcctggaccgggactgggacggctgcagcccccgggcctggactgcactgactgtgccagccgcgtggtgcagccagcagggctctggcccgtcatgctgagagcaaaccaaggtgcagggaggtgacacctgcttgcaacattttcgtccttgggaagctgagcctctttggggaagggagttagagctgcttctctcgcttggatttttacagcggcctcctttctccctgcctcacctccactgtcccttctcgcggccaccggactgcccttcccaaaacacaaggctgattccccatcatgttcatgcttaaaactttccagcggctgtgtcctgcctaccaggaggtccctaatcggagctctgcagccatcccgggctctgtcccaactcacaccctgaggaaagccagggctgtgtgtaaagccgttccccctctggcaaaaccccactcctccttgaaggcctgcccttctgttgaggggaatcccccaccccctcccacccccatccctccacagagcgcgctaagtggtgggacggcattcatctctctgttcccagccccacccacgcggtggcagggaatggttgccgaatggacttggggaaggtcctgcatggatggacatcctaatcccctaccagtcccctagtctgtgccgtctcctgatgcccagtttgttctgtgggtgctgccagctttggagaagtgcatttggaaaacaacttccaactgggtgccgtggcccacacctgtaatcccagcattttggggaggccgaggctggaggatcacttgagcccagaagttcgagaccagcctaggcaacagagcaagaccctgtttctacaaaaataaaaataaattagccaggtgtgatggtgcatgcctgcattcccagctactcactcaggaggttgaggtgggaggatcgcttgagcccagggaagttgaggctgcagtgagccatgattgcgccactgcactccagcctgagagacacagcaagaccgtgcctccaaaaaaaaggaaagggggtaaaaaaaaggaaaacttttaagaccttaggaatttctagaaacgtggatagggagatgggggagggggtgagaatctctccttggtgaacacagccaggcagaaatgagtggggagcagggaaagaaaatctgtttcaaggggtggatggcaggaagcgctggggatgaggcaagggtgtgatcccattctaggagcctgggggctagacaaggctgggcttggtatctctgggactaggggactgcctattggtggctattgtgacatcctctgtgaaccaacacaggcaacctctgggtacccccaggcagcctccaaagggtctaagtcaccagggggatgcagggcagctgctctagcagccagatgctcttccagaggcagcctcaggggtgcagttgggatggcccgcgacacctcagggatgcgggttcttggtgaacctgagcagggcgcatcagctaggtggcgtgaacaggcacttgggaagaatcagtacaggaggctaacatgagactttcaggcagcaaaggccttctccttccagacaagcctgggtatacacactctggccctccacccacaaaatgcccccaggtgaggctcttcagtacccttcggtgggcctcggagaagatcagtagagcggatccatgatgtttgtgatggaatctccaaggatagtcttctcccattccagcagctggctcaccaatccccgatttggacacatgttgtttttgcacttcttgacataggcccaggacctctatgaatacaaagagagaaagtgaacttcacgattggtcctgggccctttccacttggatcagaggcagctttca

SEQ ID NO: 587056 - DNA, 4001 bp, Homo sapiens
aagccctatctctactaaaaatacaaaaattagccaggtgtggtggcaggcgcctgtaatcccagctacttgggaggctgaggcaggagaatttcttgaacccagaaggtggaggttgcagtgagccaagattgtgccactgcactccagcctgggtgacagagcaagactgcatctcaaacaaacaaattcatctttccatgtttgggagtccatgtgacatggagttggggtatggagcagccaaggcagaggtttaggggactccaagggccccccaagtcacccagagctcaaggggcaaaagcaaaaagagatggggcactcaccccaaagcttggcccatggaagaaacacctaccttttccagcaacacagcatgtgcagccctgaacattctagaaaatggctacaccagtcctttcacacagaatatgcagactacccaaaacacttccaaagagtacctctaaagtctggataacacaacccagaattaattaatagtccagtacatggacttctgacttacaaatccctgattcatggactccagaaaggggaagggtagaaaagtctccccgacgggtgagggagaagatgtttcccaactccactcttagccactgtgattttgaccacatcaagggtgcaattggctagaatgggaaccacacatgatttccaaataattaattcacttttgttattattttctttttcttttgcaatttaggacacattgaaaatctctgacacaaatcaacctgatggacaagagacccctttcctgtatttccaggaggaaataggtaatcttgtccaagtgcaattcccataaaattcgtctaattcatccctgagttgcaggttttctttgacctcatggtttttctttcacaaattttcattagatcccttgctctctctctccaccgctcttttatgaggggggagggggtgaaaagtggtggatagtattcaaccttcttagctgcccacgtcccatctgtccctcgaatagtcttaaatctgggtccttttatggttcccaaaatgtggcagagaggtgggtgctggctttctggcggtggggaagtgggggcagtagacacacaaccctgcttcccccactcccccacccacacacacaccccaggaacctgtcagctccgggtccattttggaaatcaccaccagagaggaaatggcagcctggcctcctgggctctaaattcgcatctccccaaagccagcaccaacacggtgggaaacccctctagatgaggcgacattttaaggcaaaaacgttgcccatcccgtgctccctgggggactggggaattgtggcgcgatgacggaccctggcgcatccccgcctccctgcctcgtcctcccctcccttagcgggtgcatggtccccaggcatcgacggatgcgccggccacccccgcgcggtttccagggcagggccagcctgggggggtggaagcaggaatccagggggtgcggggagccccctccagtgcccaggcgactttggggaacaaggatgaaaggagaggggaaagggcgctgcagtggcctcagccgaggagggagatgcgcgcagggcgcacggtgccacctccgcaatccctgctcccgggcccactcgcccgctgagacggttccaggccccgggcgggctgcggctgcagggaggccggattgcccagcgccttacctgcggccacccctgccggggcccagggcaggaggcaggcaagccagaggatgcggccgaggcgcgaccacactgcctgggccattgcggggcccggagcgggagaagcgtggggcggacgcggagggaatgcagctggagctcgagaactgcggcggtcgctcctccgggcgcgcagcgcgggcggtgcggggaggtgcgggcgccgtgctcgctcgtcctcgccgggggacgctctgtcgctgcgcgccgccgccgccgcccacagcccgctgcgcgaccccggcccacgtcagccgcgccgcgcgccctcctcctcctcccgccgccccttgctcccgcgtccctctccacggccgcgtcctccctctccgggtctcttcccacggccgcgccccctgccctcctggagtccacgatcgcccctcccagcttgcttcccctctaggggttccagagctcccttcctgcgccctggctcctccccgcatccctccccaccccaaatccacccccggccgcatccttcccctccactacccgaaaccacgccccccgcacccgcatttttcccttcccccgagcccctccccgccctggatccgatgccgccggctctgactcagcgtccccaggggcgtgcgctgcgctgcaagccgcctgcaggtcccttggggctctcctccaggtgccttctctctgcacgctcgtggctccgagatgctactcctcattcaagaactgttgagagcttaaggtgcgccaggcgttgggcgaaaggcctcgaaattcctcttgctgctgctgctgctgctgcttcctcttttcttttttttttttttttaatcttgagacagagtctcgctctgtcccagaatggcgcgatctcggctcactgcaacctccgcctcccgggttcaagcgattctcctgcctcagcctccctagtaagatgggattacaggtgcccgccaccaggcctggctaatttttgtatttttagtagagacggggtttcaccatgttggccaggttggtctcaaactcctggcctcaagtgatcctctcgcctcagcctcccaaaatgttgggattacaggtgtaagccactgtgcccagcctcttgccccttcttgatagaggggcctgagcacccggcccctgccgtgggcttgatgtcatcccccggtttaccctctcacagctgctgttaagatggggctcctgctcgtatctgggcccagggcaacttctttgtcactgagggccttgtgggagtcaggctactgcggtgaggggtgaccagcctacacagttactgccatttgccttagaggagcagggctgggctctcctagaagctggaggggcctggctggccttaaacgctggaagcccggtgggttctggtcccagctatgcttccgctttgctacggctacctgggcgagggatcctcccacacagtgagggcctttgacctcctctctggcccgtggagcacggatggaccatcactgcaccacccagtgcattgacatcaaggcgtctaaagcaggggtctccaagcccctggccgccagtaccagtccatagcctgttaggaactggctgcacagcaggaggtgagcagggcctgtgagccacgctgagctccacctcctggcagatcagcagggcattagattctcataggagcgcaaaccctactgtgaactgctcacgtgagggatcaaggttgcgtgctccttatgagaatctaatgcctgatgttctgtcactgtttcccatcatccccagatgggaccatctagttgcaagaaagcaagctcagggctcccactgattctacatgatggtgagtatgtaatcataatagaaataaagtatacaataaaagtaatgcgcttgaatcatcccgaaaccatccctccaacccctcattcgtggaaacattgtctttggtgccaaaaaggttggggactactggtctaaagggcccctggctctgggacagctgtgagcttccctaagaatgggccccactggccccactgctatgttcagggaatggagggagaatagatttgagtgagcccctatgaaaagttaaaagggctagacagggcagggcatggtgactcacacctgtaatcccagcgctttgggaggccgaggcgggtggatcacgaggtcaggagttcgagaccagcctaaccaagatggtgaaaccccgtctctactaaaaatacacaaattagccagactcggtggc

SEQ ID NO: 587057 - DNA, 4001 bp, Homo sapiens
aggcgctggaaaatgttagtcaaatgaacgaggtctggtgtggagagaagagaaatcttgggagagtcatttaagggggtgcccagttgtcctcataaaaaacactatcatcatcagggtgaccaaagcagacatcataggcagggggtggagtcagaggctctaatgtggggactgccgccaagctctgcagatcaggagcagtggacacagcccgtggtccccgaagccgaaggttgattggagctcttccagggcttccttcctgggccatggacccctctgaggccattcgcctctgttccagtttggctctcctggacccctctggatggctaggttgttcctcctcaggtgctgggggtatcacaacagtgctgtaggggggtggttggtccaactcttgggggcggcactgggattctagtcccaccacggcctcttcatagactggcacttcaaaggcttcattgtccctgagggaagagaaataaggccattggtggcttccatgaaagaagccctttttcccttttttttgtctgctgtgggcaaaagatcctctgttggcctctgacccctcctcccgctgatgccaatgacaggaaaccagagactctctgcctcagagactacagggagagagggaggatgggcccaaggtgtattcctcttacgatgcccacccttaactcaccgtgcattgcctgagggccctgggctctcagtctgcattgattggagctgggaccgaagcccccattccagaaaccggaccaggagataggcaaacaagaagaagccacccaatgtgagaaagaaataagcaacgggggtgatgtccgtctttatgcccagcaaagccagccccagtaggaaggaggcgcagcacaggaggagaagcggcttctccagtctccccagtaagtgcattggcaccatggcccctccccaggctcctgcaaaaagacacacagctattgtgtctacactagcaattggtgtcatggctgtgtcagataccaaagtaaccatatgatatttctttgtttggtttctaggttcttcaatctcaaataaatcatctgtagagtcccctccagttccgaaattctctctatgtcttggagtgtgtggaatagccaggaaaccagcccaggagctttgactcccagccattctgtaagttgactgtgtcatggctctgccttctttcctttctccttccctgtagtctcccttccagctttgtcccttaccaccatccaggatccggtcctgggcacgccctgcctggggcttcagtgcacactggcatctctggaattcaggtgatggggcaggccctgcccttcctctgttattgctcctactggatctccacccccacctccccagccagaggccctcaatccagccccgttagagagaagaggggagggagccccacttaccctgtctgactctgtcttttcctttcctccggtgttagcccatgctccaggtggagggagaaagtgcacacaggcgcaccaaagccacagggacacaactgcttgagaaacaattgtacaggcaaaggcccagcacaatggccggaggccctgataactcctgtcctcttctagaccccacatctgccagggccctcctctaccctctgctgatcctaacttgttaaactcagtttgcaaatttcctgccaggaggtagcccagtggctgggaggcggtgggcaggggaactcttttctttccttgtaacagcaacaacccgaggcagcccataccccagaaacagcctgtcagaagttgccagcgctctgtgtagcaaggaattgcagattccctcctcacacctcggtcccaatcccatgaccctcccgaccctcgcacccacacctgtctcagaagttcgtcgctcacctgtctccacagactgtagaaagtagatggggtggggggtggtgggaagggccggagcgggtaggtggagcccactggccccaccctctttttctgtcccaatccctgttctggcccagtcagtctccgccccttttctccctaaggctgacttccaactgctgaaccttgatttgttctggtttttactctctccacccacccatgctgtaccctaatgagagtgcacccctgactcccaatgatctttgtacttaggaccggagttagcattaacctttccctctcggcgcatattgtatgttaattacagccctgggcagtttgccttctatttgggtaatttaccttgtgcgtctctcccaagtgactggaagcggagacctcggcttatttaatctctgtagatcatcacacagtgcactgcacacagaaagtaatgctgtgggcatggaatggtgtgtcctgcttccattacccaagtgctatttttatggactccctgtattctgcagacctgtcagaagtgttagtgtgtatatttcttgacccagttaactcttgagtcttcaagatcctcctccgaggtgatgctgctttggagcctgctccagtgtatccacatcgttccttcctaaatttgtcccagcatttacctggttatgtagcatttttctgcttactgattttccttccactgtgagtttctcaaggtgcgtgattagttttaatcatctctgaatcctggaaactaacatggttcctgaaacgtggtaggtcactaactagaaggctcccctctcaccaggcctcaccacacctgtgaagatcaaagagctgttctttttagttgtgggtcaggcagttaagtcggagtagggtaggtgcttggaggtagagagtgagtagaagcatacttggtccttgagccagagggtgaacaaaactgggccccgttccttcagagggtgaccagcagacagaccgagggaagctgcagaccgtgggcacaaatccaatccaggctccccagggacagctggggtggggaagcataggagagggtgtgtgtgtgtgtgtgtgtgtgagagagagagagagagagtatgggaatgagaataactgtgtctgtagtggtaataagtgtgggcactggtgggatattgaagattctctgtcccagagccccagatcgatagcagagagaggaaggagacattaacaggaaggctgtgggagtctaaatgaggtgtgtctctatgcaaagtaggcacaggagtgaggggggctgattgttgttctgtttcagccaatttcctcactgttctgctcataaggggaaagtacagctggaatcaggactgcagtctacagttaacatatgaatagaaggaaattggccaagggtcattggtgtgtgtgataggaaagggggtttgttaaggagtgagttgtgggaatgggaaggtgtaggctaagaggcacggggccaaaaggtatgggcctgaggtgtaaggggagagtctgggagaggcggacctttgtagcttaagtctcttggttgccggaaggagagtacgatagacaagaactggatcccaactggagaggctagactggtggctggctgtgcccgttcatacattctcaattccagtaatgtaaaatcaatttttaaaaattgcatttgttaaaagaaaaaacatgacaatatttaaaagctaaagaaaaaaaaattgtctatcttctcattatcctaacacggccatttaaaacgtttatatatttcttccagactgtccacatgcaaaccagaatatactaaccactttgtatctttaaaaagttttatactttatattgtatatatttcaccctgataaagaccttattgtagtaatttcaaacagccatgtaatatttcattgaatcgatatgccataatttgattaatataccctcatgatacgttgctcaataacactgagcctatttcactcaatatttttggccattaaaataatgcaggttgccgggcgcggtggctcacgcctgtaatcccagtactttgggagg

SEQ ID NO: 587058 - DNA, 4001 bp, Homo sapiens
aagtccccatttatgatgtccaggcagaaacacttgtttctgacacatagtaggcgctggaaaatgttagtcaaatgaacgaggtctggtgtggagagaagagaaatcttgggagagtcatttaagggggtgcccagttgtcctcataaaaaacactatcatcatcagggtgaccaaagcagacatcataggcagggggtggagtcagaggctctaatgtggggactgccgccaagctctgcagatcaggagcagtggacacagcccgtggtccccgaagccgaaggttgattggagctcttccagggcttccttcctgggccatggacccctctgaggccattcgcctctgttccagtttggctctcctggacccctctggatggctaggttgttcctcctcaggtgctgggggtatcacaacagtgctgtaggggggtggttggtccaactcttgggggcggcactgggattctagtcccaccacggcctcttcatagactggcacttcaaaggcttcattgtccctgagggaagagaaataaggccattggtggcttccatgaaagaagccctttttcccttttttttgtctgctgtgggcaaaagatcctctgttggcctctgacccctcctcccgctgatgccaatgacaggaaaccagagactctctgcctcagagactacagggagagagggaggatgggcccaaggtgtattcctcttacgatgcccacccttaactcaccgtgcattgcctgagggccctgggctctcagtctgcattgattggagctgggaccgaagcccccattccagaaaccggaccaggagataggcaaacaagaagaagccacccaatgtgagaaagaaataagcaacgggggtgatgtccgtctttatgcccagcaaagccagccccagtaggaaggaggcgcagcacaggaggagaagcggcttctccagtctccccagtaagtgcattggcaccatggcccctccccaggctcctgcaaaaagacacacagctattgtgtctacactagcaattggtgtcatggctgtgtcagataccaaagtaaccatatgatatttctttgtttggtttctaggttcttcaatctcaaataaatcatctgtagagtcccctccagttccgaaattctctctatgtcttggagtgtgtggaatagccaggaaaccagcccaggagctttgactcccagccattctgtaagttgactgtgtcatggctctgccttctttcctttctccttccctgtagtctcccttccagctttgtcccttaccaccatccaggatccggtcctgggcacgccctgcctggggcttcagtgcacactggcatctctggaattcaggtgatggggcaggccctgcccttcctctgttattgctcctactggatctccacccccacctccccagccagaggccctcaatccagccccgttagagagaagaggggagggagccccacttaccctgtctgactctgtcttttcctttcctccggtgttagcccatgctccaggtggagggagaaagtgcacacaggcgcaccaaagccacagggacacaactgcttgagaaacaattgtacaggcaaaggcccagcacaatggccggaggccctgataactcctgtcctcttctagaccccacatctgccagggccctcctctaccctctgctgatcctaacttgttaaactcagtttgcaaatttcctgccaggaggtagcccagtggctgggaggcggtgggcaggggaactcttttctttccttgtaacagcaacaacccgaggcagcccataccccagaaacagcctgtcagaagttgccagcgctctgtgtagcaaggaattgcagattccctcctcacacctcggtcccaatcccatgaccctcccgaccctcgcacccacacctgtctcagaagttcgtcgctcacctgtctccacagactgtagaaagtagatggggtggggggtggtgggaagggccggagcgggtaggtggagcccactggccccaccctctttttctgtcccaatccctgttctggcccagtcagtctccgccccttttctccctaaggctgacttccaactgctgaaccttgatttgttctggtttttactctctccacccacccatgctgtaccctaatgagagtgcacccctgactcccaatgatctttgtacttaggaccggagttagcattaacctttccctctcggcgcatattgtatgttaattacagccctgggcagtttgccttctatttgggtaatttaccttgtgcgtctctcccaagtgactggaagcggagacctcggcttatttaatctctgtagatcatcacacagtgcactgcacacagaaagtaatgctgtgggcatggaatggtgtgtcctgcttccattacccaagtgctatttttatggactccctgtattctgcagacctgtcagaagtgttagtgtgtatatttcttgacccagttaactcttgagtcttcaagatcctcctccgaggtgatgctgctttggagcctgctccagtgtatccacatcgttccttcctaaatttgtcccagcatttacctggttatgtagcatttttctgcttactgattttccttccactgtgagtttctcaaggtgcgtgattagttttaatcatctctgaatcctggaaactaacatggttcctgaaacgtggtaggtcactaactagaaggctcccctctcaccaggcctcaccacacctgtgaagatcaaagagctgttctttttagttgtgggtcaggcagttaagtcggagtagggtaggtgcttggaggtagagagtgagtagaagcatacttggtccttgagccagagggtgaacaaaactgggccccgttccttcagagggtgaccagcagacagaccgagggaagctgcagaccgtgggcacaaatccaatccaggctccccagggacagctggggtggggaagcataggagagggtgtgtgtgtgtgtgtgtgtgtgagagagagagagagagagtatgggaatgagaataactgtgtctgtagtggtaataagtgtgggcactggtgggatattgaagattctctgtcccagagccccagatcgatagcagagagaggaaggagacattaacaggaaggctgtgggagtctaaatgaggtgtgtctctatgcaaagtaggcacaggagtgaggggggctgattgttgttctgtttcagccaatttcctcactgttctgctcataaggggaaagtacagctggaatcaggactgcagtctacagttaacatatgaatagaaggaaattggccaagggtcattggtgtgtgtgataggaaagggggtttgttaaggagtgagttgtgggaatgggaaggtgtaggctaagaggcacggggccaaaaggtatgggcctgaggtgtaaggggagagtctgggagaggcggacctttgtagcttaagtctcttggttgccggaaggagagtacgatagacaagaactggatcccaactggagaggctagactggtggctggctgtgcccgttcatacattctcaattccagtaatgtaaaatcaatttttaaaaattgcatttgttaaaagaaaaaacatgacaatatttaaaagctaaagaaaaaaaaattgtctatcttctcattatcctaacacggccatttaaaacgtttatatatttcttccagactgtccacatgcaaaccagaatatactaaccactttgtatctttaaaaagttttatactttatattgtatatatttcaccctgataaagaccttattgtagtaatttcaaacagccatgtaatatttcattgaatcgatatgccataatttgattaatataccctcatgatacgttgctcaataacactgagcctatttcactcaatatttttggccattaaaataatg

SEQ ID NO: 587059 - DNA, 4001 bp, Homo sapiens
acaaataaagaattgcacaggtttaactattctaaaataaagatttctattcaccaaaaacaacataaatataattaaaagtcaatgagcatggaaaatatctaccacaactatgaaatgattaatgtacttaatgtttaaaatgtttacgcaaactgtcaaaaaacattacacctcattaaaaatggacaaatatgaagagataattcacaaagaatgcaaagtagttaactaacatgaaaaaaaattctgtaacttttctaatgtaattaaagatacgccaagtaaaaaaccagagtttccctatcaacactgtaggtaaaaacacttgatgataccaaaaatatggttaaactggcattctcacacaatgatggtggatgtgaacatttgtacaaactttcagggaggcagattggcaataaacattaaaaaccctaaaaatagtcatatctctttggcccacttttataaatctatcctaagacagcaatcagaaatccagtcaataatttatacataggaatgttcagcacagcattacttttggcacaaaatgggaagcagcttgaaagtccaatatcagaagtaaactatgatgtatcaaggataaaatactatgcatcttttagaaaaagcaggtataaaatcactctacatagtgtgactacatccatataaagaggcataggagaaagagactaaagaagtatttgaaaatgttaatgttagctgtggtagctctgggtggtgacattacaggcaattgttctctatttgcagtaaaatatttttagaattatgtgctacatttatgaaaaaaaaagaaatttataaaacaggcattcaaaacagccttagtaattagataaagcagggactaagctggaaagaaagttgagaaaggggaatatgtgcaagattgaaaaaatatctcatggactgagtctcagacctgagattttggggaatggggtatggtaagtggatactgaaaaatgctcttcagttatcatgagggaagaaggaaatatgtgtcttttccctctttcaaaggagcctttgattttataggcgaagaagcatagtggaagttattagtgaaactaagcccacattaaaaaaaatctcttaaaatatgcatcaagagaactaaaataccaccatggatttccactggggcatgaggagcaatctggtctaatgactaacataagatctaaacatctcttaggtcccattctttgaggcaagaacacaagtttttctgttgatattaatcttcagtgtgtattttaaagttttatgatgtgttcgtaactaccattgaatagtggtttagttagtgttggtcggtgacctgcttttgtttacctatttctgatgaacagtgtattgcacaagccacagccatgtccttgtacacactgcgtgcaagactctgctgtgtgcagtcagccctgcatcgtttctaaccagttatactggccttactttcatcatctttgaggccagagctacacatgttgatgccgaagagtggaaggaaggagagcagagagtaaagggggtagattatgtagattatacagacatgagcgagggagggtcacagatactgaacaaccagtgagttcccctatgtggattgccagaacatgaaatatctgagaagaaaacaaaattgtcttacaaggtagtagacgtctgggtaagctgtgatgcttgcaggatcggtacttacagaaaggaggtgcagagaccacaggaacactcatgaaaaggagaagcaggaaatcagggttggttgtttgaatcttccttctcgctggctttctaatgtcagactccagaaaggaggagtggaagggaaatggcaggcagatgcagtcctgagctggtgcccccttgccttcgcagtcgtgcctagtaaacagctctctgaactttggtacatttgttctgactgatgtcactatcagctgatttcactttcgtttcctaacttgccagtggcccatgacttttcagaaatgaggtatgtaaacaactttttattgtccattatgacatactctttacctacactgtagccggcaaaccaactgatttaaagagccaggtaaatgtcttgattatatcacacaataattccagaaagggaaggagccaaagaactctcgaagctcccagtgatttaaactgcaagataaacacaacccggaattttattcagaagaaacccatcaggatcatctggtccaagctcccagccagtgtggcagtcaggacccaggtcacctcctactcatttccttgggaagcagctatgccgtctgtcccccaaccccttttagagatcaattttgtaatgatgactgggcttctctggacacaaaactttgtgtcctgagcattctcactgcagtgtttaggcccatgttggagcagctggaacatctattttatttcaaaataagagccgaacaaagcttttatttttgtaagcattggggctcctggccagagtttaaaaattgcttccgttgctcacatgaccaactggaaatttcaactgtgggttaaacttggttacatgagactgctacctagtgctattgctgaatccttcagcggttctcttctgcttccttgcccttcctccaaaggaggagttatttgaactgctacattgccctccccctgcccctagttcttttaaacgcaaactctagaaagaggtgatgggatccaggaggaaggaagaacagaggctttgagatcagagagttctgctacatactagcaaattatttaatctctttgagcatcaatttcttatctgtaaaatggaaacagtacctactttgcatggttgctctggggactggagataatataagtgcttagtacaatactgggaccatagtaatggtagctattattatgaaaagtggaatttctgtatatttagtctagcatccatattaatgcctttaagacagaaaattaacttttagatactaatatacagtagttactctgaaaactcaatactggtgagtgaagtgatatagaagagatagaaacatatttatatttatgaaatttattcaaggttatcatgtacctagttttcaaagagtcagtttttcaaaacttacgaaaatcggcagtcccacactctccctttcttcctcttcagaggcaagcactttcacctgtgctcattctttaggcatttacctcagttctctaaataacatgcttggattggtacttcttgatttttcagtttcaggcataatctactgactcccaaccataaaaggtgaagatttagctttcttcttccccactgcatgttccagaagtatgcttcctctcttcctcctctatccaaattggttatagttttgtttaaatcaatattcagtgtttacaatattggaatatgcacaggtatactttattttattgtgcatctctctttgtggatcctgcatcttttacaaattgaggatttgtggcatttttgcatcgagcaagtctattggcaccattttttcaatagcctttgctcacttcatgtctctgtgtcacattttggtaacttttgcaacatttcaagctttttcattattattatgttggttatggtgatctttgatgttactattgtgattgttttggggtgccatgaaccgcacccatatgacggtgaacttaattgataattcagttctgaccgctccaccaactctgtgttggtgttctgaccgtgtgttctgaccactccaccaactggacgttcctccatttctctctcacgttaggtctccctattcctgagacacaataatactgaaattaggccaattaatgtccctacaatggcctgtaagtgtttaagtgaaaggaagtgtcacatgtctttcatttaaaattggaaactagaaatgattaagcttagtgaggaaggcattgtgaaagcaaagata

SEQ ID NO: 587060 - DNA, 4001 bp, Homo sapiens
gcatccatataatgcaatatatgcagttaccttcctatggaccaaaatcaacatggcagattgtttttaaatggctaatttacaaaactcttccccattctgatcttcttcaaaagacagcctgagttagagaataacagaaaaacattacattccttttcaatcggtttgccgtcactaatgattcaatggacaattattccagaggtagatgaaaatggaccatagaggagtcaatatgcatatgggaaaagctaaccaatcactgccagagtctgattatttcataaaaccttacatactattctaaccctcctctccaccatcatctacatttaatcctcaccaagtcctgtctactattcttcctaaacattttttaaatgtttctacttctcgtccccagggtcaccatcccaattttggccaccatcatgttgaacatttccctgtatccactcttgccctctctaagaagtgtactttttaaaaccaaaatttagcactccactatgtaaaatgctccaatggcgtcccatcacccttagcaataaagtcaaaactccttacagtgccttataaggcactccgtgttgggcctgaataactctcctgccttatctgttaccagttttcctctcacactttattttccaaccttactgacctttcaattacaaactgcacaaatgctattcccttgccaggtacactccttttcctcctcctggccccaccccagtgctcacacctggcttattccaactcttcaggtctcagataaatcattttcttaagagattatccctgccccctccccattacatgacccccatactttctctgttacataccatcacttatttcatgtctgcatttcccactagatcaaaaggtctctgagggtttgtcttcaatactgtacacccagtgactagcaaaaatccggcatcaagaaggtattcaataaatacttgttgaaaaataaagactaataaagaaataactacatttaacaacaatagtcaccattggacacttactaatgcctaaagagaatacagaacttagctatatcccacaactaataactagtagaactaagggagagtccatgaatgtttggtttctatttcagctttccaccagtctttacttaattcacccaaattcttccaaaccaattctctctccatgtcctacctctagggaatggcttgaggcataccgtatcacttgcattatctttcactcagaaactctgtcccatctagaagtgtcaaggctgaaagaactacactgaaaaaacagggaatttcagtgcttcagttctgaattactgataactctttgagccatctcatacgaggaaaatgtcatctagaatatcaaactcctcagcactagagcagcaacagcaatttctctccctttcggcctccttctagcgagatgtgggaggtccgacaaggagcttggctgttctccaccatcctctgcctcggagaacgcgaccacaacgtggcgcccagttgagggggaacccttgcgaaatacggagaggcgctcccacaccctccaatctccaaccaccactgtcaactcctccagaggcaggtatcctaccccggccctgggaggccgactgggcggagcttggggtccggaccacgcggagccctggcagtgtctatgcctagatctcgccgccctgccgtccacccatttctccctacctgactcggccgtcgccaccaacgcgctctcccaaccctcggagtcagttccaaaaccaaaccaaaaaggaggagagcagacaaggcttcagcctgcgactgagaacagggaggcggcacgccttggggaacgagggcccgaggccatacgcgctaatacaggccagtgtcggcgtaaactttctccgttaccggcccggccgcgaccgccatgtttccgccgccgaaatccgcgacggtacggaacgccgccggggtcaaactgcgcggcgcgcctccttcccgaggcccggccccctccccgcccaaacccgcgcgccgccacacactcaggtgagcaaggcgctgcgcgagtgtcaactgccccacctaaggcgcctgccttcctcaagccaaagtcgactcctgggacctggaatcagcagctgagaacagacagcgggaagaccaccaaagatcaggctgacagtgcccatcaagcatctaggccaccgcctcgggctggaccgaacggggacagggtggacaggactgccacgcgtgggctgtaaatactgcgggaggcgttgctgctcattaatatatatggcataatatatggctttgtaaccagctaaggcccaagctccttaggccctccctcagacctttcagttcctcaaatgcagggacatgtcgggttttgctcaacattaaatcaccttagcatagtgcctgacacatagttggcacttaaatatttgtaaaataataatatgcaataggctctccacgatccgtagttctctcctcccacttgttttgcatgtattatctatatatttttcctattttccataatagagtgtgaatttcctaattttcataatagatgttgggggttggtgtggccagcacatctataggaatgaacaactctcagattgagattctgcatatgtggatgaaaattttgagttagattctctctagactcctgattttaaaagcaatcacaactcaacttcccaaatctgtaactagctctctggggaacacgagtgccacatttccaactacctgctagatgtttctactcaaatatattgtcatcacttccaactcaacttgcctttaatggacatttatatacatttattatgccccccatttgaatccccttccgtatttggagaattccccacctgagttaagagtctaatggctgccgctgaaatgctgaacacttgtttaactaatcatgtgtacccgctggaagccatgagtcaaaaaaggcacagaaagctacactcccaggtcacctgtaggagtatagcaagtgtagagatcgagaacccatccctaacagcaaggtaagcttccgaggcagtagtgagagtgctggcatccaccattaacatgtcagagatgcaagatgcctgtgcttggtgagggtcacaaccccagagccctttcccaatctgttctgtagcctgttaacagtctctgtgtacatttctgggtagcctgtgacagactctgtactacatagctgtgaggcaggacaatagggtctggaggcaaggaacttacggctgattcatgctgactttctagaactaaatcaaaaggaaagccccaactttccacagctaagtaacaaagggacccggccccctcccccaccaccgcccttttctgcgtggcagacggaaaattgaaagtacctcggattggttgctttccataactaattaaatgtttgcatagggtgtaacctttgtaacttcgcttcaggctctgattggttgctttccgctatcagactgattgtgggccactatatttgcgtggggtgtacaccaagtggccaatgggaaacctctagagggtgtttataccccagaaaattctataacccggccgccccgctcttgagccccatgttccggctcttcacaccctgtggagtgtactttcattttcaataaatctctgcttttgttgcttcattccttccttgctttgtttgtgcgttttgtctaattccttgttcaagatgccaagaacctggacaccttccaccggtaacagccaaggtagattctggccatgtaggtgcaagcctcaatctccagctatcctttgaactacttagcgtcctctagtaaacttactttctgcttaaattagctacagctgcattcagttgcttagcactaagaccagctcactaaatcagtggtttttcatcatcttcctctaacatggtcttctgccttatga

SEQ ID NO: 587061 - DNA, 4001 bp, Homo sapiens
gcacacacccatctgttgacaacaattcctgggtttccattgtgtacagggcctgtggaggacaatgagaataaccagggggtgatgcttcctgggggaccacatactatctggaacgctctgccttccccatctcaatgcaagtatctggagatgagcaggtccttagatccttagttgacattaactgttgaaggcagggagaggcagccagcctggtgggaacagcactgggaagggtatgggagagcagacagtgtgaataggacatgccaccaccgccctcagctgtttgctcatctgaacaggcagggaatggtcctagataatcagatctctccgactgccagcattctgtggcgccatgttggaggaaggcaatcaggagagcaatgccccacccctctcacaggcagtcaagcactgtcctgctctactcaccacagcccctgtccagatggcagctcccgaggtgacgaggagggtgtagtcgcggatgtagaaaaatcctcctaggactgcactcaagatccccagcacgatctgcatcacctgaaagacaaaggacccaagatcccggctcctaggtggacctgccactgcagggattaaccgctaaaaccccaaaaagagagggagaggtagagagagagagaaagaaagaagagaagagaagagaagagaagagaaaaggagaagaaagaggaggagaaggagaaagaagaagaggcaggaggaggagaaaagagaagggaaaggaaggagaggagagccggcccatcctgagtttggcccagaggaaaggatggactcagggctccactgattgggactctgcatggtcagtggctcctccacaccccttcagcccagagcctcccctccccaggctcttactgagaaggccagagaatcacatcgctaagtaagaagacataactggctcggtgtcctgttcagagggaggctggcagagagtgctgctgcggctggaggtggggagttcctcccgccgcccgacgaggcaggccgtcacactcacccacgaggccaccagcagccggctgctgcccctggcctgggtggcccggggccgcagcgcagagcagcaggtgagcaggagcttggccagggcagactcctggtggatgtgcacatcgatgtgggtgtgctgtggggcctccggggccatctcatcactgtcggctgttcccattgtcagggacacagtctatgaggaagggagcaccagagaggaacggctgtcagaagattttcgcagatttcattggagttggggaggtcaggggccagtggtggctcaaagtcacccaatgaatggctgtcctggtcacagggccgcacccctggcccctcacgaggggaatgtgtgtagcagagggggtgctgaccatgctggaactgcggcgactacagagcctgcgggaacctcccctttcgcccaagatctgctctgtccccctcatcctcctcccagggccctggcgtctgggtcaagcagcgccccacacctcgacccctcaccccctcctcccgggctcttcctgcggcctcccctccacagtccgcaggctctgggacaggaccgagtccttggctgcctgtggagctcctgtgccagcagctgcgccccggctgcgctccggatacccccatccccgccaccgccgacctcccgctccaccgactgctgctcacgcccgacgggttcacgccgcccctgccccgtgaaggaccgcgctgcggtgcggaggtaggtcaaaagccggggccgcacctggcttcctctgcagtccccttcctggagtgtcatccctgggtgggggtccctcctacgctcctccaactgtgcggaggcagctcggggtgcgtgcggaaggaggcccgggggccgccgggagtggggtgccgcctcacctgcgctcctcgggacctgcgagcgggcggcgggagggctggggcgctggctggagaagtgggttgagagttggagggggaggcggggaggggaggcgggggtggggctgaacttcagcccctcgggttcatgacaggctgcagggcctggggtccgtctggggttctcctgctgcgcgagggtcactgggctctggggagctgggagggtccgcgggcggacggccctgggaaagcccgtggggtcgttctcgcctccagccccgcccggccagggccggcgtgcaagtgtgcgcgagtgggagcgcagggggcgcgcgggggctcggtcttctcccgcccggtccgctcctccgggcggaaccccctttgccgggcccccgggccgcagctggtttcgggaaaccgcgcagcctgggcggggccgcagcccccacccgtgcatctgccgtctccgccctcccgtcgctcccctgctcggggtcagctagtgtccgctctgctcggccgcgggctcccggaggactgcaggtgaggcagggcctccgcggcccgggagaccctcttgccgcaggaccctctgtcacgaggagtccccagggccatgcccccaccccgtcctgtccacaggacgtctttcttcctccaacctggtttccaggaggactcacgtaggagggagggacagctgggtgcaggtgtttctccccagaaaaacggctggagagcgggaggagaggcctggggctggcgcgtcccgtccaccttctgccgcctgcacgcctggaccctggctggagccctacggtggggtggctcctgggacggggccagggagcggcggggctgccggacgctttccccagccccggggcacgggaagagctggacagaggaaagtgttcggggcagccgggaagagcccaccacctaccaggcgtcgggcggcccgcaggggaatctccgtggtgccggcctggttcagatccgactcttcaggcgggggcgaggcagatctaggggttggcgtggggcgggggaagcggtggtcctgggggcccggaggtagctggaacccgaggtgccctcagggcgaggcctgggccgtcaagggaaggtctggctggaatctggggctgggctggaagcagtctgaagctcctttgtacgtgtgcggaattgtctaactcctgtcctttctaaccccaaggaggccaggtgggtgaaagagtgaaactgctttgaaaagtaggtagagtacgaatgggaggtgttattagaattgttaataatatttgatttaaactgtgatacttagccaggatgtccattagaattgcctatgcaggatttattttagagccaggcaagctgattctaaagtgcatgtgaagaagtagtctagcaaaaatggccatgacaattctgaaagaaaaaccacacgaggggatcatgaaacagcccaattagcattaagctccatgttaaaattgtggtaatgatgcctagcccatgagacatgccaatgggcagaatataaggactagaataggcctacattcctaggggaacttcatttctgctcaggagagaattttaaatcactgagaaaaagaggatgtattttccgcaaatggaacgtatctttcagaagttaaacatctgaatgacagcaacagaacttggatccgtgtctcccaacggcgaaggttggtcacccagctcccaaattccagatggtcggcatttaaaagtgaaaactgaaagcataaaggcacttagaagaaaatgtggaagattattttataatctcgaaacggggaagtcctttaaaagtgtaagagctagacaccataaatagaatgaaatagaacatggattgtatgaatatacaagcaaggtcaaaaaataaacttcaaattgtaaagaaacatttgaaactcatatcacaaacggtaattttgtgaatagataaagaacttccatagaaaaaagcaaaacaaaacaaaacgaaacaaggacataggatgtgaacggagagctcacaaaagaagaaataaaaa

SEQ ID NO: 587062 - DNA, 4001 bp, Homo sapiens
caaagtgctgagattacaggcgtgagccaccgcgcccggccagttctctttttttagagagagagatggggtgttgctttgttgcccagggtggtctcaaactcctggactcaagcaatcctcccacctcagcctcccaaagtgctgcaattacaggtgtgagccaccacgcctggcccatagttctcttattatgagtgaggttggttgtcttttcatatgttcagggccatttttatttcttcttttgtgagctctccgttcacatcctatgtccttgtttcgttttgttttgttttgcttttttctatggaagttctttatctattcacaaaattaccgtttgtgatatgagtttcaaatgtttctttacaatttgaagtttattttttgaccttgcttgtatattcatacaatccatgttctatttcattctatttatggtgtctagctcttacacttttaaaggacttccccgtttcgagattataaaataatcttccacattttcttctaagtgcctttatgctttcagttttcacttttaaatgccgaccatctggaatttgggagctgggtgaccaaccttcgccgttgggagacacggatccaagttctgttgctgtcattcagatgtttaacttctgaaagatacgttccatttgcggaaaatacatcctctttttctcagtgatttaaaattctctcctgagcagaaatgaagttcccctaggaatgtaggcctattctagtccttatattctgcccattggcatgtctcatgggctaggcatcattaccacaattttaacatggagcttaatgctaattgggctgtttcatgatcccctcgtgtggtttttctttcagaattgtcatggccatttttgctagactacttcttcacatgcactttagaatcagcttgcctggctctaaaataaatcctgcataggcaattctaatggacatcctggctaagtatcacagtttaaatcaaatattattaacaattctaataacacctcccattcgtactctacctacttttcaaagcagtttcactctttcacccacctggcctccttggggttagaaaggacaggagttagacaattccgcacacgtacaaaggagcttcagactgcttccagcccagccccagattccagccagaccttcccttgacggcccaggcctcgccctgagggcacctcgggttccagctacctccgggcccccaggaccaccgcttcccccgccccacgccaacccctagatctgcctcgcccccgcctgaagagtcggatctgaaccaggccggcaccacggagattcccctgcgggccgcccgacgcctggtaggtggtgggctcttcccggctgccccgaacactttcctctgtccagctcttcccgtgccccggggctggggaaagcgtccggcagccccgccgctccctggccccgtcccaggagccaccccaccgtagggctccagccagggtccaggcgtgcaggcggcagaaggtggacgggacgcgccagccccaggcctctcctcccgctctccagccgtttttctggggagaaacacctgcacccagctgtccctccctcctacgtgagtcctcctggaaaccaggttggaggaagaaagacgtcctgtggacaggacggggtgggggcatggccctggggactcctcgtgacagagggtcctgcggcaagagggtctcccgggccgcggaggccctgcctcacctgcagtcctccgggagcccgcggccgagcagagcggacactagctgaccccgagcaggggagcgacgggagggcggagacggcagatgcacgggtgggggctgcggccccgcccaggctgcgcggtttcccgaaaccagctgcggcccgggggcccggcaaagggggttccgcccggaggagcggaccgggcgggagaagaccgagcccccgcgcgccccctgcgctcccactcgcgcacacttgcacgccggccctggccgggcggggctggaggcgagaacgaccccacgggctttcccagggccgtccgcccgcggaccctcccagctccccagagcccagtgaccctcgcgcagcaggagaaccccagacggaccccaggccctgcagcctgtcatgaacccgaggggctgaagttcagccccacccccgcctcccctccccgcctccccctccaactctcaacccacttctccagccagcgccccagccctcccgccgcccgctcgcaggtcccgaggagcgcaggtgaggcggcaccccactcccggcggcccccgggcctccttccgcacgcaccccgagctgcctccgcacagttggaggagcgtaggagggacccccacccagggatgacactccaggaaggggactgcagaggaagccaggtgcggccccggcttttgacctacctccgcaccgcagcgcggtccttcacggggcaggggcggcgtgaacccgtcgggcgtgagcagcagtcggtggagcgggaggtcggcggtggcggggatgggggtatccggagcgcagccggggcgcagctgctggcacaggagctccacaggcagccaaggactcggtcctgtcccagagcctgcggactgtggaggggaggccgcaggaagagcccgggaggagggggtgaggggtcgaggtgtggggcgctgcttgacccagacgccagggccctgggaggaggatgagggggacagagcagatcttgggcgaaaggggaggttcccgcaggctctgtagtcgccgcagttccagcatggtcagcaccccctctgctacacacattcccctcgtgaggggccaggggtgcggccctgtgaccaggacagccattcattgggtgactttgagccaccactggcccctgacctccccaactccaatgaaatctgcgaaaatcttctgacagccgttcctctctggtgctcccttcctcatagactgtgtccctgacaatgggaacagccgacagtgatgagatggccccggaggccccacagcacacccacatcgatgtgcacatccaccaggagtctgccctggccaagctcctgctcacctgctgctctgcgctgcggccccgggccacccaggccaggggcagcagccggctgctggtggcctcgtgggtgagtgtgacggcctgcctcgtcgggcggcgggaggaactccccacctccagccgcagcagcactctctgccagcctccctctgaacaggacaccgagccagttatgtcttcttacttagcgatgtgattctctggccttctcagtaagagcctggggaggggaggctctgggctgaaggggtgtggaggagccactgaccatgcagagtcccaatcagtggagccctgagtccatcctttcctctgggccaaactcaggatgggccggctctcctctccttcctttcccttctcttttctcctcctcctgcctcttcttctttctccttctcctcctctttcttctccttttctcttctcttctcttctcttctcttctttctttctctctctctctacctctccctctctttttggggttttagcggttaatccctgcagtggcaggtccacctaggagccgggatcttgggtcctttgtctttcaggtgatgcagatcgtgctggggatcttgagtgcagtcctaggaggatttttctacatccgcgactacaccctcctcgtcacctcgggagctgccatctggacaggggctgtggtgagtagagcaggacagtgcttgactgcctgtgagaggggtggggcattgctctcctgattgccttcctccaacatggcgccacagaatgctggcagtcggagagatctgattatctaggaccattccctgcctgttcagatgagcaaacagctgagggcggtggtggcatgtcctattcacactgtctgctctcccatacccttccc

SEQ ID NO: 587063 - DNA, 4001 bp, Homo sapiens
aattgggctgtttcatgatcccctcgtgtggtttttctttcagaattgtcatggccatttttgctagactacttcttcacatgcactttagaatcagcttgcctggctctaaaataaatcctgcataggcaattctaatggacatcctggctaagtatcacagtttaaatcaaatattattaacaattctaataacacctcccattcgtactctacctacttttcaaagcagtttcactctttcacccacctggcctccttggggttagaaaggacaggagttagacaattccgcacacgtacaaaggagcttcagactgcttccagcccagccccagattccagccagaccttcccttgacggcccaggcctcgccctgagggcacctcgggttccagctacctccgggcccccaggaccaccgcttcccccgccccacgccaacccctagatctgcctcgcccccgcctgaagagtcggatctgaaccaggccggcaccacggagattcccctgcgggccgcccgacgcctggtaggtggtgggctcttcccggctgccccgaacactttcctctgtccagctcttcccgtgccccggggctggggaaagcgtccggcagccccgccgctccctggccccgtcccaggagccaccccaccgtagggctccagccagggtccaggcgtgcaggcggcagaaggtggacgggacgcgccagccccaggcctctcctcccgctctccagccgtttttctggggagaaacacctgcacccagctgtccctccctcctacgtgagtcctcctggaaaccaggttggaggaagaaagacgtcctgtggacaggacggggtgggggcatggccctggggactcctcgtgacagagggtcctgcggcaagagggtctcccgggccgcggaggccctgcctcacctgcagtcctccgggagcccgcggccgagcagagcggacactagctgaccccgagcaggggagcgacgggagggcggagacggcagatgcacgggtgggggctgcggccccgcccaggctgcgcggtttcccgaaaccagctgcggcccgggggcccggcaaagggggttccgcccggaggagcggaccgggcgggagaagaccgagcccccgcgcgccccctgcgctcccactcgcgcacacttgcacgccggccctggccgggcggggctggaggcgagaacgaccccacgggctttcccagggccgtccgcccgcggaccctcccagctccccagagcccagtgaccctcgcgcagcaggagaaccccagacggaccccaggccctgcagcctgtcatgaacccgaggggctgaagttcagccccacccccgcctcccctccccgcctccccctccaactctcaacccacttctccagccagcgccccagccctcccgccgcccgctcgcaggtcccgaggagcgcaggtgaggcggcaccccactcccggcggcccccgggcctccttccgcacgcaccccgagctgcctccgcacagttggaggagcgtaggagggacccccacccagggatgacactccaggaaggggactgcagaggaagccaggtgcggccccggcttttgacctacctccgcaccgcagcgcggtccttcacggggcaggggcggcgtgaacccgtcgggcgtgagcagcagtcggtggagcgggaggtcggcggtggcggggatgggggtatccggagcgcagccggggcgcagctgctggcacaggagctccacaggcagccaaggactcggtcctgtcccagagcctgcggactgtggaggggaggccgcaggaagagcccgggaggagggggtgaggggtcgaggtgtggggcgctgcttgacccagacgccagggccctgggaggaggatgagggggacagagcagatcttgggcgaaaggggaggttcccgcaggctctgtagtcgccgcagttccagcatggtcagcaccccctctgctacacacattcccctcgtgaggggccaggggtgcggccctgtgaccaggacagccattcattgggtgactttgagccaccactggcccctgacctccccaactccaatgaaatctgcgaaaatcttctgacagccgttcctctctggtgctcccttcctcatagactgtgtccctgacaatgggaacagccgacagtgatgagatggccccggaggccccacagcacacccacatcgatgtgcacatccaccaggagtctgccctggccaagctcctgctcacctgctgctctgcgctgcggccccgggccacccaggccaggggcagcagccggctgctggtggcctcgtgggtgagtgtgacggcctgcctcgtcgggcggcgggaggaactccccacctccagccgcagcagcactctctgccagcctccctctgaacaggacaccgagccagttatgtcttcttacttagcgatgtgattctctggccttctcagtaagagcctggggaggggaggctctgggctgaaggggtgtggaggagccactgaccatgcagagtcccaatcagtggagccctgagtccatcctttcctctgggccaaactcaggatgggccggctctcctctccttcctttcccttctcttttctcctcctcctgcctcttcttctttctccttctcctcctctttcttctccttttctcttctcttctcttctcttctcttctttctttctctctctctctacctctccctctctttttggggttttagcggttaatccctgcagtggcaggtccacctaggagccgggatcttgggtcctttgtctttcaggtgatgcagatcgtgctggggatcttgagtgcagtcctaggaggatttttctacatccgcgactacaccctcctcgtcacctcgggagctgccatctggacaggggctgtggtgagtagagcaggacagtgcttgactgcctgtgagaggggtggggcattgctctcctgattgccttcctccaacatggcgccacagaatgctggcagtcggagagatctgattatctaggaccattccctgcctgttcagatgagcaaacagctgagggcggtggtggcatgtcctattcacactgtctgctctcccatacccttcccagtgctgttcccaccaggctggctgcctctccctgccttcaacagttaatgtcaactaaggatctaaggacctgctcatctccagatacttgcattgagatggggaaggcagagcgttccagatagtatgtggtcccccaggaagcatcaccccctggttattctcattgtcctccacaggccctgtacacaatggaaacccaggaattgttgtcaacagatgggtgtgtgcagtttgcacaggagctgggtaggctggtcatggtacctacactctcagaatagcactaaaacactcatatttactgacagaagccgagagtaattaccttcacccagcctgtggcaaaatacccagcttaattacagaattagccaaacaggattcaggtccacctgtccactgggacatactagatttcctgttcttcaagcccagctgagtggattattgggcactgttaggacaggcttctagacctaacagtgcccactctgtatagactcacccttcattgagatcttctccagcaccccatgacttttatccacaggatcccaccatccctagaactttcataaagcacttggtgttgtttaaaaaggaaggtttagaagggaagaggggctcacacctggcttgaccacaagctcttaggtgtcactaaagcagggccttttgcagcctcaggagttggatccaggctccaccctctcagcaattatcttaccatggataataaagcttagcatgaaacctcccgcccaagctgtgtgctggggaagggcctgcatggaggctctctcgtgggagaggagttgcattt

SEQ ID NO: 587064 - DNA, 4001 bp, Homo sapiens
cctcttgttttcctgccttggcagccaaacccaagttggtctcttctggactcccctaatattctgtacatctttacaaagtggtagtgctccaaatgggtcaccttgttccaataagaacccaattgtgaagcaaatgggatattggttgtattaacacaccaataacaaaatcagctaaaatccctagtcattctaaagaagctataaaacaaacagatagattctgtctctgaagccacctcacctaaatctgacctggccacctagaccagacccactgcttgtcattcttaaacacttgacttttttgcaaattaacaattttttctgatcaattgcacacttgtatccatcaaagaacatcagttctcataaatattattttaatacagcagcaaacctcacagcattataatgagacactaagaactgcttttatatcttggccttaaaaactttgcaaataatagtatctttgtcaccttgacatcaccatttaatagttaaagagaatgaaacacaaggggaaaaaaaccagactcataaaatctgcacatcttcctaggatgtagctaccatagaagagaacatattcctttcttcagagcagttttaatacacattcaaacaatattccagtgggttgacaacaggatggttcccaaagtataaatcatacaaggtttacaaattccatccgataagcagaattttttaagtaatgtgatcatattaaagtatcaaataaatttttatcattagcaaatgcagcttgttttgtgttttgacatacactttgggaatttttatatacattttctgaaaatcttattttttttctctgacatgcccactttgatgttactgaaagaactattttttttttacttattagaccttgttgatattcgatgcacagaagtcactacagtcaaccactgtttcagaaggagacataaagaattgtgatatgatgctgctggtcagctggcttggagctgcttacaggacaggggctgtgatttattgatgtttatatgaccagtgcctacaccatatctggtatagtatagcgctcagcaaacgtttctggtatgaataaggccttctctgtgaaatgtttcccccaattttccttgattaaatcagttcaacaaaaattaggaacctgtctacccctgacacatgactcctaaagggcttcctttaagagcacaaacaacgttccagattcccttcttctcagaggctgatgaagcattatcctggataagaaccctggaccatgaggttccactcgaatcccgacagagacgcgcgaaaggagaggcaggggagagagttaagcctgcaccaagcttcattaacagctattgggaggcaagtcctggccccgaggctcagccaggcctggataaccggaccgcctggaacccagagacctgatagcctgtggcctgggaaggagacgcgaggggctgcggggcctaaaggcgccgggctctccgcagcgccacgccttgcgcccggcgcttacctttccgaatgagggcggcgatctcggggtcgaagccctgccggtggcacttcctccagaggcccatgttggtggagttgtactgccggctgcactcgtccgcggggctcatggcgaacagctgccggcgattccgggcccggaggagtttgccctcccagcggtccaggcgcgagcggctcgcccggagcggcaagttgttgttattgttgtaaatgaagccggggtcgacccggcgggtgttgaaggccttgcacctgtccctgtgcttcctggcgtccgtctcgtaccagtggtccgagcagatggccacggccagcatgccgagggcgcagagcgctagcgagaggccagtgtagagcagtaaccttccggcagccatgcctccgcttggcggctacaccatgggcatgatccgccgcagcctcgccttccctcgccgcacccggaacaaagcggcgggcggccgagctgggggagggggcaggagagggactcgcgccgcggcgccccctcggcccccgcctaccggagcacggcccggggactgcggggatgggggcgggcggcctaaaaagttctgatccggagaggctcccgcgggctcctgggcatcctctgaggcaggtgcagcctccggcggcggcgaacccagcgcggccgcctcccgccccctccccgccccgcaggaagcgactgccccgaagcagccgcctcggctcccagcccggcttcgggcgccgctgccctcgggccggaaactaaatgccaagtgtcctcggctgcggtggggcttctttgtgcaggatggtgacgggacagaactcgcctgtctctctgagggggacggggggtgctgtcaggaggcgccactggaccaccgggtgaagtagaacgccccggatgcggccggcgggcgaaagaaacctccaggtgctggggccggcttctcggagtccctcctgggtctctggctcagagcctctccccctccccgtctgcaagcaaagacctggggcgcgcacccagaaatgttcttcctctttgggtcgggtcctcttaaaatctccgttctctggtcaccagcaggtcggttgctccttctgacccgcgtgctgcgctcagaggcgcactccccgcggacgcacgctctcggccgacctttccccgcgagctccccggtgccctgcctctggcatcgccattcaggcggcccctcgggccgacagcgtgttcacccgggcggcgttaccggacgagacccggcctgggatctgcggagactgggcggctgctggcggacgcgaggggcgggctgcgcggcggagggtgcaccaggcagcgctcactgcgcgcggcgctaggggctcggcccaccgcgccttcaacaccatggacaggtcacgccgccacggcgcgctgccggcccagccgccagcccccgagcgtcacgcagctcttcccagcgccgtcttctgcctggagtgtccacccgaccgcctccggacccggctctcccgcgacgcctccgcctcacttcatctggcacccgggagccccgggagcctgccgcccaggtgcaaagaaaatgccgcaggcaccgaagaaaaccccggtcccggcccctccaaacaatccgcccctttctccaggcacctgagcccttggcactctggcaccccgtctgctctgcccagctgggctcagtcgctctcagattgcaccattttcttcgcagcccacccgggcgccgagatgccggctcactcgacagcgtgcagagaatcccgtcctggcctcggcgtcccacgatccggctcccggcgcgcggtggtcgccgagatgaatggggagagggtgggggagggaggctgggtcactcggcttcccctcgtcgcctcctcctctagccgcggcggctccgaggcctcgcaggctcggctggtgcccgggaggcgcgagagcccaggctgcgcccaggggactggggaaatcgcattgcccgggtgcgggcgccggaggaagctgctgccgcgctctctcgtccggcgcgggtagctgcagccttggctaaaacccacagacgagaacaccgagcgcgcagccaaaagctagtgatgtcatccgtgcaacgtgagcctcatctcttatttttctagtctccttaaagataaactgcaccatttcccaggcacgaaatgtctaagtcttattctttgaccaggcaagtcaatggtgtctagataggtatgtgcccaaccacatccatatttatgcacatatacatatatgtggtatgtagcatgtttacatgcattattataaatttagggatgttgcctacagctcctgtttctcttttcagccatggaaaattctctcaaatccactacggttatttaaaggaaaaactgcttattgcggagtcggccttcaaaggggccaagcgagctccctgcat

SEQ ID NO: 587065 - DNA, 4001 bp, Homo sapiens
ctgaaagccacctcaccgcactggggtcaagggctctggacaaatccctgcagccgtgtggccctcgcgggcctacacacgcactcccaccccacccctgcgcacaccgccctggcctctctgtgtatctgagtctctcaggagggtcctgtccctgactccctgccctctctgcccagcccctgccctcgggcaccacttcctccttgcccctgcctggcccttccttgccacagcgcctggccgcttctctacctgggggctgttctgttcccacctggggactgctccgggtcgggggctgtgtgtggcttcgggcttggggaagttgcttctcgcccatctcctgcacaggagtcccggtccctctaacaagctgtgacctttgctccccagctccctacagagcaaagtccaaccccctgccaacctcccaccagccttctccagggtgtcacgcctctggaaggagaaggccccttcccctttccagctatgtgagcctgggaaagacctctggtctctctgagactcagtcttcttgtctgtgaaatgggaccacactgcagacctcagtgagccgagtgacgagcctgtgaaatagccaggggtgcccggtgggcgctctgccctcagcctggcagagatctccccattttcaggcccagctcccacatgccacatcctggggaagctcatcccctcccccgtgccctggccgatcccacttctgacagcgtctatagcagcggcacccagggggaccgggctgagccacggccacgtcctgtggagaccaaggtcctgaaggaggctcgggggcggaagggcttacctggtggcaggtgagcaccagggcagtccacacgaagatccccgagacgcctcgggccagtgcggaggtgaggaagagccagggggccccctgggagctgttccccatgtggtccatctgcggcccagctggcacagccggtggggggctgggctgcggccagttcgctgacaccagggggacgccggctgtctccaggatccctgagacattactcatctgcagagggagggaggacacacaccgggaggagtgagggcaaaggtactggctcccggcagcaggaagcagcgggggagggaggagacagtgagacgggagctgaggctgagccacccaccaggccgcaccccccacacggacaccagcgccaggcccggctccctccctgctccgagctcagccatcgaagctcacccatcaaccacctgcgacctgagggtcccacctcaattcccccttgtaaaaccagcttccaactccgagtctcaggcttgcagggagcctgcttcttaggggacaaagaccgtcttccagtggggcagaagagggggaacccctgccgccctgcctgcccgggagggctggggagcgggcgcagaccagcactgcctgccccggcaggagggggtgtgcagccaccctcatgggaggagccggccctcactggctctgggacctgtccacccacctgggagcccggctttgctggggttcttggcagccctgggtgcctgttccatctcccactaacctgctggggccctgagtccaccctctcccacactcgcagcccagtccagcctcctcctctccctctggtctgcggtcacagggcccagctctacctttgctggcaggaagcacctggcccagtccagggaggcctggcctccagggaagcctagctggtcattctcatggccacgtggccccaactggaggccccactgtgggtgcggcaaggccaggatctgaagggctgtgccaggctggggcggggcggccagtgcctcacgtccccagtggcccacctgggccccaggctgcaggcccgtcccctcctgtcccctcccacggctgacaccctatcctcccggttgtttgctgggtggcagctggctcccaggaacctgctggccgcctggcgccctcacctgcctatgccagacggccaggcagctgccacctggtggggacacgtgggagaggtctgcggcaggccaaggagggccgggctgcaggaggaggggtggagagctaatggtacagggtttctctggggggtgacaggagtcctgaaatgaggtagaggcggcaggcacacagcactgtggatatacttaccgccaccgaatcgttcacttaaacctgggtaaattgatgttatgtgaatttcatctgaattaaaaaaaaaatccacgccccaagagatgagttgaaaacatttgttttctgggccgggcgtggtggctcacgcctgtcatccccacactttgggaggccaaggtgggtggatcacttgaggtcaggagttcgagaccagcctggccaacatggtgaaacgccgtctctacgaaatacgcaaaaattagctaggtgtggcagcgtgcacctgtaattccagatactcaagaggctgagacaggagaatcgcttgaactcagaaggcggaggttgcagtaagctgagatcacaccactgcactccagcctggggacagagggagactctgtgtccaaaaaaaaaaaaaaaaaaaaaaggaaatatttctggtttttgtggatcaaggcaggagagggggagtgacagcccagtccctggaccctttggggtctggcaaggggttgcggggccctgagggtccctgtcacccccatgcagaggcccctgtggagaaaaaactcactcaccccggctcctgggagagggatgtgggccctcagcccacctcttgtcctgttctggttacgcttgggctcatgccgctggggccaccattaccaagtcccgctccatgcccgcaacggatccacacactccttgtccttcatatctcctaccctcccacagccctgagcaacagggctcaaggggttgaggctggaatgactggagccactgttccccttttatttttaattaatttattttttgagacggagcctcgctctgtcgccaggctggagtacaatggcgcgatctcggctcactgcaacctccgcctcctgggttcaagtgattctcctgcctcagcctcccgagtagctgggattacaggcgcccaccaccacacctagctaatttttgtatttttagtaaagacggggtttcaccacgttggccaggctgggcttgaactcctgacctcaggtgatctgcccgcctcagcctcccaaagtgctgggattacaggtttgagccaccacgtccggcctgttccccttttagagatgggaacgagaggcgcatcaacgcgtccagcatccttgaggggtccgtgaggggcccgggctgaggcccatccttccctgggacaccctgcctgcttttcccaactcctccactgacactgtccctccagggaggctcccaggtggggaacaagctcaggaagtcgtgcccagctctcaggcccgccttgcctaacctccccatcagcgcccacccgggcccgggcccagagccacagcatgcacaccctggctgggccctcctggagcctgcctgctccccaggcagggaccttctggaccaaccgaccctgctcccgggtgactctgtcctgcagcctcaggcgtcacctctggagagaccatccccgctgtcccatcaccctcctcactgtgtgtgtgactccctgtccacctgtctgtgtttgctgctggtcctccctctgcaggagctgccagagcctagagctgtgccctgtccatgctcggggcacagggcttgcggggtgggggctgtcctgctgaggcggtgaccctgtgggctaaggtctccctttggccaggcaggggtgctggaaggcggtccccaacttccatccagctgcattcccactgcagccacaggtactcctgccggcctcccacccggcctgcagagccccaggcagtcggctcagcgcgtgtggatgtcgccctctggctgtgtcgggatc

SEQ ID NO: 587066 - DNA, 4001 bp, Homo sapiens
catctagataatagtaaatagtctgagaaaaagaaaaaatatttaatcatttttttcttacatgatactaagctaacataaccattttttaattctcaaagataagctggatactttgatattatctagggaaaacctaacttaattgactcaatttgttgaatttcgttgggggcggggattgagctgtagagtatttaaggcttctccccattaagatatcataagatcaccttttctccctctttccctaaatgttgacattacacttcattttgacagttgttcaatgaagttttaaagcgttatttctgtttatatgataacaacaaaaacaagaacaataactacaactctccaaataattactgccacatataaaatgaacaattatcagatttaagatatctttatcctttcaaactcaaatttaatatatacattgacaaaaattacatgacaaagaacaagataattatttggaggctgatagtaacttattattgaattcaaagtaaggattcttggatgaattcaatgttaggattgaacactatttttcttttttgtagttctgcaatttaaaaacatttatctcacctgaaaaaatatataaatctaattatccaaagcaaaattttgccagtttcaaaaaaaagttacagcatctttcaaaaatgaattacttttgaataatttttcttgaactccgtaataatcattttcttttagtgacttaaagctcaagtgattaagccatgatggttaaacatgctacagattatcagtgacagaatactttctattgaattatcttgaaaagtaggatcaagctaggcatccagaagtatatgacacatatatagcttgaaggaaaaaactggttttcacaattagattcacattaggaatggtgctgagttattttattgaatcttggtggaagaaatgggtctctaaggctttcttggagattcatcctagtaaaaaagaagcttgttgagtctgacatctgacctagagataactatgacagtttctctgagcagttaggtactctgtaagcagaattattctccatttagaatgttattacacgtcttaccatctgatgtttttctaacttactgtctagaacttacaaaagcgttttcagaggtgaaatatcagaaatgtagcaaaggaaaattaacagcaatgttttctggaatgaaatgcacccacaaacttcctttcacactcacaccacgtttctgtttttgttattggtgttgcctctggtgtaccttgggcattattgcccagggataaatgcataactatccctgcttgttccctgatacaaaaaaatgatggaatactcttattttgattttccttgtagaaggaacaaaagattaagtgagcctgcccttgacaggtgtgacacccccctccccccgcctcccaaacagcaccactgggcaaagcagccttttgtagaatcagccagtggaaactaaccccccacccccacctttaaacaaagccatttaatttggtcttaagcccaagtaagaaacaaaacaaaacaaaacaaaacaaaacagaaaacgaataaaggacaatataaagaagcatagcttgtcagcatgaacctacatgcaagccagagatctatgattttgtttcccagggagggagtgactaatgcgcgcaccctgaccatcaccgtaaagaggtaaagagagagtgaaatggctcaacgtacacacaccccgctccataccggggacgagtctccgagctgcggcttgtgctctcggagggccaggctgaagctgaccgcccccacggccacgctggacacccccagccctatctccagcacggagagcaccaagaggctcccaataatctgaccgctggtgcacatccttcctcggtcatcttccttccagatcagagagggaaatcaaccatctacctttttttcttccactatcctccttaccccttccaccccctaccagatcccaaaacttttctttcttcaagagcgaggcattatccacaagggctggatttccagaaacgaagaccttccctggctgggccagaggcaaaggagctgctccaccccctggcacgttcagatagggatcgtagaaggatcttcctgggttcggtggtgcgaagattgcacaccggtaccggggcttttaagcagcggaaaacctggaggagcccagggagctccgagccttgctccccaggcgctgtccagagttctgccgcgtcccaaatctccgcagggaaacccgcgccctcctcagcctactagaccctttcacagggtcccttctgttttattgccgaggagaggagctttgcttcccggagatccaaagggaaccgctccgagtttctctctccctctcccgttcgtcacctctcctttgttttcgtggcaatgcgaagtgcttctgcaagtctctgggtccccaggcagagcgggcggatgatattcagcaccacgctccttgcagttgctttgtcgccagaaaaagcgaccttgtctgatggcctctttccgtctgggtttcttctccctcgtcgtcgtcctcttcctcctcctttctctcgagctgattctctttcattgctatgacctcattggggtttaggaggttgacggaggaggaaaaagcctaatgtatttgtagatccaggaccagtactcttggctggcctttgatccgccccgcccccggaccgcagcaacagaaatccaggcgacccctacctccgcttctccccgtggctcctttctgggcttctatccagcggagaggggaggcgatgcctacgtcaacgcgggctcattctgagaaaaactttctttagcttgtacgcggggtagggggagcagtgagcaaagaaagacggaaaccccaggggggtggaaaaagccagactcctaatgtcactaggactctcaaggcccctcaccaaggaactcccctgtctaggagagctagattcaagcctgcttacaaggaatgtccactcccggccatcacagcctgtcaccttccgtgtcgtagggcgaagaagcagttgatgggggccacacctccacggtgattttgttcctctccagccacagacccttgctttcccctaggagcgtgaccacacgttctgggaggcatagctagacccaactgagctgggattatatattctcaacaaaattcaagagatgtgtatgcattagaacaggcattatttaaaaaaaaaacacgtctggcttaatgcacaattatttttgacagtctactttcatcagaatctttagggcaggggccagtccagcttggcctgggatatttttgcattgtcttttgatgcctatgagactctagatgtctagggatcgctgtgtttagaccccattttcattactctagttttatgaaaaatctcaaggtattctatcaaggagatctaggaagtgggataaagagagggttttgggtgtgggtcatctttctcaaaaactgggttctccagttcgacatggactgaaggaaaatagaacaaaggaagatgaggttagggtacaataacacaagactagggaatgttgacttctatacatcagtgcagtgcaggcgcctctattagaggcttcttaaagctcccatgatgagaacataaaagctcggtgacctatagcataagttctgtaacataaatgccagtttcagttttcttaaatttgattaagggcttcttttagagtttaaactcaattctacactataatttttttcatatgtttatattctataatttaaaaatttgaatccttttctcttaaaaataaaacaaatgtaaggaagaagagttacaatttgttaggccttaaagagcttcagttattgtgatatttggagtacaaataaacattggtactgaatgataattagtggattcatttctatgcttttaaatcc

SEQ ID NO: 587067 - DNA, 4001 bp, Homo sapiens
aaagcgcatttcaggagagtaataaaaacaaatctcactaacctctaaacttatttttcttcacagaactcataattacctgaagtgttattaatctgattgtctaacagaatgttcctttcataatagcagggatttaccttgctccctttctgctgtattcccagtttttacaacccagcaggcagtcaaatacttgttgaataaggaaatgtatactaagctgaattaaacctgaaggcagttttttattggtaaatgtaagttacagtgaaaattacttacttaccaatataccagaggggccagtatgtcacattgtagtatgaactaatcaattttccagtcctgaaaaaaaattagaaaggctttccagtgaacctaaaaacaccaaaaatcaaaaacaaacacaaaaacctgtggaaccagccactggcttcttaaagtttcactttttttggactgattcacttacatttcagtatatatcattccagccatagatacatttaggagtccccaggctaagaccactttcctagcctctgtttcttttctcatcttgatggttctgtcaataagggaagcactagggtgtgcctccccctgcatctatgaaaaaacaaaaagcacaggaattaaccagaagaaactattgctccatttaaaaaccaaattttgcatcccttataaaggtaactgaaaccgcatataccttctctcatctttaaaatgttttatcaaaacttcttccattttaatatcagtatatgaaaagggaacccaaaattatatgtaacttaattggcatcacagtgtaatcaacagagaagtggctggttatttatctatttatttgttttgagacggagtcttgctgtctcccaggctagaatgcagtggcgcgatctcgactcactgcaacctccgcctcccgggttcaagcgattctcctgcctcagactcccgagtagctgggattacagacgcccgccaccgcgtccgactgatttttgtatttttagtagagacgggatttcaacattttggccaggctggtctcgaactcctgaccttgtgatccacccgcctcggcctcccaaagtgttgggattacaggcgtgagccaccgcgcccagccgtggctggttatttaagaacaatttaatacttccaatacataaaaatgtcttattttgtaatttaagggttatgtctagaaatactttgtattttgtctttggggtatgttacacggactaggcaaaaggctaacttcagaaactcaaaatgtcaagttttgggagactatattccatatctgctgtaagtcataaagactgttgtacatcctcatgcagacgccattactatctcaacaactctgcacttggacagctgtactccagggctctcccttttgtgtgtggataaaggacaaggatccaagttttagaagggcacgtacttatgatggggtggtgagcggagtaagagggagagaggggaaaacgtgcattgttttggtccacatttgggatttataattcctcctttcttcagctaggctcaactcttacagaccgtgcaaaacttgttccagcgacaagcagtcgtatcccacagaggacagagcaatagctttcgcgccactcagcccccgcgtcccaatttcccagtccagagcttccctccccggctcctgggcacgaacttcagcaaccctattgcttctttcttcccttcccctagagaggcggaacgcctagccacatcccccttggctgaacccaggacagatcagcaggcgcggaactcccacaacccgcgtagattccaagacaggaagcacaaacacgaccccgaaaacgcaccatgtcctctggccggaaaacgcaggctcgcgccactctctctgggcatgcgcaaagccaagctcaagcgggaggccaccggcaagcggctctaaagttaccggaagaactaggtagtctcttctcgcgagaaagggaggggtcgcaggcccaggcgctcggagcgttaccagggaaacaggtctcggttttgcggctcccactcagctgcgggagaaagctaagcagcaaaattcagaccaggctctgaacccgcagtaaaaagtaataattgtaacaagctgaattttgtatctattaatataattttagcttccctagggcatttatggactcacatgtgtaaactgattaagtagggcggctcaccgtaggatagagtggcgtgataaagtggccagacaccatcagtgacaaagcatttctttcccctgtgttaaagtatctatgtcaagagtcctgaccccatgtaattttttttttggtagagacagggtttcgccatgttggccagtctggtctcgatttcctaacctcaagggatccgcccgcctcagcctcccaaacgcctgctggcctcccaccgccttttgggattacaggcgtggcccaccgcgcccggcctaaattcttaatctgtttaatagggtgcagcaataacaagcacacccaaaatttgttttattgaagttgctagtggttttgaggttaaaaataataacacattttcgtatgtattttttggaagagctgctcatcctgaggaaaaggttgagctttgttttatttagcacaaatacctacaagtgtgccgctgagccaggcgcacggatatagaaaataagaccttcctggttattacccagaggagctcaaccccagcggaggcccacagatgcatttcggtggcaggtgaggtggatgcagtgctccccaaggaggcgcatccagcccagccccagctctcgcgagcttcctggaggagatgacgcgttagagtccacagccagaaacccagggcctggggacttgttctgaagtgtgcctcctaataaaaacattaagccatgccacagtaagctagtggattacatcatgtatgtccaatggccaaagtttttcctaaaatgatcctaagattaataccacgtggtattgtatattaatgaaaatcggcaggtatgctgtgctcttgaagagctgttaagttttatcatttttagattgctttagcagcaatgttgttttgctctagttttagatttagagatgaactaactggaaaattgttcaaagtgaaagggctcaaggtgcaatcaaaattagaataccggccgggcgcggtggctcacgcctgtaatcccaacactttgggaggccgaggcgggcggatcacgaggtcaggagatggagaccagcctggccaagacgctgaaaccctgtctctactaaaaagacaaaaaattagtagggcgtggtggcatgcgcctgtaatcccaattactctggaggctgaggcaggagaatcacttgagcctgggaagccgaggttgcggtgagccaagatggtgccactgcattccagtctgggcgacagagtgagaccctgctaaaaaaaaaaaaaaaaaaaattagaataccggtttcccaccccctccatatgtgactctttcctaagaagaaattgtatgcatttgatgtagttcatagtagttcataacgggcacatctgtgtttttccctcttaatctataagctgttgtgcatttattcaaggcttaaaaaagaacaccactgaccaaatgacagcattatgtattagggctgccataacgcaatatcacagacaggtggcttaaacaacagaaattatttttttcataattttggaggctggaagtctaagatcaaattgtcagcagggttggtttctcctgaggcgggtctccttgcagacggcccccttgtattgtgaccttgatttctgtgctcgtgaatccttgctgtcttcttgtaaggataccaattgtattggattagggcccttatgacctcatttaactttaattacctccttaaaggccctgtctccaaatagagtcacactggaggtgagggcttcaacat

SEQ ID NO: 587068 - DNA, 4001 bp, Homo sapiens
ggtgggcatggaaactctcaaggttcccctggctgtgggtcagtgtgtccttcaagggagcttgttgtcacagcaggacgagttcagaagaaacctgctgtttagctaaagccatgaagttgctgctgagactaattttatgccacccaacccccaagccactccaatgtcctgcttaaagtatagtaattgcctcgatgcaatctgttactgtaaattatttacagctaaatggcttagagcctggtctttatttgttttggagaaactgattcctcactattctaattttccttatgactcaaataacttccttggccctgactttcatttcacctctacacctagaatggaagttgtcctcttccaaagtgagtggaaaaaaaccctagttggctgaatgctagggttaggttcgagcttatgaaattgccattgttataggtgaaaattgttcaatatcagcaattttctgtggttcaaatggaatagccccggtgaaaattcctaagaatttaaacatcgccctcctcccttataagcagagccagaagcgagggagggactggccctacttggggctattccacaagaaaagctgctgggaagacccaacgattcagtgcagttaaacttgtcttctgattctgagctcccatcataagcaaggcactgtcggggtaagtagaaagaaactcagcactcttatttggggaggggtgaagttggaaaataaaatgaatgtgcttaccataattgctgacattcactgtgtgtgttctatgggctatttctaagttctttacatgaaattacatcaattcgtcttgacaagcactatgattgtccccatgagataaaggaggaaacttggcatagagaggtaaagtcatttgctcgaggtcgcatagctagtgagtcatggaagctggacctgggttcaggctcagcggctcaagagtgcacgtcttgaacctcaacaccaacacccctggcagtggctacagaagagagtctgaggatgagaggggcagacacaggactttgggggcagggttggttttgggagcaggagtgttgcagggcatagagagtgtggtggtgttctgaggtggctgagaacaagatcaaagccaggagcagaagatggtaaccaaggtccctctgccgtgagttgcagaacccggcctggcagggcaaggcaggggatgtagatcagccttccagcctccacaggaaaatggggagataacccagcatttccagtgcccggggaggcaggagggtgggagacagtgaatggcagccctcctggcagtcaggttttgtgaaagtcgcagagaaagtacaaggggcagggagggatggaggacttaggaaagggaaggtcagacacaaatgtgcacagggaggattgcaaagcacgacagcccagtggggctgagaaggagccttcaggacacagcggaccaagagatatcattttggtcccctgatgggtgagactccagcaaataactttttcctttctttgtggcaaaggccaagagaggtggctgctcctgccttagctgaggaattgagtatctgatctccgtctcaggccaacctaagaccccccctgccccagccccacctcccaccccctgcctaatccttcagatgagaaagttctgtttcctccttcctttgcgcaggaccaaccctggccaaagaatcttccccctcctccttctttccctcccacctctcttccctccttccctcccccttcccagcctggccatgaataaagctcataacgctacctgccgagcaagccgagtggagggaggcaaaggccaggctgaggatcagggtggcccgggtggcagcggggaggcgctgcatgctggaggctgtgctgagtgcccggtgcaggtgagccggtcctgcggagttgtgccgagtgcctgctgcaggtgagtcgactcccacctgcaggagctggaaagcaactctgccagaggtgaacttatgctgggtgtttgggggaaacaccatggggtggagcaaaggaaacttggcctgtcacaccttctctcacctctctagaagggaagccaaaccgttggctgaggaaggaagggaggggcaagctgtgcccttctcccctgagcgcaaatattgtccttattgagaaacaaggggaggacaagagagatctgtgtcatgctggttcctgggacatgagtttgctgcctctcccatctgcaggtgtagcatggatgctcaattccatttgggccaatattcactgagcacccactatgctgaagttgggagatacctgctgtcgaagtgcgttaattacaaacacgcatcattcaaccccagaaccgtgtttgaggaatggcttgggaggataaagcactgtgggtttcaacagtggaggccacatctgctgatgggatgcttcaagaagaaaatggcatttgaggttgggcatgggggctcaccctgtagtcccagcactctgggaggctgaggcaggtggatcacttgaagtcaggagttcaagaccagcctggccaaaatggtgaaaccccatctctaataaaaatacaaaaattagccaggtgtggtggtgcatgcctgtagtcccagccacttgggaagctgaggcaggaaaatcgcttgaacccggaagacagaggttgcagtaagctgagatgctcctgaccctgcattccagcttggccgacagagggagactccatctccaaaaaaaaaaaaaaaaaaaaaaagaaaatggcatttggcctgggccttgaaggatggctagaattttgacagggggagaggggaagatggcattataggtagagggacagatgagcaaaggtccagaggtaaggaagtgtcagagggtggctgtaccagcagcacccagaagcgcaggtgagccaaggcatgtgaggtggggaggcaagaggagagctgtgggctaagcttctgcgtgcctggtagaggaatttgaaacaaagtcaggaagcaaaggggaaggttctgtagagattttgagctgaggagtaacttgactagagctctgcattccgtctaaaacatttattgaagacccacatgtatataaaaggtctcatcctaggcactggagactgagatgactgagacacgcctcttccccttgagagcacagtgcagcagggaaccaaacccggaagaaagaaatttgatgcaacctggcaagactcaaataggggtaccttccactgtgatgggaataaaaaggaggatgggatgaactctgcctgagaggtataggggaaggattcacagagaaagtgacatttgggctgggtgctgaagtttgtatgtgcagattagagttgatgggcttttcaagtcaaaggaatagcacctataaaggcgagggaatcgtctgtgtgcacacagcctgccatgtgtggaagtgttcctgcgcatgaatgggcctggtaagggtgaggggtggactccagctctgtggaaagacatagaaggcgtgagtaagccccaaggaaagatttcctagtggagtgtaacagcccaggggaggcacttttttctaattggctctaagatataaaatagtggtggcctatgttcctggatttggggatagggccaacgtgccctaggaagggtgattttcagtcagtgcacagaagtccagtttaggcattaccactagttgaacattaaacagttgcatgccaggccaggctctcggtgtggggacctgggggtgagaaagaccacacagcccttgtgctcaaggaactcaaggtccccacagagaggacgctgcttagtagaacaaatgctgtcctcgatgttttcctcacaagtaaaccctgcagtgggcttcacagggcaggactgatttatccaatgggtactagggataacagcggtacgtggaatccccaagatttccaaggatctcaaaaatgtttgag

SEQ ID NO: 587069 - DNA, 4001 bp, Homo sapiens
ctgatttaaagatccccccccgccaaaaaaaaaaaaattagtagctgtcactcatctgttgccagatgggtaaacactactacatcattctgatgttaaggtataacggttttgctgtttgggcgtgtaaacgtttgggcttgtaaatgttttaaaacattggcaaataaagtactttgaattatgtttcgagtagtgtttcaaagtatattatacacgggtttcaaatagaaaaactaaaaggtggaataaaacaatttggaagagtttagtaaagcgtataaaaattaaaggactaaaaaacccacttcattttaaatgtgtaaaaataaatcgcatccattcgtgggaatccagtgactttttccttttctttctttcttttttggttttagttagctggtacgtactgcaccctccacaacacgttggaaattaggtcctggtacacactaaggaatatccagccaggtaaatacatcagggtgatgaggcccataaaattgagcgggtagtgagaatagtcccaggaacaagccccgcacgtgcggagtcccagaccccaggacagctcccacacgtagatgaagatcacgtagatgggcacccgcttccaagtgccccaaccgcggctgtagtggaggtggaagtagagcttttccaccacgaaactgcagctgccgtacataaagaaggaccagagcgacgtgtggccgctggttgtcccgtccccctgccccagtacgttgaagaagaaggtgaagaagatctcatccagaaagccgtgcattccgaagaaaagaaagcggggtaggtcgggcagcccctggctgggggctcccccggcgcccctggggccacggggtcgtcgccgccgggctccggccgcagtagggacccgggcgccgggagggacggggagcgcgcccctccgctgctgctgctgctgctgctgctgctgttgctgctgccgccgcctctgtcgcccgtaccgcaagcgcaggaagcgcttcaggaacacttggcagtggtagagcgccagcacgtactgcagcgccaggtccagcgcccctggcgccaccgcgacccccgccccgccgcccaggctgagtagtagcgcctggcccgctagggtctgcagccccacgtgggccgaggggtagaggaggaaattgaagacgaaggcgttgggacagcgccgctgctgcaggtacaccttctccagggcgaaatgggtgagcgagtgcagcaggcagcggtagggcgaggagaagcctagcatccgcaggtccgggctgcgggcgaagcgccgggccgaggacaccagcacgtccagggtgatcccgtgcatcccgtagaagtagaggcgcatccaggcgggcagcgtggcgctctcagccggcgcttcagcagtggacagcggctccgggcagccggctgccgcctcgcttcctggcccgccaggggcccccggacgccgcgccgcgccgcccctccgtgcggggccctcgctgtccacgtcgctccccgccatgggctcggaggctgtccgaacgcccgaggctgcaccgccgccgctgccgggtgcgcggagctgcagggccgagcggccgagccccgcgccgcctcctggccgctgccggcccccggggggcgcgcagggagctccgtcccggccgcggtcccgcggcagcgggggctgatgcactcaggggactcgcgggccgcccggctagcggaatccccccgccgtggccccgctgcgccctcccttccagtcccgggcgaggtgccgcccgcccgcgcccgctctagctctcaccctgcgcggcctaacgggcaccgcggcccagccaggggaggcggcgccggggctgtgaggggaaatgcagaagcttgtggaagccccatcccctccgctgcttagccccgcgcctccgctgcaggctctgggaacgtaacgcgagcagcggcggccctgcccccgccctgccaatgcccctctccgcctgcctcgacctctcccgccttctcaggccgcccccacgcgcccgcccgccgcaccgagtcccacagggtctgctcgggaaggcccggccctgcttcttcctcccggtgcgcccactcaacacaggggctccggtcgtgcggggggcgcttgctgggcggaggcactgagtggagaaacacctaacaggtgtgactgcaagttgatgggcattccctgcatcgcggcaatcagggccagggcctggctggcggagacgaatggctgagtgccacgggctggaggctgggctcaagaccaaaatatggtgctgtatacttaatgttcttattcaaagccagctgtgtcccagtcatagagaataaactcgagactccacgcctgcccgcccctgcgttaccctccatctaaattgctgccgcggggcctgatccacttttccaatctatttcttggcccatctacttttctgggtttactcaaggccaaggacagagattcgatgtcccccagaatttgtgaaatgatttcaggccagttgggttgggttggggtgtggagaagaggaaatgctttgttctagctactgtggggtctcaggtggagaatagtacctcgtcctggcacaccccgctgctgggttcttcttttggcagaactaggtcatcccagaaatggagagtgacataaagggccagggtttatctttttctatcttttccctccctcccttcacctctcccctcttctcccttccctcattccctacttcctcccctcccctcccctcccctccaatccctccctccctctctctctcccttcctccctctttatctccttccttccttccttccttccttccttccttccttccttccttccttggttgagagagtggaaggggttcagaatgttggtgtgttggttccaccattctctccaattttgaatcagtcttggaactggaaagagcctcgggggtgaattataccgattacctccctctttctcctccttcccccgaaattcatgtgcggatagataacagttctgtgttagagtttagatcctcccttgatgaaaggctttctggggaatttttttttttccttctggcgaatagacataatgaggctgatcctctatttctaaggcaacctcctcctcacgctgtctccttgcctatttcagcccctcacgttccaatctgtggtagctaagttgactgtgaattaagagaaactttcatgtcagggacaggaatgtcaggaagttttcatgtgagggacagaaatgtcaggtagcaggttcatcaaacttgttgcaaaccaggtttgatctagttgcccaagtgcctgagcaaatacattgaagggaaataatgtaaacatttttgtgagcaccttgctatgcctacactgggaaaataaagggttataagatgctctctttaagaagtgtgtaatctagttaaaatgataataatctattatgccttcataaagcctacttatgattattatcaataataactgatcgtgatcatttaatagtaaatactagatgtttgtactactagattaatgtttattttgagtttttatttcattaaataaactcaatcctgggcccaatttatcagatattacaaacaaatgcactctttctccataactgctatttagacaacggaaagcacttcttcataacaccataaatgtagtcattcaaacatgtatatgctaacttgctatattaaacctgaattgttttcaaatagcaaattaaacttcaagggcccaagtcttctatttattctaacttttcttaaggatgcaaggaaaatcttgaaaatctgtcgtccaacctagaattcatcccagggagtgtaggaaaatcttttggattaaaaaaaaattagagctttcatttctgtatttttaatttcagcatttaaaaatttctattttgtataccttatatattttat

SEQ ID NO: 587070 - DNA, 4001 bp, Homo sapiens
cctaaagtttcctaaataatcccagtgtgatatattcttgtagtaagtaagtacgcaataaaagatacatttggaataataaagttcttgaatgggtttcaaatggatcatgggcaataggaaactgaaatcattggacgttttggcccaagctgttcagaaaacatcaatatttctaagtgtttgcataaatggacaagtccattacaccaagtcatctacctctataattacaagagctatgagttaaaagaggtcaaaggtctggatcacccagaaccccaatctatgtgctgaagcacgctggggaggcactctcttagttcttgggacagatggacaaatttctcatacaaaagcaaccagttcttgtctgtaccctaacatgtccctgtcgtagcacagatccaaccacatcacatttgtctacgttttttttctccacctgacagggttccttggctccccagggccaagtacataatggtcaataaagtttgcctaagatggaacatctactggaggaggaatgcgtctcaaaccaggagcactgtgggctgggattatacaaagccacaagatgaacaaggtgcatcttcctggagatcgagtttaaaacgctttcatattaaaacattttgagaagagaaagtaaaatccacgtggagtttaaaaaataaagtagtcctgtggcagcctcttagcttccaaattcagggctattccccagactgccaggtgtaccacttccctatcctatctgctggagggctcctgccaaaactaagaaatcccggaagctctggactctacacgtgcattacctttggagagttgaaagcactttatcagaggtcaaagaccaccaatgccacttttttttttttttccttcttttaggccagtcaagtgaagcagggagattggagaaggagcaaagaaatctgtaacgggctatgatcaattagttgtcaacaccactgcactgggaccagccaaccaatgccacttttagatgaaaaaataaaccaggcagatcttgcccaaactactcagaaagttaatgctgacgatagaaaaagatctctcctcaattgttggcccaagacatcacataattaatcctttttaaaaggtgttaaacattttaaagcctagaataacgtatggtagcctgttcaggttcagggaccccttgatcacttcctggaatggaggccatcattcaagaatccctcacctcaagcctctcccctttccttgcttggctgcttcactgctcagcaatgaacccttatgagttctatgtaaacaggaatcagaagcaccccttctcggctctctcaggaagctctgggcgcacacctgaagtctctggagggtcagtactcctgctggaggtgcagctgtacaaccactaaatcaacctcccctccggagggggttcccgcactccccagaagggcttccaacaaccccgaactttctgaacttttctccactccagccttcaaggctcttagccaaccatgtcccaaagcaggcgacgattggccgggcaaacatcttgagagggaagtgggattgcagaaccagcttcctccctaaaagtgcttttaggagccgcagaaagacgcagcccggactccgccagagggcaggcagcagacacaccccccatcccagtctggagtcacaatccgcactcaccttggcggacgtctccccaaacagaggtctgttgtccaggccactggtgccgtaggtcctggtagcaaagtcctccattttggggtttcttcactttccccaagccacttaaaagcaagacagcatgacctcccgaggtctcaggtccacgactgcaagcctcctcctcacggctcccgcatagccgaacccgagtggtcggggaagcgctggcgccagggatgggtgggggctcacacgcggggaacgcgactgctccgccccggccccgcgcacctcctcatcttgagcagctgccgcaggaagtgaaaggaaacaaacactgcgtggcagactctcagcgggacgcccccgcccgggcagctcccacttcctcaaatctcagcccttggcgccgcgtggctctccgcccctctgggccgccagggtagcgccgcccgccgctcgcccccggctagcacagcaaatcgcagtcccctcgccccgggagagactcccacacgtcgccccccatttttacacaataatttcccatgttttcccaattttctacggtaagcacgtattccttcatgttcaagggagaaaaagttttcttggaagaacgcattgagaacccctcgcctagccttctgcgtctcccccactacgttccccagtggcggcgggaggagtgaagttgccggagcacagcccagcgctccgcacacccctcccgcagggcggcgggttcaggtcgctgccggggccgacccaagcaacttggattccctctcatgtgttgcatctaccccagggccggcgtgctcgccgcagctcccgccgctgctctccccgcgctctctgccggaactgcagcaggagtacggtctaggcacagcgagagggagaatcccgcctcggccctgcccatattggtcccgcgcccgccaaacctcggcatcccctaggcgctcgcacgctggggggccctggccgcgccggggagagtgggccctgggtccacacccccgccgggatccggtgccgaggcccaggaacgcgggccagatgcgtgggagaggaatcgcgcggtcccgtcgcagcgctgcggatcacctcccggctccttctcaggtcccccgacccggacccgctgcctccgtcgcaagtcggcccgcccaggtcgcgtcacgaccgaggccgccaatcccgcgggccaaggcgccgcattggctgcggagctttatttctagaggtgccagcttattccccgtggggcggccaatctccgcggctgcacgtttctcagctccttagcccttagtaattagtgtccatgcgatccacgtgggcaaagcacatttctgcagatagccttgcacctggctgaaagcatcttaaaaacaatcaacctgctttaaccacctcagtcttcgcttaacgaggacagaatggcagtcactggtaattttggtttagggttgttcgcatgtttgccttgatttgttctgtgacagggatcttatgtgtttatagaaagtcaggaggcgacagtgctagatacttatttgacttgtccactcatgccgccagtgatggtgctgactaagcaagtttgcagctgtggagccagcgcttcgcataccaatctcgtcttccaggctctagggcatagacaactggaggtggacaggtcgttaaaagtaacaacgtcactctgcatttcgaatcatggataaatatacagccacgctggattctcagggcactatagcgccgagactgaagagagctctgaaaacgtttgtgtgcagggaggatctgggttggaacgttgtacccacacaacatttagaatccaagccatgattcccggcgtccactcaacagtttaggacacgggatggactacaaaccatgtagatacatagatctggaatttgcaacactgagcaggattagtacggtgcatatctgacctacaagttatatattttacaaatcatgtttgtttgctcaggactttctgataaaacagcaatgctacgcaatcctgcacccagttatcttagaagattgaatggcggtacaaataactttattcactcacattcagccacattcaacaaaatacttttgagaatctgctatgtaccagacaactaccagacatggtaatatagtggtgaagacacaggcatagtcatagtcttgaagctagagtggaaaacagagatgcataattagaatctagagaaaagagatacggtggctaagagcacaagctttgaggttgatcgtttctgcct

SEQ ID NO: 587071 - DNA, 4001 bp, Homo sapiens
ctaacttcgcgccactgcactccagcctaggcaacagagcaagactccgcctcaagaaaaaaaaaaaagttagtttctgatcctaaccataacaaaatcctgaacagttggtataccactatggcaattcagtcctgccacattttctagcctattgcttcctctaagtacattccttacaggcagaaactattaatatattcgcacttatgccaggtgcgggtggttcacgcctataattccagaactttgggaggccgaggaggatggatcacctgaggtcaggagttcaagaccagcctggccaacatggtgaaaccttgtctctactaaaaatacaaaaattagctgggcatggtggcgggcacctgtaatcccagctactagggaggctgaggcaggaggattgcttggacctgggaggcagaggttgcagtgagcagagatcgcaccactgcactccagcctgggcgacaagagtgagactctgtctcaaaaacatatatatatataatctacctttcctccttgccacagatgcagctagagcctaaacggagaaggtgccagttaactagcctttggtgattttagcattgagactccggtgctagcagtgattccagtccacctgattcaggccacaggaattctcccagaatcttcactacaagttgaaactccaaatccttaatcctagagagtaaatgcacttagggtcaatgcacacctaagtataccttaggtgcgcgacaggtctatttcctgtcagaatccctagatgaaaagaggaagtagatggacacccttatcggtcaagcgctgatggaacactcatctacaaatgagatacacatgctgagaccctaagctgacccaagctgatggtgctatcgagacaaaccactttatcacatattcatcagcagtctcggagtttttcttcccattccctcccgtagcggctcacctttgaggcaggaaagaagcagttcaggcggaagccacaatctttacaaagcaggcttcagagaagctcaccattcatcagccagtgagggctgtcacctgctagttgagaactaaactcagacatcagattcttccacaaaggcctcctcaccagctgtccgatgggtacggcgttcaaacgactcaaaacagcacaacaagcctggttttatttctgatggtccccatcaagggaactgaaactacatgcctctagattaccttgcgatcactcctcattttattaaaaacatgaagaaagaatccaccccattccggatatttaccaagcttgacacagggaacaccactatgccatttaactttgtggacgtacgtgagtctctccctcccacctttctgagatgtgtttcactgccaaacggagaagaaacgcaaacactccccaaagccgaaaaatggcaaacgaccaagatgtttcccgtgccaaatccgaattatccaggcctcggctccagacgtgggaagtcccgccatctccaaggccggcagggaaccctggctcgggggacgcgagtgggcaaaccccagtgtggggggaccaggccgaggtcggccgatgctgggcgacccccgccagcagttggggcggggtctgcaccctgagaagcggtgaaaaaagccggcggaggagccgctcccgaccagcacgctccccgctcccggccccgcgggcagccccgactgggcccgaccccagcccgccctccagccccggctcaccccgccccggcgggcagctgcgcgccccgggcccagccgggccagctgctcggcggacgcccgcggtcgcgctgggctcactcgtggcggcgcgtggcgggcccgaggccgctaggcaccatcttctccccgcgccgggggcagcgtctggctccgcggggccgacgcgaagaccagacgccaaccgggctcccgccgccgcctcagttcgggctccggcaaccgcggtttccgggtgaaaaaaaaaaaaaaaaccacgccacctccaacgccgccgtgacctccgaccccgggcgtccgacggtggcgcggccgggacaagcttcgtcagaggcaggcggcggagaccacgcttccgggacgggtagcgtgcatgcggacgtgcgtggagtgcgtgatggacgtttatgggtctgtgtgccggtctggtgttgtgcgtgtgcgtgtgtgcgtagtgcgtgtatgtggcttgtagtgtgcatcgtgtacaacggtgtgtgcagtgagtgcatgtatgtgcatctgtgtgcgcgtgtgtggtgtgtgatggtatgggtgtgtgcatgcgtagatgtgtagggagtgcgcacacgtgtgcatgctcatgtgtgtgctatgcgtgtgtctgttgatgtgcttgtatattaatcactgctgataaacatgtaattttggaccaggcgcggtggctcaggcctgtaatctcagcactttgggaggccaaggcaggaggatcgcttgagtcctggagttccagaccagcctgggtaacatagggagtctctgactctatttataaataaaataaaatgaaaatgaaaatttttaaagtataattttgtacaatcactttgcaaagtaatttggcattatgcagtacacttaaagatatacacatcctctcttgagaatatattaccctggagaaacagttgcacctatgcacaagtagacaaaataatgctcatagcaacaccaatgtttttagcagcagtatgactcactaaaaattggggagaaaaagcagatgtccatacagtcaaatgtaaaaaccaactttgatatattcatggtttggtttgtttttgtagagacagggtctccctatgttactcaagctggtctcgaactactggacccaagtgatcctcccacctcgggaggatctgggattacaggtgtgagctgccacgcctggcccatcttcgtgtttaatcgggtacaaaagaccagtgaaaattatttaatacagctcacacaattatggtagtcaattgcagactatattggcagggaccaaatcacaaaatggtacactgctacatatttccattatgtaaaattcaaaacaggcaagttcataacatattgtttagagatgcatacataattgtttgaactgacatgaagcatgagaaaaagatgtataaacttcatgttaagtgttaggggaatgggatgggggaggagtacagggtgctttaaaggtaataaagttttgttgttcttgcttttgagacaaggtcttgctctgtcacccaagctggagtgcagtcgcatgatcatggctcactgcagactcggcctcccaagctgaagtgatcctcctgtctcagcctcctgagtagctgggaccacagatgtgcaccatcgtgcccagctaattttcatatttttcacagaaatggggtttcccccaaattgctcaggctggtctcaaactcctgggctcaagtgatccgctcacttccacctcccaaagtgctgggattacaggcatgagccaccacacccagccatctttaacaaaagtttatcaggtgaagcctgtaatgttcaacacaatggctcagttccttcactgaataccctcttatttccatgattcttgccctcttttgttatcttgcaccatttgaattatcttccttgttgtaatgggtgtgacattatctgcaagtgcaggcagtattgaattgtgtatataatgatggaaccaaacttcctaatgagatgtcccttaccaggctaggactgataatgtaattaaaggagccccaccaccaatggcaccatatatgacttagtgattgagaccgtaggagaatgtaaaaaaggcaacctcaaacctttcatcctagctgccttgtatgggatttcaaaaaaaatttttgtttttgttttgagatggagtctcgctctgtcgcccaggctggagtgcagtggcacgatcttggctcactgca

SEQ ID NO: 587072 - DNA, 4001 bp, Homo sapiens
tggaaaaaggataagtagaatgggaaatcagaagccagactgcatgcagctgggtaaggagttaacagaagaccaagaaatggaaacaattgagaacattttattcctttgaggcatttggagaagagaaaaatgaaagatagggtatatgaaactgaaagaagaaattttcaggaaaggaagaatttatgactataaacagaaataagccaatggggaatgacactgaagatgagagaggatacttgatggaaagagaaaaagatcagaaggtgctagggataggaacaaaagcatgcgtggtaggaggaaagatgcaggaagataacagggaaaaggtgaaggaactggctaattgagccaaataccctagattagcgtgctcaattatattttagaactaactttgatgtactgtgcaacatctctactactttaaatagtgggtggctatcacagtgcaagaggacacatctgttctatttcaacagttaagtattagtctcctaactcacctcttttcccttatacccatctagtggcacttaaacttgtttacttaattggcaaaggcttcatactgcagtaattttgcttctaaggaggcatttttctgtgttggtttcctttcccggccagaggctgccatagagtgggatgtgggactgaatttggaagcagggttggaggggtgtgtgttgattaataaccatggatggatttcatcccgtaaattgcacaatccccacctccaatctatcaggccgtttttgtgaacctctgaaaaacggtttatgattatacacttgcttaaacctaactgttccatctgctatcggataagacaagcttcatttttttcttacatttggctgtacttaccacaggtgctttagggctggaggtgaaaggatgcaagtaacaatcttattgtgcctacaagatttataatgtgggatgcaacaaaattctgttatgttcttgcacggaaataccctcaatggggaagcactgctgatacttaaatgacgattgaaggattgtacgcctgtatgctgagctacaacgatgacatacgatcccagttttacatttacgtcttcatcaatttgagcagtcgttatgtttcctactattctctccacaagaaagggggaggtgcgtactccaaaaatgtgctcaactaaaatgtttcccatttaaggtggttatttctggcactaggaagacagttaaatatttgttaatgattccttactcatttttaaaaccttcggagttacccctgtatggacatatatagagccccacccacatagcccacggctgggtatcagcccccatttcccttctctcgccactgccagtagtctaccaagtgaacctgcctcatcccaaagataattttgcttcatgagcccacatatttattcttcttcataatgagtcgcttttgaaaagcccgtgcagcaacagccttggccaaaggaacagcgttctgcttacaacttagctcatctgggggcctatttgcccctggaacttcaggacgctcctaaactatacttgcccttctgcaaacaccgacagtcggctcgcggcgccccaccgggacgctcccctttcatgggctgtaagcccagcacatgctggagtttaacacggttcctgctggatgcgcacagaagccctggagccaagcaggcgtgtgcgcgtttggggctggctgtgtgatgggttgagggtcggccgcacagcccacggaagcatcaggagaccagcgccggcgtacggtgcgggctagggcagagccccagactcacctggcagcgctgccggccggaaagcggagagggacgcgaagatcagcaaattcgccagtttggatccttgtccttttccgcccttttccccccattaaatccagaacccgtcacatgataattaagaaaaaacttcagttccgcctcctcaaacgactgcggtagaggatctctcagttctacctcagtgccgcgcccacatccggggctggttctcaccgcccctgagcctaccctataggtagagaggacgccaatctggattcagaggtcccttttccgcggtaattggaccatttgtccgccagtgcaaaccaaccgacctttccttactttcgggttcgacagaaaggcggcaataaaaagacccattggtcccgcctctctactgtcacgggttagtagggaagtcagtccaagatcagcctggagtttccgtgctcccattgggcccacagatgttaatcagagcagccggcgctcagctccgccctctcgggacgccccgcccctcctcccatcctccctgcccgcgcgcagtgactgcaggctccggcgcaaaatcctgcgggagagggggtggggcaaccctctggaggcagcgcgcccgcgggcagcctcgttgtggctccttgggctctgttggcggcggcgctagcttcggagtctcccgcgcgcacctcagccgcctcctagcggcgcggcgctcgctcctacggtaagagcggcatcacctccgcgctcgggtgggcagtgtggaggtcgtcgagttctgacagaatttcgaggatggatcgggacgagggaggagagcggtcgtcgggatggaggtgggggctccggggccaacgcgtcgccctccgtcgccggcgactttcccggcagtctcccgtacctgagggccggggtcagccgcgaccccttctcatcagtcggccggtggcggaggctcagccgccttcctcccgagctcgcgcggtcctcaagtcttgatggtgacgggccgaagcccagcgcgccacccgcccctcgggccccgcttccaggcccctgtcctttgcttccttcccttggcgctgtgctgaggggtcgtcgggtcctggaagggcgttcaggggtctcgggtggctagcccggctggcggggagatgtcagctagcggccggaggagcgggctcgggagggggcggcggctcgcgcgctggaggaggtggaaggagggtcgctgccctgccccctctgagcaggcggcagtcgagttttctgatcccaacacggcggagtgggtgcttaaggcatgggccttaagggatagttcccgtctggaaacaataccgtgctccatcagcatgcttcagcttttcttatttttatctgcccagtgttgacagccagcattctggtattgtccttcgagtcatggctttctaactcagcacctccttgtgtaacttcagggatcattctgtcactaatctgtcacccttcttatttttagcgtggcgaaaacaaggaactgccttatactaacctgggcagtgcagaatctggaacaatttattaatctcagtgtgtactttacatgccaagtaattttgaaattcatggtgaatattaaatattttgtagttttcggttgctttctttgttaatagtatatcctccttgctttgagactacttttcaggtgtgatactttaatcttaaggtttttggttagcttttgccatttttaaacgtttctttcattttttttttctccaagactttggcaagagacttagtatttgatcttgttttcaggtatttttgtaaagtttattttctttcaaactgggcttttttcaccatatttttaatattggaaggggaattctgaaagtctggaaactgcacactttagcctaaagagtcacaaaacagtataacaatttgaaatcctaacttggatatggtgtatggactgcaaattttaagagaaggaaatggatatgcgttatcagttgtagtggctccacctccataacgtagaggagaggaatctggaggtctgcggagaatgagccatgtctggggccagaaacagtggttccaggaaatatttttgccccagaaatagcctgcctcccacacagactggctgtctgaatgcatctgatagttttaagttaggtgtta

SEQ ID NO: 587073 - DNA, 4001 bp, Homo sapiens
gcgcccgcggaggcactacgggcggtacatggcaaaggccaggagactgaggagcagggtgaagccggccaggcccagagtggcggtcaggggaaagaagggccggtactggatctggcagtaccagagcagcagcaacagcaggagcagcaggggcagcagcaggctgccgatttccagcccggaggggccgggctcggaccccggcgggcaggggggatttgggggaccgactctcgtggacacgtggcagtggagaacgcagttgggagggaggtgaaggctgcccagggtctgggtgtcgtcgcctagcagctgcccttggtagatgagtcgcacctgctgttcccggccgggaaactgggtcctgaggagagagggacctgggtaagagagcaggcctcaggcaatcctagtccctggccccggaacagcactcccaccctccccctgccctccacaacacaccggccctggcctgggaggggccgtctgccaggggaacaagtacagttgtgatctggggcgctcagcgcctccagtataaaggagggctgggtcttaggtgtctctgggggccttctgcgaccactctcccaacccctgtctttagcattgctcctgcctcttgacctacttaccttttcaaggagccaatggtgtcgtggggccaggccctggccacctgctctgaatcattgaggaatttcagccgtagcacgaggggctcctgcggggagtccggggctggcggtgttgctgtgaaccccgtgctgggctctggctgtgcagcttgacctctgtgtctcaggctgggggtctctgcccctggggcctcccctctcatgctgtcggtagctgccatggctgcgctgggctgggatggcgttggggtccctgacggctggggcagtgggtccccgccctcagcggtgtgcgttgagacccaggcaagggccagcaccagaaggcaggcaagcaccgagaaaaggacggtcacctcatcacccaccccttcaatcagggtcatggcgcctgccttgcccgccgcgctaccgagctggagaggcacaaagagcccgtgaggcccgggccccctggccaggagccctggaacctccacagggtcctgccctcaccccaccgcgacgctcccaccgtcctcagcctccgtcccctcacccaccccagggtaccggcttctctgcctcccagtcgccccaaacttgcctccgggtgccccttcccatcgccgaatcccaagtcctaactttctgtcatctgagctcgaggtcttcaaccagctcccaactcacccaaaccctatcccaaggtaagggcctaagcaacgcctctcctaaacttcaccccaaccaaacttcacccccaagcgtatctattctcctgcccacttcaccccagtgtgtctactccttcaccgacttcaccccaggctcatctactccgctgctaaagtttctaagaggtgggggtagagcctctgtgcccccacccccgccccccgcgttacggttcacctaaaccccacccgcggcacaggactgcttcccaggcttcccccacagcaaacgtcaaactccgcccctgggcaatctggagccaccgagcgtcaccacccacccagctcggccccctccaggtcccctcaaccccactccgcggaggactaactccgcgcctcctctggaagtctctccaagccccccgggctgcctgaccccagatcccgcccggaatccgagacttcacgttccccacccccacctctcatcacccctcccaccttcccgccccccgaagccgcaggagggcacggcgatcccggcccgaccggggccctgggcggcggggtgggcgcggtcacggcgcggggactcaccgcccggctcccccagctccatcgcggcccctcgggcacttccgggcgggaggcgcggaggtcgcaggcacctgaagcacccctccttccccgccgccgcggcccggggcattgtggaacttgtagtccggcgccgcgctgtccccgccctccgccctgcggacccacgtgtggggctccacccgcggttctctgcgcctgcagatcgcgaaggggctggcgggggcggttttgggggttgtgctaccccctagaggtttgggcggcagcagcgtccgccccctcccctgccaacagccagggcatctatcacaccagacaccgacgtcagctggagcacgtcagagtacccgtgttcgtgatgcagtgtggaaggctctgaggaactcaggtggcccctactgttatgtcagagtggacgccagaaggcactttggccaccaaaattaattcttcagcccagagcccaatatccatgggctgccccaccaggctggctagggatacccatcctcagggctgcccctttccttggtcccctcctccaccttcgggactccacagccccttcagggctgtggaagaagcatagaccttggaacctggcagaaatcctgatcccttatcttgtgcttctcagctatatgaccttgggtgggttattgaatctctctgaacattaatttcttcctctctaaaacacacctcgtaagtcaatcataaggaagaaattagatgttttattaaaaagtgtaaaaactaaggtacatgtcacacagtagctattcgctcacctccacccaaacctggtctcaggagtcgggtctttggtgtgttactgtgtggatggcattgaatcccaggcctgtggatatctggatttttccctctgggctcctgtagccacagagatctcacatcctggtttttacaggccagtcttgatttaaaataatctatcctagtcttcccatggttcttgcctactgtgggagcaagtggcccaaatattgccttaggaatgtcagtctagattgataccatacagaactaacctacctctagttccatccctcctgttcattcatttattctactaacatattttttaaaagatgtactatggccaggcgcagtggctcacgcctgtaatcctggcactttgggagccaaggcaggcggatcactgagttcgagaccagcctggccaacatggtaaaaccctgtctctacaaaaaaaaatacaaaaattagctgggcgtggtggcgggcgcctgtaatcccagctactcgggaggctgaggcaggagaatcatttgaatgcgggaggtggaggttgcagtgagctgagatcgagtcactgcactccagcctgggtgacagagtgagactccgtctcaaaaaaaattacacacacacacacacacacacacacacacacacacacacacactatatcccaggcattgtgcaagatactgggaataaaatggtgaatcagaccctcttcctgccctcatgtggctccatatactagtagaagagctagacgtgtgaacagcccaacagtgctataacacgtgtgtgctagttgctggggcaacacatttgaggagctctttgctcttagtgtctctcttgggaggtatacctggtgctacttcctgctgtcaattctaattaagcacctaaaagagatgttggatgttacttttagaattatacaacatcagaactaggttttatgttcaaccactatatttcgcagatgaaacccagagagggcacaagatatccttaagcttatgcagggagatagaaacacaggttcctcaggagcttaggagaccctgtgtgttgattagcttgcaccaggtgctttggaaggtacaaggaactcgggaatagtgactgggttggttctggggctgagttgtgtgggtaatcaaacagtggacagcttcatgctgggaaaagatccagcttggccagggaagtggaagtgtgcgtaagaaggacgatgtgtgtcactgatgccctaggatatctgggggtagcagataccctgcaacatctctggcagatttattggctgcggcct

SEQ ID NO: 587074 - DNA, 4001 bp, Homo sapiens
cgggctgagggtcagcagccccgggaggtggccccgagccccggcggtcgcagggcggggcctccgccagtcccgggagtcctctgcggcgcagggctgggctccagggcggcgggaagaggcaggccggagaggcgggcctgggcaggcagcagctcccgccgcggcgcggggagcaaggtccggaggggccggcgacgctgccaagcgcccgcggaggcactacgggcggtacatggcaaaggccaggagactgaggagcagggtgaagccggccaggcccagagtggcggtcaggggaaagaagggccggtactggatctggcagtaccagagcagcagcaacagcaggagcagcaggggcagcagcaggctgccgatttccagcccggaggggccgggctcggaccccggcgggcaggggggatttgggggaccgactctcgtggacacgtggcagtggagaacgcagttgggagggaggtgaaggctgcccagggtctgggtgtcgtcgcctagcagctgcccttggtagatgagtcgcacctgctgttcccggccgggaaactgggtcctgaggagagagggacctgggtaagagagcaggcctcaggcaatcctagtccctggccccggaacagcactcccaccctccccctgccctccacaacacaccggccctggcctgggaggggccgtctgccaggggaacaagtacagttgtgatctggggcgctcagcgcctccagtataaaggagggctgggtcttaggtgtctctgggggccttctgcgaccactctcccaacccctgtctttagcattgctcctgcctcttgacctacttaccttttcaaggagccaatggtgtcgtggggccaggccctggccacctgctctgaatcattgaggaatttcagccgtagcacgaggggctcctgcggggagtccggggctggcggtgttgctgtgaaccccgtgctgggctctggctgtgcagcttgacctctgtgtctcaggctgggggtctctgcccctggggcctcccctctcatgctgtcggtagctgccatggctgcgctgggctgggatggcgttggggtccctgacggctggggcagtgggtccccgccctcagcggtgtgcgttgagacccaggcaagggccagcaccagaaggcaggcaagcaccgagaaaaggacggtcacctcatcacccaccccttcaatcagggtcatggcgcctgccttgcccgccgcgctaccgagctggagaggcacaaagagcccgtgaggcccgggccccctggccaggagccctggaacctccacagggtcctgccctcaccccaccgcgacgctcccaccgtcctcagcctccgtcccctcacccaccccagggtaccggcttctctgcctcccagtcgccccaaacttgcctccgggtgccccttcccatcgccgaatcccaagtcctaactttctgtcatctgagctcgaggtcttcaaccagctcccaactcacccaaaccctatcccaaggtaagggcctaagcaacgcctctcctaaacttcaccccaaccaaacttcacccccaagcgtatctattctcctgcccacttcaccccagtgtgtctactccttcaccgacttcaccccaggctcatctactccgctgctaaagtttctaagaggtgggggtagagcctctgtgcccccacccccgccccccgcgttacggttcacctaaaccccacccgcggcacaggactgcttcccaggcttcccccacagcaaacgtcaaactccgcccctgggcaatctggagccaccgagcgtcaccacccacccagctcggccccctccaggtcccctcaaccccactccgcggaggactaactccgcgcctcctctggaagtctctccaagccccccgggctgcctgaccccagatcccgcccggaatccgagacttcacgttccccacccccacctctcatcacccctcccaccttcccgccccccgaagccgcaggagggcacggcgatcccggcccgaccggggccctgggcggcggggtgggcgcggtcacggcgcggggactcaccgcccggctcccccagctccatcgcggcccctcgggcacttccgggcgggaggcgcggaggtcgcaggcacctgaagcacccctccttccccgccgccgcggcccggggcattgtggaacttgtagtccggcgccgcgctgtccccgccctccgccctgcggacccacgtgtggggctccacccgcggttctctgcgcctgcagatcgcgaaggggctggcgggggcggttttgggggttgtgctaccccctagaggtttgggcggcagcagcgtccgccccctcccctgccaacagccagggcatctatcacaccagacaccgacgtcagctggagcacgtcagagtacccgtgttcgtgatgcagtgtggaaggctctgaggaactcaggtggcccctactgttatgtcagagtggacgccagaaggcactttggccaccaaaattaattcttcagcccagagcccaatatccatgggctgccccaccaggctggctagggatacccatcctcagggctgcccctttccttggtcccctcctccaccttcgggactccacagccccttcagggctgtggaagaagcatagaccttggaacctggcagaaatcctgatcccttatcttgtgcttctcagctatatgaccttgggtgggttattgaatctctctgaacattaatttcttcctctctaaaacacacctcgtaagtcaatcataaggaagaaattagatgttttattaaaaagtgtaaaaactaaggtacatgtcacacagtagctattcgctcacctccacccaaacctggtctcaggagtcgggtctttggtgtgttactgtgtggatggcattgaatcccaggcctgtggatatctggatttttccctctgggctcctgtagccacagagatctcacatcctggtttttacaggccagtcttgatttaaaataatctatcctagtcttcccatggttcttgcctactgtgggagcaagtggcccaaatattgccttaggaatgtcagtctagattgataccatacagaactaacctacctctagttccatccctcctgttcattcatttattctactaacatattttttaaaagatgtactatggccaggcgcagtggctcacgcctgtaatcctggcactttgggagccaaggcaggcggatcactgagttcgagaccagcctggccaacatggtaaaaccctgtctctacaaaaaaaaatacaaaaattagctgggcgtggtggcgggcgcctgtaatcccagctactcgggaggctgaggcaggagaatcatttgaatgcgggaggtggaggttgcagtgagctgagatcgagtcactgcactccagcctgggtgacagagtgagactccgtctcaaaaaaaattacacacacacacacacacacacacacacacacacacacacacactatatcccaggcattgtgcaagatactgggaataaaatggtgaatcagaccctcttcctgccctcatgtggctccatatactagtagaagagctagacgtgtgaacagcccaacagtgctataacacgtgtgtgctagttgctggggcaacacatttgaggagctctttgctcttagtgtctctcttgggaggtatacctggtgctacttcctgctgtcaattctaattaagcacctaaaagagatgttggatgttacttttagaattatacaacatcagaactaggttttatgttcaaccactatatttcgcagatgaaacccagagagggcacaagatatccttaagcttatgcagggagatagaaacacaggttcctcaggagcttaggagaccctgtgtgttgattagcttgcaccaggtgctttggaaggtacaag

SEQ ID NO: 587075 - DNA, 4001 bp, Homo sapiens
aattagctgggtgtggtggcgtgtgcctgtaatcccagctactcaggaggctgagacaggagaatcacttgaacctgggaggaggaggttgcagtgtgccgagatagcaccactgcactcctccagcctgggcaacagagccagactctgtctcaagaaaaaaaaaaaaaaattagtcgggtgtcagggcaggcacctgtaatcccagctactcgggaggctgaggcaggagaatctcttgaacccgggaggaggaggttgcagtgagctgagatgggaccactgcactccagcctgggcgacaaagcgagactctgtctcaaaaaaaaaaaaaaaaaaaaggcaaagttgctccataccaagaccagatttttaaaaagtcaaagttgcaaatttttaaatattatgcacttgcagcctaggagctgatttaataaggcagagcacctttaagtatcagttatgagttaaaataaagggaagggggccaaaaaaaatatggttgtgagtataaaatgcaaaaataaaggtaaaggtgagtattttgtcagcctgtaaaaaaagcctctttagttttcaaagtacttaatttttaaagtacatcctacattagaacctaagtcagccagataaccaagaatacacatttacacagaaatgaagcacagcaaaggtgtgaaaattagggcaggaagcataaaacatgaatcaaagaatgcagaaatacaacagatataagctacaattaaatatctcaccggatgcacacacagttttatatggaataatcaaagcagcagtgatacccatcttataaataaaaatctaaaagccagagaaataacaaggttagaggattaatatgaaacaaaatgagaactccaaagattttctgaaagcagaattactgttttttcttcatattatgttgccactccaaagcaaggggaaaactcgcatgagtaagaatctagaaacctgagaagtttcgagaagaacagactcaaactggagtgaaaataggcaaaaagagtgaggcataaggctacgactgggagcaaaatgccagatgcaagtcttggacacggaggggagacgaataaagccttcttaagcggaaggtggagaaacactggggttggatttggtgggaggaagacaaaacggaaaagcacggcccaagaagcaacggcaaagggagaacttaaacaagattagattgatgccacaatcgaagagtataagacctacaaatcagattctgccgggtggggaaagggccagttcgcgaccgatcaggtgcgactagtttcccaaaagcggcaaagatgtagcttcgcagccccaccccacgacagcagctcctccccaaggaggacctcacgaggtcaactgccgggctcaggttctcccccggagcctaggttccaccccgccccggccgtgcggcacagaactgcctctctgggcccctcaccgaacgctgcagctccccaagccaaaaagaggcgcgctcctttccgctgggatctgggtcgtggtaaagcgcctgcactgcctggtacacgagctgcaatgtcggctttgctccttccatggtggtggcggtagtggcggtagcgacggctctgattcttctccggaggattcctcggttgctccgccttcgcgcttcctcactgtctgggccacggccgctccctgactggcgccatctcctcctctttggccgttaccagggcagaaggctctccgtggaagttgccccctcggaaacagctattaggtcgtattcaggttcctggccttttttccggtttttccacttgattctagactcttgagtccacagattctggcgctcccgtcttcagtcgctgacttgccctcagaagcctatcttgggaggccacacaccagtgtacctaaggttcgtttacccggaccggaagcgacagcaccgatacctttggcacacttccgcctggtacactacaaacggcctccttcccggcacgcctcctcttgtctccccgccccctcccggaagtaaccctgccgggccaggagccgggaagaagagccggtgttctctctgttcctcgctagcagcttgggacattagcgccgagatgtgccccatatctgagctgccttcagctccttggaaacggatccaggtttttcctaccccttccgactgccccatccctctccagagaatccttttctgccctggtgatcaaggcgcgtcaattcaactctccctagagtggccacagtactggagatccaaagatgacttaagacatggtacctacgctggctctagtggaggagacagacacgtagtcaactgaactattttacaaacctgaaatatgtgccacattgagataaatccaaaatgcctagaatctttgttcagctcccctttacttagttcttaagcccaaaagaggtcttcattctgcttacagctcctggtgctctaactccagagcattttgcatacatctttagggttattctcacattgaactgtatttttgtgaatgcctttctgtccgaatccaataccagtggtctaacaattcacaaaagaaaacagaaatattggaaactgtactatggagaaattagggacaaaaggtaacagtatattgatattaacattgctgctagtcctttgcactagtaaataactgctatttgataaatgatcacaatgtgtaaaacactgtagttacaagatctcatttaatccgcctaacaaccttgccaagtattaataaaacccgttttaggcgctgacactgacctacagcgcctcagctccagcgccatggcgccctccaggaagttcttcgtggggaggaactggaagatgaacgggcggaagaaatgtctgggggagctcatcggcactcagaacgcggccactgtgcctgccgacaccaaggtgatttgtgctctcgccactgcgtataacgagttggcccggcagaagctagctcccaagattgctgtggctccgcagaactgctacaaagtgactaatggggcctttactggggagatcagccctggcatggtcaaagacttaggagtcacgtgggtggtgtggtcctggggcactcagaaggcgtgtctttggggagtcagatgagctgattgggcagaaaagtggcccatgctctggcagagagactcggagtaatcgcctgcattggggagaagctagatgaaagggaagctggcatcactgagaaggttgtttttgagcagacaaaggtcatcgcagataatgtgaaggactggagcaaggtcatcttggcctatgatcccgtgtgggccactggtactggcaagactgcaacaccccaacaggcccaggaggtacacaagaagctccgaggatggcttaagtccaacatctctgatgcagtggctcagagcactggtatcatttatggaggctctgtgaccaaggcaacctgcaaggagctggccagccagcctgacgtggctgccttcctcatgagtggtgtttccctcaagcccgaattcgtagacatcatcaatgccaaacaatgagccccatccgtcttccctacccttcctgccaacccaggaactaagcagcccagaagctgagtgactgcccctcccctgcacatgcttctgatggtgtcatctgcaccctattgtggcctcatccaaactgtatcttcctttactatgtataccttcaccgtgtaatggtcgggaccagaccaatcccttctccacttactgtaattgttggaactaaatgtcaccaatgtggcttctccttggctgagaggtgaaagggatggaatttgctcctgggtcccctaggccctagtgaggggaggagagagaacccatcctctcccttcttacactgtgaggccaagcagaagccaggggtgctgccctctcccacggtgccaacgcctttgtgtgttgtgtatgtg

SEQ ID NO: 587076 - DNA, 4001 bp, Homo sapiens
aaaaaaaataaagtaacaagtttcagaaagtcgcctcgcccttcaggatcggggggtgccgactgagtggccagaaatgaaatcgggagtagcccctttccactgaaaaatgaaatccaaactccttccgccggcggcttcaggctcccgggacctggctcggaaaagtgaccggcggcggtggcgcgctgcgccccagcccggactctgcctcggcggctgccgggtcctcccgaaaccggggagggctcctcggctgcgcccagacggcgtaaatacaaacctcctattttattcctaggcgtcaaatgctccggggtttaaaaccgtgaagccttgccacaaacggtccgaagtgtctcccaaaacactctggcactatctgatccgcaaagtttaatatttaaccttttggagacctcgcctcccttttccgagtttggtttttcctgagctcgccttgaaccgccgacggaatggtgtttttctgggggtgggaggagggagggtccaaagcgggtttattatttttaaagaggctcgtggtcccccccctttctccccccggggggcactgtgagtcccagagctcgagtccgaggacccgagacgtggcattctcgcctaaggactggaaagaatcctacaaaacaagctttggtttcattttccaacgccctggcctgagctcctgcagcccgaggacctggcctggcgtgggggatttgggggatgtcaagaggggaaggaaagggatcaagggtctcgctcctactctagcttccccccccacaaccaccccccaaaataacctacaaagaaagcctttgcaacgcgggcctgccaaggggcgcctcccccacctttgggtaaatccccctgtagttccaggttaaagctgtttgtttaaaagatttgtcctttgccgattctcgtgaggatgggagggggtcttggagcccacccttccctcgatctctgtctgcagcagctcacattcctgattccgggaggcctgggctctcttaagagaagccgatcacgccaaagccaccggctcccgggtgcccgcccggcgccctgcactccgcgcccagccccccgagcaggagaccccctcggctgcaaaacccctagccaaacccgccggccttcctctccagcctccctccccaactttgctaagggtgcctattttaacccggttttggttacaaacaccccctccctccctctctcccatcaggctctggttaccagattcgcgtttactttggaaaaatctaagatcgccacatccgaggatacatgtcttaaggaggcgatgagcttcccgtgatttttttttgtaagagattctttgggtagctttctttaaaagccagcgcctcgtagtatgcccaggcgccccagtttggggaagtcggggtgaagccccctggaacaccctcacactggcaaagaagctgcctcggctatctgcgggctccgctgcgttctccttacttttctccccctcttaaatggagttaaaatggctgaattccggcttttaattaaaaacagcctataatcgaaaacgtctcggcgtcccgggctcccccgccgcctgctgggaaccgagagaggaaccgccgcccctcggccgggccaggagggccggagcggggctgggggctcgcgtgggtgcccggggcccagcagcccacccccacccctcccggggcgccccctccccgccggccctggtccccgattctgcaatccggagccagacagtagcggggatccccccccgcgcaccccgaggggcaggcgtggttggggggcgagctggagaagtttggagaccatcgcgcccggccgggggccggcaggctgaccggcggcgtacctggcgcggctgggttcacggctccaggctccggcgacaacgactccggcggcggccccggctcccggcgcagctaggcgcccctgctgcccgccatcccgcggccgccgctcccctccgccacccgcagccgcctcacactttttgcccgcctttcctttttttggtagaaaaccgctccccgggccgagcgctcggcgcgccaactcctccgccctcccgcggcccggctcccgcagcccccggaaaagccagctttcctcccgccgagctccccgctttttaataaaatccaggtagcgccggtttaaagaatcccaaatctccatatacagcccgggattggaaaaggtacattacacaacccccctttcaagttcctctcgcaggatctaaaaaaaaaaaaaaaaaggcagcggaggggggtggttggagggggttgggggagggggagccctctccggcaaagaaacacgcattgttcccgggtgcccgcccccccccccagcccggcccccggccgccgcgcattggccgcgcgcgccgccaatcacgcgcatgtaaacaccttggcccacagccattcctataaaaccaattacggacctaggggctccagcagtttccaggctcccctcggcggggctgaatgatcaaaactggtggtgagaatttttccgggccgtttctaggcagccctccccctccaccagctcggacccccccctccctcctttctccttctcctcccttttccttctcccctcccccagcgtctgggctgagtgatcaaaatagaggaagatggttgtcgccgcaatccagggctttgcaaggcgcggtttaatgggccgcctgtcagcttcctgctcgcaggaggaggtgacaagccaagcgagccggagagggcctggggcccggctggctgcaccccgcactccgggccccggcccccggcctcccctggggtgcgcttctagtacgcgcggtggagacgccgaaacagacaagggctgctttttcccttgttttttttttcttccttttaaaacaaagcagcgattcattccctctcccccagcagcgcggtcgggtgggatgggcaggcgagaaggccgttttcctagcactgacctacgggtccctccctgaaacgcggtgtcagatggttactgattaatattttggagaggccgcggcggcaggcagcgggtgagtctctaatcttctaaaaggggttcctatagaaacgcggagcggggcgcgccccccgctcggcccaggcccgggctgcggcgcttcgcacagcgcgcccctccccaaagcccctctttgcgtgggcgctcccctctccttccccccccgccaacaaaaaatcagagcagaaaaaaggattagatcggctgagcgcgaactgaatccctctcgattctgacatttcagcctattagcatttctccacggagccttctgaaacctattaaagtgtaatattaaaaacctcttggctgggggcctctctcgccttccatccgccgcgccccctccagggagggcgagaccgggaaaaaaataaaatctgttgagctcagaggaagtagccgccaagcccaaaaagtgcttggctggccacggcggccgtagggggaagggagccccaatcccccagactttgtacttttattttgcgctttcagcaaaatcctttctgggttgagtagccgtgagctgcccgcggccgacctacctgaccgggggcgcagggagtgcggaccacgccagcaggactgtcctgggggcccccgcaccctctctctgcagccccccgagcccggctaggcattacgtaccctggaaaggaagcttggaggggcagaaatccttccaatgctgcctcgaagagcaactgcagtgataagattttaattaaaacaagagaagcccgctctttcgccccgcgctgcggactcagcgttttcgcattgcccgttctgttttttttaaatcaatttttaaggcaactttttgggaggggggaaaaatgagcgagttagtgcccattcgttctattttcttttctccacttttagaaaaaagtggggggagg

SEQ ID NO: 587077 - DNA, 4001 bp, Homo sapiens
tggacatgcattagaattcagtcgacagacgcgcagcagcagccaggaacaggggtctgggaccctagagtcctgtcccagaatcccaggctgcactaccaccatgtttcatttcatctcggccaagttacttagccttcctttgcctcagtttactcgtctgtaaaatggggtaatcataatcccaactccctccaaggaatgtaatttgggtgaaatgaaatgaatgcatgcaaagcatttagcacaggcaaacactcaatcggtatgcctgttactttgtcttcggggtcaccattactattcctaaggtcaggagtcgggcttgctgccagttcctcctgtcaattccctgtgtacacaccccccaccccctgtgctaccacacccccaccaggacccagtgcacctccatctctgtgtaatggccttgcccctccaccctccagctgcagcgactccccaccccctccctggccctcaaggcctcagcacagaaaagcctttcttaatacttgttgattgatttgcaaatataacctcacaggccccaaagagagaagaaccagaatcaccagaacaagtaaacctcattcaaaagggaaagcatgaaagcaatttaaaaaattaatatgcacagaccaaagcctcaagaaaatctaaaatgtcaaagggttggttagttcagaagggccatgcaatattaatacaatgagttctgcattcatacttttcagtatattttcagagtcctccatgatcatgcattcaaatagtgaaaaaaatggggggaaagccaacccggaagatcaaagtgtgtgaatgcgccccaaggaagcctgggggcttcccagggggttgtgaccaccctcagtagtgctctctgctggccccacaccctgatggcgctttgagtttttcaaccacgctggagttcgggtcatctgctgacactgtctggagaatgcctgaggaacgcctgaatctcttcccgccacagacactcaaatcactccaagcaaaggacccgggactcacatgtcaggccgctgcacagcaccgacacagagacccctgggccgtccgggaccctccctcctcctgcttgtcagcgacagctcccgcgtgccaggaggcacatgccacacagctggcccccagcctgggacagcaccccccaccccagaatatccccccaccccgaggtcccgtccttcagggaaaaaaaggaagcgcgtaaagaccccctgcctcccacccaccaaagggaaagggaaagagacgcactggagagcttgcctagaaaaagtaggagaagggtcttgagcctgcccattgaagcccctagctgcgctctccacctggagtctcgagacggagtcctagggagcaaagtccgctcggtcccgacagcgactgcgacatagctgctccggtctctgccctcagtccagggcgcccgggcgccacgggtcccactcgagtggtcctgcgccccagccagtccccaaacccagccagtcagcgcccccgtccccggactccggcgaagctggcccgcgccccagcccctgtcctgggactcctgccgagcccccgccccccacgcgccgcaaaccccgtacccgcgcgcaccaaaccccttgcccgtgcgcccccaaccgggtccccgcgctccctaacctgggttctcccgtgaccccatccccgcgccctgagctcccgtaccccgcgctccccgaactctgtctccgcgctccccgaactcagtccccgcgccccagctccagatctctgtgctccccaagcctcgttcctgcgcccggagcgcgaaagcccgcgccgggcccgaaacaaagaggaccgcggcgcgtggccgcgtttcctccttccccggccccagtacctgggggagcctgaggcgcggtccggcagggcgatggccgcaacgaggctgggctccgagtagcgcgcgggcgggcccgtcctcctggctggctgccggcgcccgcggcagggccccctcgaggcggcgcgggcaatcgccacggccggcccccgcgcccgcgccccgagcctggcgggtcacctggcctcatcaccctaacaatgcagcgcgcctccaggcgcccttcaccggggtcccccgccctgccgaggtgcgccctgggacctcccttcgctggccgcagagaggacctggaattatcagacccattgagcagcccaggctccaagtggtctggaggcttgcaggttccgccgggccggtgttagagtacctggggaggcgggttcggatcctggttcctgcacaaccagttcattctttcattcagcgcctgtgattaaggtgctctccgggagcaagacctaccctccctcctgtagctcatagcctagtgggagtcgcgcatacataaaggagcacagccgctccggaaagcctagggtgccgtagaagcccctgaaatacccagctaatgaagggaggaggtcagggaagtctttagaagtcacatgacttcttaaaatgcgccgggacaaatgagcagaatttaggcaagccaggggaaaccagaaaaacgatcccgagcagagagattctcagaggaggaaaggcctataggttgtccatcctgactgtccatccctgagattcagatggccctgaactcagtcgcttagcctcagtttccccatttgtgagatcgggggaatggaaaaagtttgcagaaatcagaagtgctcttcctccagggaggtcacaagagaaatttcatcagcggtttgtcctgtggtcctttccaggaaaacatcctccccgccagcctctcacagaagagacctagatttcatctgccacgtggagcaggcggtctcagaatcccacccggagcagggtccagggcaagtcttggaggacagtcaccaagaactgctttggattcgggaacagagctgcctaacccatccgcagccctggggtcctgccctgttcctctggccccttcagggcagcgggggaagcagggaaaacagcctgtcagagatggcagagaaaccgagcaagaataattatcctggaaaagactttcagaagtaaccaccagaaacttcgagtccccagatccaaacagctgagaatgtggggcctgagccacgctctgactccactcccaccacatgaggagaaacaagagctgcttttctggaagacttgaacaacccctgctgtgctctggaaggtagtgtcatttctcatccccagactgatctgggtatttattcccaggcaaaggcttcatgagcaccatgccccagcccctagagatgaggcaggcatttttcctacactctaggagacaccaggtcaagagtcaatgagatgagtcaaggggtgccagggaagatgccataggggaaggtggggaggaggtcacagccagctgggttaggaatgggggtgaggctggtactgttacgatctcctttgtcctgataaggaaacaggatctgacattctaggcaacttgttcaaggtcacccacctggtcaggcgaagaaagtgggagggatcaggactatctggccttgaggctactcttaacttcttcccagctgcctgcccacaccatccactctgtgcaattggactaaatcatcactttgctcaaccctctcttccattaagaccgtggtgatcttcacacccagagccaattacgtgctattctgtgcatcacagaaaccatcataatgccaaaaaccatgttggctgaatgacaacatgaatttgagcttcttgcagtgttagggcacccatttacaggaggtgacactgttgtttgtctgagagctcacagtcaggaaaactcagtgcagtgctggggttctctgaccctttgtcagggagcctcttctaaaatctctccaaactgctacccacacccaagccagatggccccaccggccacactgcccttgttggggtagcaatg

SEQ ID NO: 587078 - DNA, 4001 bp, Homo sapiens
aagttctataatcccaggttatcagttggcttgcaactcatggagaaatagaaaccacagctgcttagtcagagtgtactttatcttatacaatgcatgacacctaaattaaataggaagcagcaccttgttaaaaccatagcattttaaaatgtgaaactgagttttacaattgtcaaactatatgctcaaactgacacagctgggatgaaaaacctgctctttccctttcaccgaactgcctgagtggggcagtaaaattaaaaagaaaaaacttggccaggcacggtggctcacgcctgtaatcccagcactttgggaggccgaggcgggcggatcacgaggtcaggagatcgagaccatcctggctaacacggtgaaaccccgtttctagtaaaaatacaaaatattagcccggcatggtggcgggcgctgtagtcccagctgtgcgggaggctgaggcaggagaatggcgagaacccgggaggcggagcttgcagtgagctgagatcgcgccactgcactccagcctgggcgaggcagaccccgtctcaaaaaaaaaaaaaaaaaagaaaaagaaaaaactacagcctggccgcggtgattcacacttgtaatcccagcactttgggaggccgcgcgcggggcggaggccggctggaggggaggtagctaacttgaggccaggagtttgaggccagcctggcccacataagcaaaaccccgtctctactaaaaatataaacattagccgcgagcggtggctgcaagtctgtaatcacagctactcgggaggctaagggggaaggatcgcttgatcccgagaggcagagattgcggtgggcagagatcgcgccactacactccagcctgggcacacagcgactgtctcaaaaaggaaaaaaggaaaaaaaaagacagaaaagaaaagaaaaaactacagaataggtcccagtctgcaaccctaactgaaaaatattaacaaatccttgcagtaagtgaccgagcctgttggcaccagcctgtagtcccagctacttgggagactgaggtggaaggatcgctagagcacaggaggggaaggttgcaatgagccgggatagcgccactgcactccagtctgggtgacagagcgagactctgtcttaaaaacaaaaaccaaaaaaaccccaaatcctttaagtgcgctataatggttaagactatgggctctgatgccccactgcctgagcccctaactccctcagtcagcatagctgtgcgaccttggcaaaaaagtttctctacggctgtttcctcacctgtaaaatgggggcagtaatagaaatcatccaaacccttcatcgtacaggtaagaaagcagaggcatccaacgactattattataatcatgctttcatggcagtggtactttcacgaggtgtctcgattccctgaacaggactctttccacttaggaccacatggagcggtgaggaaaaacaccccgagaaccacctagtgctagagagtgaattagtgactttcacatccactggggtcatccaaccctccctacaatcccgagaaatatgacctccactttaaggatgcaaaaatagaaaaggagggattgcaagactgcttaaagaccatgcaactataaagcgatagaacgggaactcgaactcaggttagatcggccccacttgaccagacagcctcaggggccgtgcacggcagtgtcccctatttttctctccctcccccgacggccaaaaatggggctgctgtctccgccaccctcttccctccagtcactttcccggttcttctcccactgacccaggtaaatcacaagagggataaagccccagcgaatggcaaactggctccccttgaagagctgctgtagtctctgcttggcctctttgctcagcttcaccatggcgacggccgtgtggcgcagggaggaccccttacagcaaccacagcgtcgggaatccgaaagggaaaggaggtgcgcaggcgccacacacggcctttacggcaggagtcgtgagcgtcgccagcagaggtcgtaattcatcgcctttaaccttccctgctcttccgcctcgccggcagtagtaggcgcatgcgtggttgcgatcatggctggcggtaacttcgcgtttctgttacccatttttaaaacgcatcttcaggtgttccttccttctcatggaaggaacattaattaaattcagagggactgggttttagtcctaactcttattcctactggctgtgtaaccgtggacaaattatttaacttctcagaatcaggttgttcaaacctgaggttgaactgcaaaaaggttacgaagtgacactcagtagggcccgaatccatgttttctttgatcccaatcttttttaaaaaaatttcttttaattacttgccaacattttagaatttggaaatctcacatgaaattctggacttttgaagctgaggaattccattgcaacaatcaaggagactaaataggaaatgacacttctgtttggccatcttgccctcattggtttagaatggcagtggttctcaaccctggctgcacattagaatcactttaggagaggtaaaaccatactcacgctggagacctactcctagaaattctaaagagtttggggctgggaactggccattgatctgcctttgaagtttcccaagtgattcccaacctctgatgtaataaatttctggctgctgtcgtatttgagatttgacccccccaggtctaagacttaattgatttttaaggctgtaagacatttctaagactttgacttttaagactttcctgcctcattctgaaggtacgtagtcgttttctgtgcccaatgtctgtgctcctaaaaatttccccttgctgacctctgtggcttgcgcctgtaattctggctatttgggaggctgaggcgggaggaccacttgagtttgatgctgcagtgagctgtgattgggtcacttgctgtaagctcccaaagggttcactttgcccgctgcctggacagagccgattgatcaacactggggaattacaataaagagtaattcacgcagagctggctgtgcaggagaccagagttttattattactcaaatcagtatcccatagcattcggggatcagagtttttaaggacaatttggtgcgtggggagacagccagtaagtcggaagtgctgattggttgggtcagagatgaaatcacagggagtggaagctgtcttgtactgcctcagttcctgggtcggggccacaagatcagatgagccagtttgccgatctgggtggtgccagctgatccattttgcaggctctgcaaagtatctcaagcactgatgttaggctttacaatagtgttattcccaggagcaatttgggaagggtcagaatcttagttcctgggttgggaccacaagatcagatgagccagtttacctatctgggtggttccagctgatccattttgcagggtctgcaaaatatctcaaacactgatgttaggctttacaatagagttgttatccccaggagcaatttggggagggtcagaatcttgtagcctccagctgcatgactcctaaaccataatgtctaatcttttcgctaatctgttagcctgtataccaaacctgcacatgcactccctgaaactaaagtaaaagttggaaagagcaaaaaaaaaaaaagaaatagtttatgttttggtggagctcagataacaacagcaagggacaatataatgactaaaagcacaaaccaactgtgtgatctttgatcaattatttaatatctctgaatctcagtttccttacctgtaaaatgaagccaactatatatatttaaatccttacaaaattagtaaaataagctataatgcactgcaatcttacaaattcctgtaaggattaaaagaatttttttaggcaagaaggggatttgtttagggaaagggctgttatcat

SEQ ID NO: 587079 - DNA, 4001 bp, Homo sapiens
caacacagggagaccccttctccacaaaaaatttaaaaattagccaggtggggtagtgcacacctgtagtcctagctactccagaagttaaggtgggaggatcgcttgagcatgggaggtcgaggctgcagtgagccatgatggcaccactgcactccagccagggcgacaaagcaagaccctgtcacaaacaaaaacatgacttgggagtaaggagtcaatgtcacctactattcccagcatgtggaaaaacgtacaagttaaattcaatgcccaaaacacgacccatgaattcatgttgacagaaaacaaatgtaaacgtttaaacaattatactttctgtttaaatttacgaaagttatgagaaaaaactaatagttaattgaaaatactttaacattaccaaattatcacacagtagtcaattattacacaagaatgaatgctaacaacctgcctcataaactcattcattccatctatttccatgtgaagtacctgaatgtcttattttcaaaagtttttctctttcctgtgcgatgccttgtcttacctttaacaatgagataatagtctttgctctcctttcccccacgaacacccttacacaacgtttcccttatctaattatgtgttcgtctgaagttccagagactaatcttgaaacaattcaggcgactactgaattctcctccacctggagattacttcaaggctgcagttaatttgcaacccagttatactcaggcgccagcccattcaccagatgaggcaaaaacccaagataaatatctgagcaagtcacgtagactggggcccccgagccccaataccaagcgcccctttataagctcttacattttgtccaaatttgaaatggtttcgttaaggcagaagcttggactacttccccattgctagctttggaaagtagtcactttcctttccgggcccttcgtccttgttgattggctctgcaagcagcgagcagcccagcctgaactcggttacacagtaatttcaaatcttagaagaataaaatatcctgagtgttatatagatttaaaacacttgatataatcatttgccaatcttttattagataagctcggggcactttcaatggattaaaaatgcatcacggtcaggcaacgatgaccgtccttaatgcctgcaatgtctaatgttccgctatgttccagatttgttcgcgctgttggtggaggcgcaacagccgggaagcgcttactgggctccacacggactacacacactgtatcttgtcatttcgtcctcacagcaaggactgatacgtaagctcatttttcagatgaggaaaatgagaccggcgagaggctgatatgcttagcggtacagagctaggaaatcagggacagaacccaggctggaagtcacgctggctctagagccccgtcctttcgacctgttcccgtcgctggggaggggcacgtcagtgacactaaaccgtggaaagaaatacagtaccagtggaaagcaggggctccaacggggtaaaggcatgctccataacggattattggcctctgcattaaaaaaaaaaaagtgaagttagactctcagttttaattaaacatcgcgcagaaccaacagcacgggagccgcctgaacctggcactcggcagcggcgcgctccgggacccaggagccagctgagctgcggcgcagcacccggcgctggggacccgccacggctcgcctacagcaccgccgcgggcgggggcccccggagaccggccgcgcgggccgctatgaggtccgaggggttgcccctgccgcctctctccgcgaacccatcaccatccgggaacctggggagcgagaggcggccgcccccttccgcggcccgcgcgcccggcagcagtcgcacttacacaatggctggtaggagccacagactggagatcgcaggctgcgggagctacggcgatcgaccgctcggcgctcggctgaggagccttggcgcgcggtcctcgctcgcaggttttagcccccgggacgcgaggtggccccgcccgcttccgggagccggaggcaagtgggagccgcgccctgtgctctgcgtccggcactacccacctcaagtctccaaggcttcgttttctgggctggttctgctagctgtagtactgctgccgggccctctgcactcagctttaacaaggaggccatttgcttcaaactaagtggcgaattccctatcacccatgcttgacctagcttccaagccaaacttactttccactgtgctgcttctagtcctgctaccggtgtcctccctgagccgtcgggttaaaagctttccttcctggccgggtgcggtgactcacgcctgtaatcccagcagtttgggaggccgaggcggacggatcatgaggtcagaagttcgagaccagcctggccagcatggtgaaacctcgtctctactaaaaatacaaaaaattagccgggcatggtggcgcgcgcctgtaggcccagctactcgggaggccgaggcaggagaatcgcttgaacccgggaggccggaggttgcagtgagccaagatcacaccagtgcactccagtctgggcgacaaagcgagactccatctcaaagaaaaaaaaaaagctttctttagggaacactccgttaagagctttccttactttgctttgtggaaacagaatgtttttgttggaagaaactttaagccacctatctgcagctgcagagcgtcactgttgcaatacaggcttttccaatagtgagcgaacctaatctccctctaccctcttaaggtttccacctgggcctaagaggttaaattgacttaagacagtttaacaggggaaaagcttacagctatgtgcatgggagtccacaagaaaagacccaaagaaggaggaagcctaaatgcttatatacgggtttagctacaacaaatttcaaaagtccatgtttaaatatgaccttaatgaacctaaaagacaattggggtacaaggaaactatctgcacatgtaatagacaagtggttgccatgtgtttatcctatgaagagctgttaccagttgatgtgtccaggttcttggcgtcttgaacaaagaattggacaaaacgcacaaagcaaggaaagaatgaagcaaaaacagagatttattgaagatgaaagtacaccccataggttgggagcgcccgaggataggggctcaagagtgccgttagagaatgttctggggtttaaatgccagctagaggtttccattggttacttggcttatgccctatgtaaatgaagaggatgaagtaaattttaaagtcatttactggatataagccctgtgtaaatggagaggatgtttcctgtcattgctgaagtactgcaatttgatttagttccaggaagtcagcatgaatcggccttaacattccctgcctccagaccctattctgcctcagaactacatgtccattagtaaaaggcaaaccagaaaaattatgaccaaggatataaacaggcaaggcaaattatagaaggtagtcaaatggcaaaaacacatcaccaatattcagaacgaaatcttgaacaatgaattcaatggcagattgtaaccaattttttaagcagtaataaaaatttacacttactgatcaattattatgttccagtcagtgttgaggtcttttatattttatttaattaccctaaaatgtaggctccaggaaaacaaggaccaaaatttagttgttggcccttgaatcctcactctagcacagtttacttgttaatgatttgtctccccctactagagagctagctctctaagggcaggagccttgtctatttccttccctgctatttctccagccacacagtgtgtctcaccaagataagttcagtaaatgtgaaataaattaacaaataatgggaaaaaaatggagaattatggtacttcataccaggaattacaggcatacctcct

SEQ ID NO: 587080 - DNA, 4001 bp, Homo sapiens
aagagtcagagaaaaatggtaaagatccataaacagccatttagattttaggacataagaggaatctagaggttaagtcaaaggatctccaggatccagaagtgcagaaacagcacccagcagtttagttatatgatttttgccagtctgccttgggagcccaggagcagaaaaagctgactgattcgtccaggcttgagaccatcagagcaaaggtggcaagaatagtacagggccaatgacaatgcttttatcattttaaaaagtcaaacgtattttactcttttttaaaaatcgactcgctatttcctccaagagcgagtgtttggagagggggagggagaggggtggataattcctctctcactcttagaggacttgtcagaagtttcattcttaagcatatttggtctgtacagcagctgattccaggaaatccaaatcctgattcctcctggatcttaaaagatgaaaattcattgcagctccctggactatccagctaatagataaacacgtaccacattgcttatatactatgccactttagctgggaggtaggggctctttctttcctaaaaagaaagttacccaaacactgcagatggggatggagaggggatggggagtaattacaccgcaaagcctgctgactagcagcctaagaatcctttacaaaggcaattaacataaaacaatacatggcacggatagcagaattgtttcttcttaatgaatgcagtaattgaccatttaatcgctttactggagttcaccaatttctcctgccatctcccataccattcttcaggcagagtcaaatccctgtggacactggacttcttgctaccatcatctggaaagtacaaaacgcctggaaggaggaagaggctaacatgcgtgaccacccaccatgtgccaggcctactgtgtgctagactctgggcaagggactttacatgttatggggtgcagctcatgtaaggacgaatgaagatattacactatggatctgagccaggcgcagtggctcacgcctgtaatcccagcactttggaggccgaggcagaaggatagcttgaggtcaggagttcgaagccagcctgggcaacatagagactccatctctcaaaaaaaaaaaaaaaaaaagcgatgaatccggcattgcagagagtgggaaagtgtctggaggtttaagagtaagagaaggaagaggagattgcgatggtgggtggtcaaagtgaggggagaagaggcgagttgggaaaggaaggtgcttaggagcaaaagggcaagacccagggacacctggagcggggcgggcgactgccatgcagacaggactacgtacaacgggtaggatgatggggcgatgagctcaagaagcgcagccggggtagacgtgggggcaaatgtccgatcccggcgagacgagggtctcatcccaggggactgcggggctaggacgtggtcccagggctgcgagaagggagagaaagggcagaggggagaggccccggcggccggggcgaagccgagcccgggaaatgccggcgatgggggaaggggcgtgggagcaggggccggacgggccagacccggggctccgcgctcgggggcggggttggacaaccgggaggcaccgagcagaaggcgacaaggggccaagggatgccaggacggggcacagggccgggtgtgaggagacgagaggggagcggagccgcagcgagcgccgcgtcccccttacctgggatgagtgaggagccgccgcgccgcctggacggcatcctggcctcagccgctggtcccaccgccttcggtggggggccactcgggagcccgccctcaccgccaagcgccggcagctgccagcctggaccggccccgcagagcagcgccgttccgacccgcaaccgaagccgcctcagcagcgtctcccgcggtcgccaactcagcgacaaccgccagggtccggggaggtggcgggatcacacatctgctacgattggctgagcggacgatgtgtcggctgctctgattcgtgagttccggccggctgcccaccgaaggaggcgcggctgggaatggagctgggtccggcaggcgccgaggggcgggggtctgacgtcgcagccggccagcgcccccacagcccttcccgtgcgcgctcccgagggggcttcccggcagccgcaggcctggccgggtggttgccctagcaacagcgcgcgtggcctggctgcaggggagccgcgggcaggtggcggtcctcaccgcccccacccccaacgtgggtgtcccagaggccttcatcagtgaaaccctaggacaggagaagaaaatgagcttttcctgataattcctctcctctgcttcagagcccacctttgcccgctgctggcagagaagctgtcatctcctcggggagataacgcgcaaatgcaaataacgaactcaaacactatttcatccccacgagagtgtagacgtgcaatagtccctcccaaccacagaggtggggggctgacgccctaaaagaaagaaatgaaaactagggagaaaaaggcaaagaagcaaaagaaaggtggggaaagggcagatatttcacaaaatgatccattcattttacagtttcttcctacagacacatctacaccaggttctgtcaaagcaattatttctactccagtgacatggattagagaaggcatgagtgcagaatctaacagctgtattcaaaattgctctctgctaggccaggtggggtggctcatgcctctaatcacagcactttgggaagccaaagctggtgaatcacctgaggtcaggagttcgagaccagcctggccaacatagtgaaaccccgtccctgctaaaaatacaaaaattagccgggcatggtggcggacgcctgtcgtcccagctactggggaggctgtggcaggagaattgcttgaacccgggaaggtaactaccttcctttgcacacagtataatattttcaaagttcatccatgttgtagcatgtatcggcacttcattccttgttacggccgaataatagtccattatacagacatcaccttttttttttttgaagagtctcactctgtctcccaggctggagtggagttatgtgatcttggctcactgcaacctccacctcctgggctcaagtgattctcatgcctccgcctccaaagtagctagaattacatgcatgtgccaccatgcctggctaatttttatatttttagtagagacggggtttcatcaagttgcccaggctgatcttgaactcctggcctcaagtgatctgcctgccttggcctcccaaagtgctgggattacaggcatgggccaccgtgcctggctggacatcatcttttatttatccattaatccattgatggacatctgtttctacttttttggctattatacatgatgctgctatgaacatttgtgtagaagtttttgtgtgtggccgggtgcagtggctcacgcctgtaatcccagcagtttgagaggccgaggtgggcggatcacaaggtcaggagatcgagaccatcctggttaacacggtgaaaccccgtctctactaaaaatacaaaaatttagccaggcatggtggctggcgcctgtagtcccagctactcgggaggcagaggcaggagaatggcgtgaacccgggaggtggaggttgcagtgagccaagattgtgccactgcactccagcctgggcaacagagtgagactccgtctcaaaaaaaaaaaaaaaaagaagtttttgtgtggacctcatttgatctttacagcaactgtctaaggtacatatgatatctccttctacagataatcagctgactgggtgtggtggctcacgcctgtaatcccagcagtttgggaaacccaggcaggagggtcccgtgagcccaggagttctaggctgcagtgagccatgatggcaccactgcactccagcctgggtgacagac

SEQ ID NO: 587081 - DNA, 4001 bp, Homo sapiens
cccacaaaccaaaccaaacatcaatcccccaattttttaacaatgaaagttaattgaaggaatgtatgaatggacagcaaaatttctatcgataattactcaacattttcaaaacaagaagcattttacaactactatcatatatgtttatcgcatgattttagaaagttctgttggggccatcaatacaccatcctaaaaaataagcaggttcaattttcatttgtttccatgctccaaactttgtaaaaaaaaattccaatcaaaagaattaaaggcaaattttttagtctaccgggtaactattatagtctattgctttaaatctttcctcaaagagaactaaagcctaaactgaccttctgatttgactttttggttctagatgtttatatcatgaactccccaaaaggacaaaattcgcccttcagcacacacacctcaggtgtttttatgtgcttcccctagtgactagaataaacatctacacaacagcccggaacgtgttgcatggggcttttgttttctttccagggtttcacacgaactcacttctactaactcacttctacaattccctatgtagggtaaactttggaaatgaaactcactgacaaacgttccagtacatttaagctggggatatcgtattctttgtgatgtttgtatttctccgaccccaaatatattaataaaaacttttttctgagccctcttcggtgggggatagagtgagaagagaaatgggagagggcctgttaattttcaggtcatcttttaagttacagaacagtatatactgactagttatcttaaaaatactgagccaatgaattcgttcagctatgtaagattaaagaaagacagatttttttttttttaccgtaaaaacctgtaaaggagtggtcagtttttagatgaaaggtcataggaagaagagcattaaaagttgagatataaagaagagaaaaaacccaacatcgaggaattagaaaaataaggcgtgacagcatttccacattcatttcgaagtgaaaggaaagtcgaagggacattaagggaaaagggctccttgcgtagtttcccctcacagctctcgtcttaagaacgcttaagggtcggtgcggtcgttgactaaccacttcattaggctcgtcccaccttcaacctcaaggctttcgcctttttagacgcaacgccgccggttccaacagagacgcggccgctcactgaaatagagagccaaggagacacaggccccagctagtcccacgccagcttctccccgcccggaaagcagccccgcgcactttcgatcccgagaccctctacgatgctcggggtcgccagaaatgccaccgcaggaagcacctaccactatccggacggaggggagctccctgccgcctcctcccgcccaaccgcgacggggacccacacctcggagcagacataaggaagcctcaggggtggggagaagggaggaagcaatgcgggggcggggagggaagaggacccagaagtccaggtatcagtcagcctccaaaaaagggggaggggtgttatccgtggtgtttggggaaggagtggaacccagaagccatcttgggatgggaggaatcaatcgcgatggctccagaggttgctcctcgcgggactacccgcaaccccgcccgaccgcgcttgttcccgtgaaaccccgagcattgggccgccgcctagacggctcccgcggctttgtactcactctgccctcgaagttgttttcctccacatcactcatgtcgacgaggcgctccccagaactaaataagagacaagtctcggctcgagggccgatggcctaattaacccgctgactggaccgtggggaagaggaaagagtcggcaaccacagccgctccactccactcccactcggtcgcaggctccagcaaaatggcgccggcgccgccagaaatctcctggcctcctcagagcacgacgtaaagggggcgggcgtctctgtgacgtcacgaggctccacctcccgcgaggctttgtgtcggctgggcctggagcgagggtggaggttggcgggcggcctgcgctctcaacctgggcgccttggaatcgcggtcccgtgctgtcctccaaacttcagactcacctcggacgcgtcaacctctttgaagacttttcagtcgccagatgagccttatatgaccttagcccctttaaatattgtccaagtggattctgatgtaagggaacaaaacattggaagcgtttttttatgtttgtttattttttgagtcagggtctcgctctgtcacccaagctgaagtgcagtgaagcgatcactgctcaccacagcctcaaactcccgggctcagacgatcctcccacctcaggctcccgcgcgcgccaccacgcccggctaatttttttcttttttgggacggagtctcactctgttgcccaggctgaagtgcagtggcgctatctaggttcattgcaacctccacctcgcaggttcaagcaattctcctgcctcagcctccccagtagctgggattacaggcatgcaccaccacgcccggctaatttttgtatttttagcagagacgggggtttcaccatgttggacaggctggtctcaaactcctgacctcaggtgatttgcccgcctgggcctctcaaagtgctgagattgcaagggtgaaccaccgtacccggcccacccggctaatttttgtgtgttttgcagagatggggttttgacatgctgcccaggctggtctcgaatttgtggactcaagcgatctgctcgcctcggcctcccaaagtgctgagattacaggcctgagccaccgcgcccggctggaatcgtgtatatataacaggcttttggggggcacgttgtcagctgactgtattacttttcttccatatttgccctgtgtaatgtcgacgtagtacatgcacagatgaggttatgatgcaaagccgctgctccttgcctcgtgtccctgctccagttccccctcctagagacagccgtgtagttttttttttataatgcttagctccctactagtttttttgacttagatatttccataaagcttcacagtgaagacctcccaaatctgtcaacttggttcccaatcatagtaataatctctgagatgagttttacttgtgtaatgcaactttaaaaattagtttcatcttaaatttttttcctacagtgctttgtagtaaaaagattgacatagactttcaactatagttctatggtaggaaagttcatctggcattattatgaagattgctaccactgggggcaagatttcagcatttgaatgtcagttattgatagggataaacttaaatgacatctggctcttagaaaagatgttgaacttggctgggtgtggtggctgacgcctgtaatcccagtactttggagaccctaggcggaagatcgcttgaggccagaagttcgaaaccagcctggtcaacatggtgagcccccatctctacaaaagaaattattattattattattgagacggagacttgctctgtcacccaggctggagtgcagtggcgcgatctcggctcactgcaacctccacctccgggttcaagtgattctcctggctcagcttcccgagtagctgggattacagtgcgtgccaccacacccggctaatttttgtatttttcgtagagatggggtttcaccatgttggccagcgtgggctggaacttgtgacttcagatgatctgcccgcctcagcctcccaaagtgctgggattacagacgtgagctgccacgcccagccaggttgataccatttgaaccactgatcaatcttagtaccattaaaagtgagataaccagatacgagatacctcatgatgtgatgcaatagaaaatacccagttcctcctgtgaagtattcctgatccctcaaattgaactcaaatctaattaaaccttagatctagcc

SEQ ID NO: 587082 - DNA, 4001 bp, Homo sapiens
cgccggcgggcgatggcgcagagccaggagaggccgttggggtgggctccgcgagggcgggatctgcccgagtcggacggccccgctggggcttcttgtgcaggtctagggactgtggagccgggcccgcggcggcagcgacggaggggctgggctgctggaggcccgggccccgccgactcagccttagggcgctgcggttgcctaccagctccctggcggccccatcccaggccaccccagctagaaatcgcccctgctgctggagctgcggctgcggcggcagctcctccgcgagacctgcaggtggcgtcatctcctcccctgcggccgtgggtaggggctgccgcctgcggtcagcggtcagggaagctgagggcgagggatccgcgcaggatccattttgcagctgctggtcatccaggtaatccaggtatttgcctcgcagggccggggggtggcgacactgcacgaagacagtgaggagccggccctgcgagtgccagtcgcccatccagcgcttcaggcctcgcagccggcagtcgcaggtccagccgttgccgtctagatccagccgataaagggctgggctggcggcgaagatgtccccggatagggcgctgagcgcgttgttgcgcaggctgagctcgcgcagccggcccaggtggccgaaggtggccgggtgcagggcggacagctcattgccgctcaggtccagcgcctccaggctgtgcagaggctccagcagcgcagttggcagctggctcagccgattaccctccaggcgcagctcgcgcagggcctccaagccccaaaaggcctcaggcgcgaggtgcgtgagctggttgcccctgagcgagagcaggccgagacgtggcaggtgctggaagatgcgcggcccgaggtgctgcaggttgttggccgagaggatgagggaggagagggagcgcagcggtgcgaaggtggccgcgtggcgcagggagggctgtagctcgttggcagagaggttgaggaagcgcagcttgcctagctgggcgaaggcgttcttgcccagaaagcggatccggttggactccagatgtaggtagagcaggttgcccaagggagcgaagaccgcgtccggcagcgcccccagggcgttcccgtccagccgcagcttgactagactctccaggccctcgaaggagccgcggcttaggcggctgatctcgttcccgttggcgtagaggatgcgcagcttgcgcagcggggccagcgtgcccggggcgagcgcctgcaagaggttgttccccaggtacagctcttccagccgcgagagcttctcgaaggtcttggggtgcagagagcggatctggttgtactgcaggtccagccgtctgagctgccccagacggtggaagtcgaaggccgtgatgttggttatgaagttgccgccgaggctgtaggtgagcacgtcgtgggggctcggcagcgagctggtcttgggcactacgcggagccccctgttggtgcacaggagatgctggggatgctggcagtcgcagcgctccgggcacacgggctcggccagcggcgggagcgcgaggcagccgcacaccacgagcaggaggcgcaaggcgcgggcagcctccatcgcctcccgccctgcgtgcagcggccggatcgtcctcttggcccgccggctctgtgtctcctctgcattccccttagcctggccagagtcgctaaatggcctctttcggacttcgcagcgccgtccagcccctcctccgtcctttgtccggaggccggcccgggtctctgcaggcgggcttcgcccggccaagtcaggcggcgcggggcgctctgcagaccccgggtactacttgttgcatttctgtataaaactgtttctccgggtgcgcgtcggcgggcgggaggagggagcaagacccggcgctttttgtttgcagctgagtccggagagctggattccctggcgcggattctcccagccgagtggattccccagctgcaggcgggagccgttccaagagcttcgcggggcgcggcttggcagcagagccccggctgctcggcccccgcagacggcaccttctcgctcgcggtcccggacggggagggcggctccagtgcaatagctcggggagcacgcgggctgcgtccggaagggacccaagtctgcgagcggagagcaaacggggcggaaattcgttcttcccacactctgcccgcggggacgcaggcggagaaagaggagacggcagagggaggacagaccccggcagggggaggaggaaacactaagtggctccgcgtctggtcagcccgggcccgggatgccaagtgagaaaagtagggattaaaaacagctgtacgggccggacacgctaggccgggggcgggggaggattaccgggctagcaaacgggatttgcagacagagacctttttattttagacgagtacaccagccgcttctgagcagtgggagcgcgcctggccttcctcgttgttaagtcacttgctcttccaggtgccaccctgcgggaagtttgggcagcacggagtccgccagcattctacaggaagtttgggggagcacaaggttgcctgcagaaggccatcagaagggggtaggtgaacccagtctgacagttgctgcttgggttttgacgtcgttggactagtagctgaggagaggcaccacccccttttaggtgtctgaagggagtatttactccatcctgctgtgggctagaacatgaagaaatcacagaactggttctgccaacatgaaagtgtctctgccacattttggtgattcagtcgcattaactctcctacagtaatagagcccctggggtaggctctgctcgtgtgcacatacataataaccttcacagatcctaaggtaaacgttccttgcagggccctcctgctttacgcctggacttgcagtgatcttcaaagtctttaggcccaaaaatgttcaggcctggctcagttggggaagcattattatttattatctctagggaatggagcatttaatcaacggctcctttgggatcagcccctgctgagaatgagaatacacaaggaggagttgttaattattaattattgtttctttatataaaccatcttgctaaaaaataagggcccttcccctatccaaggtgttgagaaaacgtaagttttgaggacgtactctgcaacaatgtggaaaattaaaggaaagatacagatcctcacctgaagacaatgacaatctagtgggaagggcaatgaatgcattgaaaggttagataataatataaggcagtaatagagaacaccacaaaaacaaaaattattttttttgaggtgggatctcactctgttgcccaggctggagtgcagtggcataatctccgttcaatgcagccatgacctccagggctcaagtgatctgcccacctcagcttccctaatagctgggactaacaggcccttgtcacaatgaccagctaatttttgtattttttataaagggggagttttgccatgttgccaggctggcatcgaactcctggtctcaagcgatcctcccaccttggcctcccaaagtgctaggattacaggtatgagccacaccacacagggtgacaaatgatttttaataattctatgtttcacagtaattgccccatttagcaattaatatagtcaagtgatagagggaagttctgaatttagagaaagatgagatcgttggcagggtagtcagtggtgacttcgtgggtgagcagggaccttggctttgcagggaggtgagtcaatgataattccaggagatgagcgctgaggggtggagctgtgatagtcctgaggagcagcacctggcctgagagtgtgaggaaggcgtctagaagaggggaaacctgtgctgagtttgaggggtgagtggtattacctagaggaaggtgagcagacgctcaaggaggagaagcctgggg

SEQ ID NO: 587083 - DNA, 4001 bp, Homo sapiens
tttgcactagttctcagaactccaggttcccattggacaacgtaaagagagccagttgacatctacacaggcagttccttctctacaggagaggaaccctaagcttagggaaccctaatcttttaagatgggcagtaagcatgcctaccctttcgctccagagggagacgttattcttattatactggataatatgtatccccgccttttgctctggtggaagacactatctctatcttccaaggctgctctttagataatatccgtgaaaaaatagaaacaaagggcagtcagtatctcgctggcaagggtgctggcaagagtgaagaaacggagacccacggaaaactgtctcctacaagtggatactgctcctaacatgcagtcaaataaatgagtctcagcccacaatctatttgaagtatccatttcatacgccccttgacctagcataattacttaattagcattttatttcaaactaaatcaactatttcctctaaaaagtattaaaaatgcttttccagttacactgtatttttaaaaaggaggtgctcaaatatttgcaataataaaatttaaaaaccgccaagtgttctacccgaaactgtactcaaacttactttaaatgtttcaaacctgtcaaagttagcaatggaacacctgtcaaaagtctaattttacagtaataaacaccacaaagagaacagtaacttccagctttatctataaaataccagaaaacccaaatcactttgtattatttctcttcgccgtctcaaaataaaacctttgaaagagacacacaacaaaacaacgtctcttggttcctttgtccccagcagaggagagggaagagaactgggaactcattaaggtaaagagccccaaacatgcaagataagaaataaatgacatccgatctgcaatcaatcatcaaagaaagtcaccatcacttcatcttcatccctcccttctcccctgcagctcaaataacgtgagtatagacgagatgatcaggatcatatggacctggacaaagctttgtggaggcagcgggcgggtagcagttaactggctgcagccggcaaagaacccgagattccggctgcaggagactccgacagaggtctgcaaaagtgcgagtggcaggggccgcccggctgttgagaatgcggagcagcggcggcggcggcggcgcggtcaagtccacagcgcccggggaagttgctggccgagcgcgacacgccgcagagcgcgggccctccatgtcaccgtcgccagcacagaccctcctgctcgcccctcccccgccgcgcaccccgggcggcggcgacatgacagcgggtcgcgccgcacaagggcgcccgccccctcctggccctctccccgggctccccagcggccgcggccggttctcaccttgggtggcgaacggcgacgagccgctgaccggcgagccgggggcagggacgggtggcggggtctcggccgagcccagcatgggcgcgggcagcatgaggtagcgctggggcgcgggcaggcagcgctggcagaaagagtgcaggcagggcagcagcttgggcgcccggctctggatgttctggtggcacacggcgcaagtgtccaacaggttgagccgggccgcctcgccgccgcgctccgagtccgggccctgccgactctcggcctcgttctccccgctcggcgccgccgagggccccccggaggccgcagccgaggccgctgccgccgccgccaccgccttctccaccgccacctccattgtcctgcccttgccgccgccggggaagcgagagcgcggtctccgcccgccgcccccgacgacctcctcctcctcctgcggctgctcctcagaggccgctcggtggactcgcggcagcgccagcgagggagggaaagcaaaccgggcgggggaagcctcctcaggcccacgggatccgcctcccgagtggcgcggccggaaggagggtatctgtcagcggagaccgttcctcgcaccggggaggctgcaccccgtccgcttcgccaaccgccgaggcgctcgtggaatacgcccagcccgcccttgcctccccgcctttctcttcatccccctggcccacctcaggccccgcccccgcccccgccctccctctcccagcaactgaggcttcggtgtggagcgcgccgcccaatagcggccgcgcctggcgagggggcgggacctgttggagcccgcgaggctccgtcggccgcggcgggaggttgggaagtgggaggtgcttgcccagccccgccccctccggacgcctgaaatcgcggcttctgattgggcctttgtgtatgtttcctcctctgaaaagattaagggttcatttgttaacgaccatccgcctgattcggtccgcggtgttagctcctcctagggggcgggacctcacttgtctactcaatgccgttaattaagtaactgcttggaaaactgatttcattactggagacctggtcttgtaggaggagtaaatatggtcggagggtcacaggaggaaggagtggaggtactgaagagcaaacaaggaaataattttttaaaatactgtgtgaaagaggtactctggaggcagcagggatattgcaacctaattttactcatctctagaatgaatgagtatgaagaataagggggggaagttctcgtgcaagttggaaatttttaaagggtttccccaatgaaaaaggtgaaattaatttttaaagtcagtgatttgctttttaagtgactaaaagtggttcgttttcccaggaattaatacagattgacaaatgtttttattgcataaatatagcatcattaagcaaaaataaacctcaatactgttacccaaataattcataacttcaggattcttttgtatttcctccctccctcttattttattccctccctccctccctcacctctctacgctgatatcagaagttacgcacatttttcactcaaaaaatggcgcagcttttaaggaacttgaagaatagaaacggaatgaaggaaacaagattttgtaacacgtaactttaagaagtatttaccttttttttttttttttgtcaatactaatgaagcggtactggactttagagaaagatggagtgggtcatgaaaggctttgctaaaatcacagttttcctggaggactatatgggatggcaatgggggagggctaggcaacgtagccttccttcaagaccttgcccttaaacacaacctccgtaggcctcaagtgagaggttcttttacttaatcacaagacattcaacagctcttcccgcctcccccacccattggttcctgtttaagcttgggattttttgtttgtttgtttttttgcatggaagtagctcttaaaccttagtttgcataagaataacttgagaagcttagtgaaaaacaggtgcttgggccacctccgtattcagttattcaattttgatagcatctcaagtgattctgacctgggtgggtccagaaacggaagtctgtcccacaggtcttcacccactcacaaatctctccacgatttcgtccgtatatgcctctcaagctgaagtcgccgcgactctcatgcttcatgctgcagcaattgtaaggccaccctgctttgtacacgctgttccctttgttttagttccttcaaaattctgacttatctgttatcccctaaagccaccccaaagttgaacactccttccccagaattcaaaccatattgtatatttttgaagctacaccttgaaaacattcacataataggaatggaattttgtattcaaaaatcaactcccttaatatgctaaaaattcattacataggtggtatacaggattcaagcctactaaagacaagtccctcttattccccagatgatggtggtagggaaggaaaactgagaagtaaaattgaataggctggttttgaaagaattccatgtaatttgatc

SEQ ID NO: 587084 - DNA, 4001 bp, Homo sapiens
cccagctactcggtaagctgaggcaggagaatcacttgaacccgggaggtggaggttgcagtgagttgagatctcaccactgcattccagcctgggcaacaagagcgaaactccatctcaaaaacaataataataaaataaataaataaattcatgtgttcatgtacttactgcatatcaattctgctggagaccactggagttacaccatcagtaatgggagggggtggggctactctggaaaggatgatcagggaaggtcttcaagctaaaagctaaaaggatctaaaggatagatgtgggtagagaaagagaacagacttgaaacaaaagcaagaaagccagtatggctgaagcagagtaaggtaaagtgatttattcaaccggagcttcttaacccatgagataggacagataatccccaaattcaaatgttacaggattttcccaactgatgaaggaagctagtaacaaaacccagcctcatcattacaagctaggcttttcccaaatcatcagctgtctatgacatttacagatacagacaggcactgtccaatacagtatccatttagccatacaagcacctgaaacgtggatattccaaactgctatgtgttgtaaatgtaaaatacacaccaatttcagacctattatgaaaaaggagtataaaatatctcattgaggccgggcgtggtgactcacaccttaatcccagcactatgggaggccaagcggggcagatcacttgaggtcagcagttcgagaccagcctggccaagatggtgaaacccctctatactaaaaaacaaaaattaaccgggtgtggtggcgtgtgcctgtaatcccagctactcgggaggctgaggcaggagaactgcttgaaccccggaggaggaggttgcagtgagccaagatcacgccactgtgctccagcctgggcaataaagtgagactccatctcagaaaaaaaaaaaaaatctcattgataattttcatctcagctttgaatatttggggtaatcagattaaataaaatatattattacaattaacgtcacctcgtttccttatcttaccagaaagattttaaattacatatgtggtttctattggacagcagcggcacacaccctctcagtatgtttttctttattatgagctccccaagggccagtttattgaaaattctgcacaatgattgctgaggtttgcacctcccctcctctcattccagttttaaccctagctctgaaattcgtgttttgcttaacttctttgagtttcaggggcttttcatgcttccagtaggaatgacagccacttcgtggctcttttaggagcattaagtaaactttatcgggcaacactgacagccccgtcatagtcaccgcgacggccagctcacccggtagctctcgaaggcctcgtcgatgggtgccatggcgtgagtctggtgctcctgggactccctgcacaccaggcacactggccgctggtcgtcctcgcagaagagccgcagcggctcccagtggcggccgcacaggcccgggggcacggggcccaggcgccggcgctgcgtcttctcagtcagcctggccagggcccagttgggtcgcagcgcggcgggcgccgatgggtgccgacattcggggcaggggaacgggccgccgcccggcgcccagttgcggtgcaggcagccgcggcagaagttgtggccgcactcgatggacaccgggtcctggaaatagtccaggcagatggggcaggtcaactcctcctggatgtcctcagcttccatgctgcttccctgccgcggagacggagtccgacgtgaggcgcgggagaggccagcaagctgcgagcggccgcggggaggccagacgacttccgaaccgccgtcaccgcctcacgtaaaagggtacaacgcagtttctcttccggggttcaggacccaaaaagaacgcacggacgttgcccggcctgagcgcgcaagaccggaagctgctgggtatccgcgccggaaccgcgagggggttggttcaggcctaggcgcggggcaggacgggaccggtgagtggctcctccaaacagctatagagacccagaaatgcctgtggaaagctacagaggacttgggcaaggcgttagagccggacgttgtggtccctgggggagccaaccggggaggtgcctatgatctttctttccaagtttgagggttcaggtctgtgttcgcctgctggttagaccgatttaagttttagagtcccaggagttctgggcgagctgcagcctaggggcctggaaggccaggaagacttgaaggatctgtgttggtaggcctggagtttggctaacgtggggatgatttggattctgagatgcagatacattgcctttttggtatccaatttgaaaagtagcaaccattttgctatcccaaagaacatccatggaggctttcaacaaataatatgctcacctgtttcagggaattatctatatcccttaagtggattttcgatcttgtgtttctgaggtgctttgctttttattcttcccactttcttccttttcttgtgaatatttgtttaaaacaaaaaaaactctggactgacaaatttaatagaagctatttgcacaaagaacagttcatgaattgggcagcactcagaaccaaaagaggttcagagagctctgtccagcagtatgacctgctagcttttataggaagcaaagtagagaaatcacctcattagctaacatctaggtgtctgccttatttgacaatgatatgatgaggcatttgccttattggggcatggtctgatcagttggctgtctgttatttgctgaagctcggccgtgattggctgaaacccagctgttataaaaaataaagtaagttaggcttcagttcgtttacatactaagtcaggttgtattttgttatatgggaactcaagtaccaagacagcctcaggctaatgggcttttgcttatttaacagatttttcattctttttatgtcccaatatcaaatactgcctttcctataataatttttctcagtaagtagtatgattaaatgattagaaaaaggggttcttgaggtatctgtttgggggttattgatgaaagttccactgaatatttctaaaacatttaaattggacaactaatgaatggattttctttgcaaattggaatactctatggagaagggatctggttctttaatagggaccaagcaggaaggaatgctcttaacagttactgatgtttaccatgagtgtttatggcatctgtgtgtctatatgtttacctaagtattgaatgagaagtttcagcattcctgcaaagtatttattccccttacagtagtcatttaaatcttttcaggtaaatcccttaaaatccttatgtctttattcctgccataccagagatgaccttccttctttactaagtgaggctccctaattaacaatttttctccatcacaaaatgtctataagtctgtataccagccaaggttcattcagagaagtggaatcactatgtttctttatgttcgcagggcaagcagttaagaagggaagatgaacataaagtagggaagagcaaaaatgagttggaacctaagacacgagctggtcattctttcactgtctccaactttaaagatatgagtatccttgctagaggagctgacactttttgccacaggactagacacacacacagctcaggaatcaaaaaaggtgaaggaagactcagggaaaagcttctgccccatcccaacaaggtgaaccagctgattggtgacaaagtagatgagccgcagtagcacctagtgtccctgcaccaccgtttcaagtataaaactggagggatgcttcagttctccccttcaagacttacacaaccatgtctctgttgggctattctaaccagaaacaaaaggaaaggaaattctgggaaacatagtttagctt

SEQ ID NO: 587085 - DNA, 4001 bp, Homo sapiens
tcttgctttgttgcccaggctggtcttcaacttctgggctcaagcaatcctcccaccttggcctcccaaagtgctgggattacaggcgtgagccttactgcacccagccttccctctctctctctttttttctaatacaaactggcagatgatgattcaatctctctattttttttcattttattgttttatttattttagtagagacaggggtctcgctttgttgcctgggctggttttgaactcccggcctcaagcaatcctcctacctcagcctcccaaagtgctgggattataggtgtgagccaccaagcctggcctcttttttttttttttttaagatattcaaaggtatccttatttacttagattttttaaatcaaggtataacatatacaagtgtgcaaatcttaaccacacagcttgataaacacttgatgtatatacacccactctcaagaacaagatgtagagtgattccagaaagctccctcctgcctcctcccagtcataactcctaacaaggacagccactgtccttattaccatgttgtcatgtggactgtttttgaatttcacataaacagcatcatatagaatgtactcttttgtgtctggttactttcactcaataatattgaattgtgagttttttttttaatgtgaagtctttcaacgtttagaaattcaatgacactctgttatacaggttttgtttgttttctgagacagagttttgctcttgttacccaggctggagtgcagtggcgcaatctggctcattgcaacctccgcctcccgggttcaagtgattctcctgcctcagcctcccaagtagctggggttacaggcgcctgccaccatgcccggctaattctttgtaattttagtagagatggggtttcatcatgtggggcaggctggtctcaaactcctgacctggagcgatccaccggctttggcctcccaaagtgctgggattacaggtgtgagccaccgcgcctgtcctgttatacagttaatgaatattatggtcataatatactgctgtggtttgaatgtatcctcctaatttcatgtgttggaaacttaacccccaatggggcagtattgaaagttggctgtagcttacgcctataatcccagcactttgggaggccaagactggaggatcacttgaagccaggagttcaagaccagcctagcaacaaagctacaaaccatctttccagcaaattaaaaactaaaaaataaattagctgggcctggtggtgcagttctgtaatcccagctactcgggaggctgaggcaagaggatctcttgagcccagggagtggcggctgcagtgagctgagatccatcactgaactccagcctgggctcagaacgagcctctgtcaatcaatcaatcaatcaatcaatcagtgtcttgtctgggcctaaattctctagaacacaatggaagagagaaagtgaaagaaggtggaagtaacccacagctgggagccctgaaccctgctggtggcaggtggctctcgtgtcctcaccaggttgccctgcaatcacatgctgcatcctttttcctgaacctgccccacgtgccccaccacgcagccactccgagggctccttcaagggcggcagccctgtcactcacgtgttccaaaagtgcttcccctgtgccctgatggcctcgccatgtgtctcatcatgccccacgcgctcccactgtgcgccccacctcgcacccgtgccccatcatgctctgcgtgctcgttaggtgccccatcatttcccgctcgctctcgttacgtacccagcctccggcccctgtaagtgccccatcgtgctctctgtcgctccagttagatgccccatcctgccccgcgagctccaattacgtgccccacctaaccccccacgtccgtgcctcatcatgacccgcacgctatggttacatgccccgcctcgcgctaccgcgcgtgccccatcatgctctgcgcgctcccattacgtgccgccacctcgcgcccctgcacgtacccaacgtgccctgcgtggtcccgttacgtgtcccatcatgtttcgtgcgctcccattacggatcatacctcgcacctcaccgcgtggcctctgtagttccagagctcgcgagggccagggccgttggcggcggttggaacgaaacgatgagtgcctcctcgtggccccagaatggaatgccgccgtcggtaggggtctgccgggcataaaggggccttcggaaccccaccagagtcacagccagggagggcagcggggcgcaccaggccgaaggctcacgccacagggagggcagctaggacatggggggaagcgcgttaaaccagggagtcctggaaggggacgacgcccccggccaggtgagggcccagacgtttcgggggcgtagacgctgaggggtggccgggtgggtctgcggctctgaggcctggctttcattctccatcagtccctgtacgagcggttaagtcagaggatgctggacatctcgggggaccggggcgtgctgaaggacgtcatccgagaaggagctggagacctagtggcgcctgatgcttcggtgctaggtacgccctggggcggtttgtcctcaggatccatgtcatcgcactctgttgggaagagagaggcctcattttcaaaaagcacttaatggggttggaaatgctttgtttgaagtggatttttgttttttgtttttgaaacggggtcttgctcagttgcccaggctggagtgcagtggtgcgatcatagctcactgcagcctccacctcctgggctcgtgattctcctgcctcagcctcccaaataagggatttacaggcgcgatccaccatgcccggctaatttttaatatttttgtagatatgggggactctatgttgcccaggctggtctcagactcctggacccaagtgagcctcccacctcagcctccccagtagctgggattacaagcatgagccgctgcttccggcctgaattagtttttttaagacgaaagctagggactcctatgtcccctttgtgtgatgcttccgcaaagctcttgaacctctgagccaaagggccggcacccaaaatgcagagagaagatttattcctgtacctcggggtgtcgggcagcttaagctcatctgttcacattgtttctgtgtgatcatgagagactcgatattatggtggcgtgggtgtttttggtccattttccttacattctttcttctatcctagtgaaatactcgggatacctggaacacatggacagacccttcgattctaattactttaggaaaactcctcggctaatgaaacttggagagggtaggttcagagtgggagctggagaagaaggaattgtttaggggctagatgaggcacgatgcctcaggctgggaagactgctcagagcgcaggttctttgagttggctttgctgaggctgggttttggtaacacagccatgttctctccccttgagacctaggcatttgggagatggcttaacgggcaaggtataatctttgcactctgacttaactaaccactgggaatgtttctttgttcatttattaagtaaaactcaatcgaatacttacttcccacaatacatggtgaaaagagaggatgtactcagaagattagaacatctccacccttaaggacctcacaatgtagtggaggagactgacctgcactcagctcacttggtagaatcggatgagtgcctgggaggtgaaagcagtgttgtgggtgtgcttaatgaaggcatgattaattctagctgggaggttcagggaaggcttcctggaagtgggggcatttgaactgagcctggaagtttgaataaaatttatatcagtagaagctgggcacaggctcaggaggaagacattgcaggaagagggaactgtgtgagggagacatggaggccagagtactgctgacttagaggggga

SEQ ID NO: 587086 - DNA, 4001 bp, Homo sapiens
agaatgatctgctaggtttggtgatggcctataaaggcaggaattcactgattcagcattttggacatttacaatgtgccaggcatggctccaggcactgaaatacaccaggggacaaaatgaagtccccaccctcatgcaccatagagtgcaaacaggggagtgtccagacacaaacaaggggcctagggcagtggtgcatgcctataattccagcactttgggaggcccaggcaggaggatcattggaggccaaggagttcaacaccagcctgggcaacataacaagaccccatttctacaaaatatgaaaaatgagctgggcatggtggtgtgcacctgtagccccagctgctcgggaggctgaggtgggaggattgcttcagcctaggagttggaggctgcagtgagccatgatcacaccactgcactccagcctgggcaacagagtgagacgctgtctccaaaaagaaagaaaaaaaagaaaggagagagggagagggagaggaagagggaagagggaagagggaaggagaaggaagaaaagaaaaaggaacaaaccagaactgcaaataaaaaaacaggaaggggtgagcacgtgacaccagggagctcccatcctgttcgtgtggcttcaatccccggcacctgggttgagctgcagctcaaacgctaaggaatgaatgcgccagggcacagctgcagggaaatcgaggatagctggatccttttggtgccaggtgatggcaccagagagcacaggatctggtccccgcgggcctctccagccgcccctgcaccctcactccccaccttcatgcggctgtagacggtggagacgggcgtgaccgggtggtgttggtgggagcccagcagaccgcagaggccacagatgagctcctggtccttctcgcagaaaaggctgagcgggttccggtggtgcacgcagaccttgggctccgggtccccagggagcctcagggcttcgatcaccctggccagggagacgttgggcagggagctgctgccgtccaccgcctgccggcacacggggcagcgcagctcggcatccaggtggcaggacagggaaaccaggcagcccttgcagtaagagtggccacactgcagcatcaggggctccttgaagacctccaggcagatgggacactgaagccggtcctccagctctggcaggctcacctgccaagccatccacactcactgcccgggctgaaacacaggcatccgacctcagtcctgtcccctcccctccccctgtccagcactcatccaccaccctcaaccctaaggagcaccagaattttagaggaaacactttgagtcctggatcccagtcctaacccacatgaccttgggccccagtttccgcagctgtaaaacaaaagactgcagtgaaaaaaactggtcccttgaagatatgtgtgtgtgtgtgtgtgtgtgtgtgtgtgtgtgtgtgtctacattttttactcaaatttggagacaagcatgaaaggggccatctgcagggtcatttgcagtgacactaataatgcaaggtccagccccagcatgcatccggacctagaactgaacagcaaaacctaggcaagctccccaccttctagatcagttcccaaactttcgggaaactgttgaaagcataggtgtaatagagattctagaggcccaccttcaaaggatcttcttcagggggtctccagtgagacccagaactctacacttataggtgacactcccaggtaattctagagagcctggaacctacaaggcctctaccctgatctcccacctgctcccctatgaaagcttgtcaatgagacagaagcagcaccagcagcccccgggggagcccgacattggaatacctggcttctcacaatccgctgggcctcccactacagcctcaagccagcatcactggctttccttcttcccagcagggaacagcaggcacagagtcagaagtgggaaatgcagctggacgcctgcaccactgcctggtctctgccccttctctcctcccctttcccagcaacacccctgtgtccccaaggtcaccagaatcaggtggaaactgggttacatcacgggactggggaggcagcctttgttgggcctgctctgataacattcaggtgctggccttggccactgtggaggaggggcagaaacagagggactgggtacaccgtccacacctcatgaccccaacaggagcagataggtgctgggaaacagttctttctgaatctcaaactcttgctcttactctcctttttttgggcgggggggctggggggtggggaaagacagcttgttgctctgttgcccaggctggagtgcagtggcgtggtcatagctcactgtagcctccaactcctaggctcaagccatcctcctacctcagctgcctgagtagctgggactacaggtgcatgccaccatgccaagctaatatttaaaaaatttttttagataccgggtcttgctttgttgcccaggctggtcttcaacttctgggctcaagcaatcctcccaccttggcctcccaaagtgctgggattacaggcgtgagccttactgcacccagccttccctctctctctctttttttctaatacaaactggcagatgatgattcaatctctctattttttttcattttattgttttatttattttagtagagacaggggtctcgctttgttgcctgggctggttttgaactcccggcctcaagcaatcctcctacctcagcctcccaaagtgctgggattataggtgtgagccaccaagcctggcctcttttttttttttttttaagatattcaaaggtatccttatttacttagattttttaaatcaaggtataacatatacaagtgtgcaaatcttaaccacacagcttgataaacacttgatgtatatacacccactctcaagaacaagatgtagagtgattccagaaagctccctcctgcctcctcccagtcataactcctaacaaggacagccactgtccttattaccatgttgtcatgtggactgtttttgaatttcacataaacagcatcatatagaatgtactcttttgtgtctggttactttcactcaataatattgaattgtgagttttttttttaatgtgaagtctttcaacgtttagaaattcaatgacactctgttatacaggttttgtttgttttctgagacagagttttgctcttgttacccaggctggagtgcagtggcgcaatctggctcattgcaacctccgcctcccgggttcaagtgattctcctgcctcagcctcccaagtagctggggttacaggcgcctgccaccatgcccggctaattctttgtaattttagtagagatggggtttcatcatgtggggcaggctggtctcaaactcctgacctggagcgatccaccggctttggcctcccaaagtgctgggattacaggtgtgagccaccgcgcctgtcctgttatacagttaatgaatattatggtcataatatactgctgtggtttgaatgtatcctcctaatttcatgtgttggaaacttaacccccaatggggcagtattgaaagttggctgtagcttacgcctataatcccagcactttgggaggccaagactggaggatcacttgaagccaggagttcaagaccagcctagcaacaaagctacaaaccatctttccagcaaattaaaaactaaaaaataaattagctgggcctggtggtgcagttctgtaatcccagctactcgggaggctgaggcaagaggatctcttgagcccagggagtggcggctgcagtgagctgagatccatcactgaactccagcctgggctcagaacgagcctctgtcaatcaatcaatcaatcaatcaatcagtgtcttgtctgggcctaaattctctagaacacaatggaagagagaaagtgaaagaaggtggaagtaac

SEQ ID NO: 587087 - DNA, 4001 bp, Homo sapiens
caggcactgtctcgcggcactcggggcagcggacgcggccgccatccgccagctgtgccaggcagtcttggcagtaggtatgcaggcagggcagtgtcttgggtgcccgcagctgctccaggcagattttacaggccaggaagtcgctgctcagggcctccaggagggagggcgaggacccgtgggaaaccatgctgcaggcagaggcgtcaggatcagagttgagaaggcaccttcaccagctcaccctctagcttctaccgcccgtcctcaagccccacggatccccagggctaggggctgacccaaatggccgggaaggaacctgaggtctcacctgaatggccaggaacttccttctagtcttctgaggccttgggccacttgctcttgagctaaggagctgccctcctccttctcctcctcctcctccacttccgtgtgtacatccagcaaacgtaaaaatgtcagtgctacttgttgggtcagacctgtgagaactgacaagaccaggagtccctggccttagctaataatcgaatcctcagtgtccccagtccacaggccttgtggcaaacatggtggaagccctcctgtgtgcacaggtactggggtcctgctgtatagggtgccagggtgcgaggagcaggcagtaaggacacagacggggatcccagtgggcagagatgcctaggtcctgccagttggggtaggatcttgcagtagcttagggggctttaatcctccaagccccatacacctgccttctttttattttattttagtttttagcaatagggtcaccctctgtcacccaggctggagtgcagtggcgtgatcgtagttcactgcagcctcaaactcctagactcaagtcttttgagtagttgggagtacaggcatgtgccaccatgcccagccttttttttttttttttttttttttgagacagagtctcactctgttgcccaggctggagtgcagtggtgcgatcttggctcactgccacctccacctgccaggttcaagtgattctcctgcctcagcctcccgagtagctgtgattacaggtgcgcaccatcacacccggctaatttttgtatgtttagtagaaatggagtttggccctattggccaggctggtcttgaactcctgacctcaggtgatccgccctcctcggtctcccaaagtgctgggattataggcgtgagccaccatgcccaggggcccagccagcccattttttaaaaattatcactttttgtagagatggggtcttgctatgttgcccaggctggtctccaactcctggcctcaggctatcctcccgtctcggccttcccaaagcattaggattacaggcatgagccaccgcacccgcctggccttacacctgtcttctgctagacctggggcagcatcgcgggtggtggaggccccactttctgcatttaacagtttctaaagcggattctggagcgggcagaaaaaacgctaggggaagggctggtccccttcccgctgctggctcaccctctgatagacttggccttggcttatctcctggagtcctgttcttttagcttttcctgctgaatgcattccagaaacctctggagggagggagtcccgagctcctggcacagtggctgagacctacttgttgggcagactaggtggaatgtccccttttctggagctgggaggagacctcagagagtgggacggggtctttcttgcggggacctgtggccacggagcgggagggaggcgagtgcagtttccctcctgccctctcctcctgccttccgggtgcctcttcacgccctccctttccttcccttcctcctcctcccgcgctctctctccactcccctccccctactccctccgctcggtccttcctatagctgtgccgccccccaccccttacctagccagagctgatcttgacctctaggatggtgagggggcctgaggcctggaggccgccgttgctgggtgcctggaaaagaaacaaaactgaaactaattgtacttgtggtgcaacttccgtcccagccagggacacaccgactcgcctcgcacagcctcaggccccgccttcctccccacccggccccgtcctctcccgccaaggcccccaccccggcaggcagctggcaggcttgggctggagtccaccagccaggtcggcctgtcagtccagcctcagggctaagtgtgtgtatgtcacaaacagggaactacctgagggcgggttctctgagtagagggtggagggtcacagggtttatttgtgggaagaaatgagagctcatctgtgattcagagaccagggtaactagacacatggcctcagggcgggtctgcagatttgctaacacctcaggcaggcaggtgcctgcaaagcttcaagagaggcctttcattccataaaccgttgctgagctgtaggagaggctgtgggggatcaggtaagaagcctcttgctgagggaacagcacaggcttcctggagaaggcatcaatgagatgagtttaaagaaggcgggaggattgcttcagcccaggagttcaagaccagcttgggcaatatggtgagacccagtctccataaaaaattcgctagccgtgcatggtagcgcatacctgtaatcccagatactcaggagactgaggcaggagaatcacttgaacctgggaggtcgaggctgcagtgagccatgatggtgacactgcactccagcctggatgacagagcaagaccctgtctaaaaaataaaacagtaagagggcatagagggctggagaacactgagaagaatgttcctgttccaggtactgggagcagcaagggtacatccccatttaggatgatgtgtgtggagaggatacgagagtgttggcagagaagcctgcattttatcaaaaaagacaaaagaatcattgcaggagatttccctcaacatttcatgaaaaaataatttttattttgagacaaagcctcgctctgtcgcccaggctggagtgcagtggtgtgatcttagctcacagcaacctccgcttcccgggttcaagcgatcctcctgcctcagcctccaaagtagctgggattacgggcactcactgccacgcccagctaatttttgtatttttagtagagatggggtttcactatgttggccaggctggtctcgaacttctgacctcaagtgatccacccaccttggcctcccaaagtgctgggattacaggcgtgagccaacatgcacagcctcattttatgaaaaattcaaagcacaaagaagttgaaagaattgcggtgaacacccatatctccaccacttctgttctacaattatcattttaccgtaattaattcatgacatacctatgcatgtttgtacctttttatccacatggcggaatttaagtaggaaactgaagctgtaagagctcactctggcagcagccgagaggacagaagggagcctgacctcagggtccaggtgaaaggtggaggggctgagacatagatgccagagaggtaggtggaaatccaaaagagagagggtcacagaggccaaggcaggaaatgctgcacttctagaaggacgagggggtcagcactgttgaatgctaccaaccagacgggcaaccaaggtgaagacagaaaaacaggccaggtgcagtggctcacacctgtaatctcagcactttgggagaatcacttgaggccaggagttcgagaccagcctggccaacatggcaaaacctcgtctctactaaaaaacaaaacaaaacaaaacaaaacctagccttcctagctactcggtaggctgaggcaggagaactgcttaaacctgggaggcagaggttgcagcgagcctagatcgcaccattgcactccagcctgggcaacagagtgagactccatctcaaaaaatatatatattagctacctgatggctcacacctgaagtcccagctattcagga

SEQ ID NO: 587088 - DNA, 4001 bp, Homo sapiens
cccaggctggtcttcaacttctgggctcaagcaatcctcccaccttggcctcccaaagtgctgggattacaggcatgagccttattgcacgcagtcttccttctctctctctttttttctaatacaaactggcagatgatggttcgatctctcgaatttttttttttattttattgttttatttactttagtagagacaggggtctcactttgttgcctgggctggttttgaactcctggcctcaagcaatcctcctacctcagcctcccaaagtgctgggattacaggtgtgagccgccgaacctggcctctttttttttttttttttaaagatttgaaggtatctttatttacttatttagattttttaaatcgaggtataacatatacaagtgtgcaaatcttaaccacacagcttgataaacacttgatgtatatacgtgcactctcaagagcaagatgtacagtgtttccagaaagctccctcctgcctccttccagtcataactcctaacaaggacagccactgtccttattaccatgttgtcatgtggcctgtttttgaatgtcacataaacagcatcatatagaatgtacccttttgtgtctggtttctttcactcaataatattaaattgtgagtttttttttaatgtgaagtctttcaacgtttagaaattcaatgacactctgttatacaggttttgtttgtttgtttgtttattgagacagagttttgctcttgttgcccaggctggagtgcagtggtgcaatcaggctcactgccacctccacctcccggattcaagtgattctcctgcctcagcctcccaagtagctgaggttacaggcgcctgccaccacaccggctaattttttgtatttttagtagagaggcggtttcatcatgtgggccaggctggtctcaaactcctgacctcgagtgatctacccactctggtctcccaaagtgctgggattacaggtgtgagccaccgcgcccagcctgttacacagttaatgaatattatggtcataatatactgctgtggtttgaatgtatcctcctaatttcatgtgttggaaacgtaacccccaatggggcagtattgaaagttggctgtagcctacgcctataatcccagcactttgggaggtcaagactggaggatcgcttgaagccaggagttcaagaccagcctaggcaacaaagctacaaaccatcttaccagcaaattaaaaactaaaaaataaattagctgggcctggtggtgcacgtctgtaatcccagctacttgggaggccgaggcaggaggatctcttgagcccaggaggtggcggctgcagtgagctgagatccatcactgaactccagcctgggctcagagcgagcctctgtcaatcgatcaatcaatcaatcaatcagtgtcttgtctgggcctaaattctctagaatacaatggaagagggaaagtgaaagaaggtggaagtaacccacagctgggagccctgaaccctgctggtggcaggtggctctcgtgtcctcaccaggttgccctgcaatcacatgctgcatcctttttcctgaacctgccccacgtgccccaccacgcagccactccgagggctccttcaagggcggcagccctgtcactcacgtgttccaaaagtgcttcccctgtgccctgacggcctcgccatgtgtcccatcatgccccacgcgctcccactgtgcgccccacctcgcacccgtgccccatcatgctctgcgtgctcgttaggtgccccatcatttcccgctcgctctcattacgtacccagcctccggcccctgtaagtgccccatcgtgctctctgtcgctccagttagatgccccatcctgccccgcgagctccaattacgtgccccacctaaccccccatgtccgtgccccatcatgccccgcacgctctggttacatgccccgcctggcgctcccgcacatgccccatcatgctcagcgcgctcccattacgtgccgccacctcgcgcccctgcaagtgcccaatgtgccctgtgtggtcccgttacgtgtcccatcatgttttgtgcgctccgattacgggccacacctggcaactcaccgtgcgacctctgtagttccagagctcgcgagggccagggccgttggcggcggttggaacgaaacgatgagtgcctcctcgtggccccagaatggaatgccgccgtcggtaggggtctgccgggcataaaggggccttcggaaccccaccagagtcacagccaggaagggcagcggggcgcaccaggccgaaggctcacgccacagggagggcagctaggacatggggggaagcgcgttaaaccagggagtcctggaaggggacgacgcccccggccaggtgagggcccagacgtgggggcgtagacgctgaggggtggccgggtgggtctgcggctctgaggcctggctttcattctccatcagtccctgtacgagcggttaagtcagaggatgctggacatctcgggggaccggggcgtgctgaaggacgtcatccgagaaggagctggagacctagtggcgcctgatgcttcggtgctaggtacgccctggggcggtttgtccgcaggatccatgtcatcgcactctgttgggaagagagaggcctcattttcaaaaagcatttaatggggttggaaatgctttgtttgaagtggatttttgtttttgaaacggggtctcgctcagttccccaggctggagtgcagtggtgcgaacatagctcactgcagcctctgcttcctgggctcaagtgattctccagcctcagcctcccaaataagagatttacaggcgcaatccaccatgcccggctaatttttaatatttttgtagagatggggcactttctatgttgcccaggctggtctcagactcctggtcccaagtgatcctcccacctcagcctccccagtagctgggattacaagcgtgagccgctgcttctgccatgaattagtttttttaagaggaaagctaaggacccctatgtcccctttgcgtgatgcttccatgaagctcttgaacctctgagccgaagggcaggctcctaaaatgcagagagatttattcctgtacctcgtggtgtcgggcagcttaagctcatctgatcgcattgtttctgtgtgatcatgagagactcgatattatggaggcgtgggtgttttgggtccattttccttacattctttcctctattctagtgaaatagtatggatacctggaacacttggacagacccttcgattctaattactttaggaaaactcctcggctaatgaaacttggagagggtaaattcagagtaggagctggagaagaagggattgtttaggagcgagatgaggcaccatgcctcaggctgggaagactgctcagagcgcaggttctttgaattgactttgctgaggctgggttttggtaaaacagccatgttctctccccttgagacctaggcatttgggagatggcttaatgggcaaggtataatctttgcactctgacttaactcaccactgggaatgtttctttgttcatttattaagtaaaaatcgacgaatgcttacttcccacaatacatggtgaaaagagaggttgtactcagaagattagaacatctccacccttaaggacctcacaatgtagtagaggagactgacctgcactcagctcacttggtagaatcggatgagtgcctgggaggtgaaagcagtgttgtgggtgtgcttaatgaaggcatgattaattctagctgggaagttcagggaaggcttcctggaagagggggcatttgaactgagcccagaagtttgaataaaatttctatcactagaagctgggcacaggctcaggaggaagacattgcaggaagagggaactgtgtgagggagacatggaggccagagtactgctgacttagagggggaagaaactga

SEQ ID NO: 587089 - DNA, 4001 bp, Homo sapiens
gcccaggctggtcttcaacttctgggctcaagcaatcctcccaccttggcctcccaaagtgctgggattacaggcatgagccttattgcacgcagtcttccttctctctctctttttttctaatacaaactggcagatgatggttcgatctctcgaatttttttttttattttattgttttatttactttagtagagacaggggtctcactttgttgcctgggctggttttgaactcctggcctcaagcaatcctcctacctcagcctcccaaagtgctgggattacaggtgtgagccgccgaacctggcctctttttttttttttttttaaagatttgaaggtatctttatttacttatttagattttttaaatcgaggtataacatatacaagtgtgcaaatcttaaccacacagcttgataaacacttgatgtatatacgtgcactctcaagagcaagatgtacagtgtttccagaaagctccctcctgcctccttccagtcataactcctaacaaggacagccactgtccttattaccatgttgtcatgtggcctgtttttgaatgtcacataaacagcatcatatagaatgtacccttttgtgtctggtttctttcactcaataatattaaattgtgagtttttttttaatgtgaagtctttcaacgtttagaaattcaatgacactctgttatacaggttttgtttgtttgtttgtttattgagacagagttttgctcttgttgcccaggctggagtgcagtggtgcaatcaggctcactgccacctccacctcccggattcaagtgattctcctgcctcagcctcccaagtagctgaggttacaggcgcctgccaccacaccggctaattttttgtatttttagtagagaggcggtttcatcatgtgggccaggctggtctcaaactcctgacctcgagtgatctacccactctggtctcccaaagtgctgggattacaggtgtgagccaccgcgcccagcctgttacacagttaatgaatattatggtcataatatactgctgtggtttgaatgtatcctcctaatttcatgtgttggaaacgtaacccccaatggggcagtattgaaagttggctgtagcctacgcctataatcccagcactttgggaggtcaagactggaggatcgcttgaagccaggagttcaagaccagcctaggcaacaaagctacaaaccatcttaccagcaaattaaaaactaaaaaataaattagctgggcctggtggtgcacgtctgtaatcccagctacttgggaggccgaggcaggaggatctcttgagcccaggaggtggcggctgcagtgagctgagatccatcactgaactccagcctgggctcagagcgagcctctgtcaatcaatcaatcaatcaatcaatcagtgtcttgtctgggcctaaattctctagaatacaatggaagagggaaagtgaaagaaggtggaagtaacccacagctgggagccctgaaccctgctggtggcaggtggctctcgtgtcctcaccaggttgccctgcaatcacatgctgcatcctttttcctgaacctgccccacgtgccccaccacgcagccactccgagggctccttcaagggcggcagccctgtcactcacgtgttccaaaagtgcttcccctgtgccctgacggcctcgccatgtgtcccatcacgccccacgcgctcccactgtgcgccccacctcgcacccgtgccccatcatgctctgcgtgctcgttaggtgccccatcatttcccgctcgctctcattacgtacccagcctccggcccctgtaagtgccccatcgtgctctctgtcgctccagttagatgccccatcctgccccgcgagctccaattacgtgccccacctaaccccccatgtccgtgccccatcatgccccgcacgctctggttacatgccccgcctggcgctcccgcacatgccccatcatgctcagcgcgctcccattacgtgccgccacctcgcgcccctgcaagtgcccaatgtgccctgtgtggtcccgttacgtgtcccatcatgttttgtgcgctccgattacgggccacacctggcaactcaccgtgcgacctctgtagttccagagctcgcgagggccagggccgttggcggcggttggaacgaaacgatgagtgcctcctcgtggccccagaatgtaatgccgccgtcggtaggggtctgccgggcataaaggggccttcggaaccccaccagagtcacagccaggaagggcagcggggcgcaccaggccgaaggctcacgccacagggagggcagctaggacatggggggaagcgcgttaaaccagggagtcctggaaggggacgacgcccccggccaggtgagggcccagacgtttcgggggcgtagacgctgaggggtggccgggtgggtctgcggctctgaggcctggctttcattctccatcagtccctgtacgagcggttaagtcagaggatgctggacatctcgggggaccggggcgtgctgaaggacgtcatccgagaaggagctggagacctagtggcgcctgatgcttcggtgctaggtacgccctggggcggtttgtccgcaggatccatgtcatcgcactctgttgggaagagagaggcctcattttcaaaaagcatttaatggggttggaaatgctttgtttgaagtggatttttgtttttgaaacggggtctcgctcagttccccaggctggagtgcagtggtgcgaacatagctcactgcagcctctgcttcctgggctcaagtgattctccagcctcagcctcccaaataagagatttacaggcgcaatccaccatgcccggctaatttttaatatttttgtagagatggggcactttctatgttgcccaggctggtctcagactcctggtcccaagtgatcctcccacctcagcctccccagtagctgggattacaagcgtgagccgctgcttctgccatgaattagtttttttaagaggaaagctaaggaaccctatgtcccctttgcgtgatgcttccatgaagctcttgaacctctgagccgaagggtaggctcctaaaatgcagagagatttattcctgtacctcgtggtgtcgggcagcttaagctcatctgatcgcattgtttctgtgtgatcatgagagactcgatattatggtggcgtgggtgttttgggtccattttccttacattctttcctctattctagtgaaatactatggatacctggaacacttggacagacccttcgattctaattactttaggaaaactcctcggctaatgaaacttggagagggtaaattcagagtaggagctggagaagaagggattgtttaggagcgagatgaggcaccatgcctcaggctgggaagactgctcagagcgcaggttctttgaattgactttgctgaggctgggttttggtaaaacagccatgttctctccccttgagacctaggcatttgggagatggcttaatgggcaaggtataatctttgcactctgacttaactcaccactgggaatgtttctttgttcatttattaagtaaaaatcgacgaatgcttacttcccacaatacatggtgaaaagagaggttgtactcagaagattagaacatctccacccttaaggacctcacaatgtagtagaggagactgacctgcactcagctcacttggtagaatcggatgagtgcctgggaggtgaaagcagtgttgtgggtgtgcttaatgaaggcatgattaattctagctgggaagttcagggaaggcttcctggaagagggggcatttgaactgagcccggaagtttgaataaaatttctatcactagaagctgggcacaggctcaggaggaagacattgcaggaagagggaactgtgtgagggagacatggaggccagagtactgctgacttagagggggaagaaa

SEQ ID NO: 587090 - DNA, 4001 bp, Homo sapiens; identical to SEQ ID NO: 587088

SEQ ID NO: 587091 - DNA, 4001 bp, Homo sapiens; identical to SEQ ID NO: 587089

SEQ ID NO: 587092 - DNA, 4001 bp, Homo sapiens
tcccccgcactgccctgcccttacctattccacgtcccagacctctgactctgctccaaaaccagccccttggccaggcgcggtggctcaggcctgcaatcccagcactttgggaggctgaggcaggcggatcacctgaggtcgggagttcgagaccagcctggccaacaaactggggttttagtgaaaccccgtctgtactaaaaatacaaaaattaaccaagcgtggcagcgtgtgcctgtaatccagttattcaggaggctgaggcaggagaatcacttgaacccgggaggcagaggttgcagtgagccaagatggcaccactgcaccccagcctgggcaaacaagagcaaaactctgtctcaaaaaacaaaaaagccccctaaaacaccaccagccaccccacccagtcggtgtcccattgtctgtagggcctgaaatcccagttccccagggctcacctggggcccgtgctcgcctcctcttcctcttcctgcagggccagagaccccagcagcttcctctttggcccctggccctggctctctctggctcctatagccaggcccccagacttcacctcggcctgggagaggaaagtgggggcccgggaggggcccagaggcctgagaggctccccgcctgggtgggccgcagcccctcactggctgtgccaccttcacttgcacggggaaggctgggccagccggggtgctggcggtagtgtaagaggctggagtggggcccccatagggagacgctgggagcggcgaggctggatttggcttcagggagcccgtgcggtaggcaggaggtggcgggggctcatatgcctgaggagaaacgcaggccagaagtcgtaagcaaggaccccactccaagacccacatttgtggaaatgaccctggctgtggggaagcacaggctttttgcatttgacaaggtcccgtcctcaagtggctgacatgttggtacttgcagccacgcttcctccatgctggggtgcacattacacacatgggggatcgatcaggctgggtctgagagtccagagaagggggcagggtgctgacggggaggaggggcagagtcacctgtcggtctggtcgccgtgacgcatgaccccgacccccattcagctcggccagcgtgctgctcagcaagtctatctcggcgtccaggcttccagggcgaaggccccccctgtctgcagggagcccctgaggatggagccagggcaggaagaatgcaaatcaccataggccttctcctgtcctgggtccctcagactcggttctgggggatcccacatgtcccaccccacgatcccgggtctcacctgcgtgtgctggagtactccatgggaccccacccacgccggcccccgatcctccggtccccctggggcctggtaacactgctcagatggaagggggcaaaaattgaccctggggtggggctggagtgctgggttgagggaagagaaatcaaaggtggggtggcggaggacaggaggggtgtatatttgaggagccaccctctccgcctctcgttacctcctcccccaaatctagggtcccaagagagcgcaggcggctgttccccccgcctcggcttggggaaggggcaggaggaagcagccagggcgggaggctggagcggtaggacagaggtgagcgccacagctgggtggctcttctgtctcacaagggctgccttacctgctccgtgggccggtggtggccccggggtgccgcgggggatcgccctcccctgaggggctctggcgggctccggctgcttcgggggcagccaggtgggccccgacatggcctggaaagggggactccagacagcggtcttgaagccccgagcctctggccttcaccccctcttccgtcccgcacctcgtttgggactccagaaaagaaaactttttctggcttttttttttcctcttcctccctaattttggggacgaccacgcctccgatgacgtcaccacattcctgggggagggtcacgtggccccctaggccctaaactgccatttctccctgagtcagccccctcctgccgagaggggagggctctccgggggatcccgagtcactgggggttgcgggcagctggggatgggaggtgcgggcccgagccagcctccaagtccacggatgcgtccgggccccgcaccccagccctgcacgtggcagcctcgcggcgggaggctgaaggctccgatctccacccctctgcagagctctccattcccaccccctccctctcagctacccaccagcactgctcagccagcctgtagtgttttggtcttttattcatggtcagcagagttagaaaaataaaacagaacgaaaacatcaccaccccagtgggccggtgagtctggccaaaatggggaaactgaggtagcccagagtcacagaggaggcctggcccctagcatcaaggcaccagtgaagggaggctgcggactccctcccctgcacggtggggacagccacccagagttagtgtgctggggtccctctgccaaaggaggtgggcgtgatgcccaagcccaggatccccttcaaacctcccctgggctccacgtcccaagggcagggccacgggccacagtggcctcctcttcctcctcctccaaggatcaggataggccgcctgcctgggccctctctacctagccctggaggcaggggcatcacagatcagtgcaggtgactggagtgaccccatgaaccagcagcgtggggcccaggtctcgggttagagtctccagtagcgccaggtagcgggggtatcgggcgggatcggctggcggccgaggcaagtacaggaaggtgagggctgtgatggggccctcagcatccccaccctccggcccacccggccctcctcctgtgccgcgcccctgctgggcccgaaccagggcgttggcgctgcgtgccagggcctctgcctctgcgtctccccgcccactgttcacaaagtccccttcctcctccgcctcgggttccccagccccggccccctcgccccacaccacctcctgcacctcagcccggatcctcagttggctcagcagtgcccgcagccgcccctcggccgccccaggcgcctcccgaggccccaggcacaggaagatccggagccgggcgctatgccaagcgggcaccatgcccaagatggttgccatctgcagcaggaagaggccgcagacatccacatagccgggcccaccccggggccgcagcaggttgaggggccacacgtccacatggtgcagctgagaggtgcccccagacccccggctcagccgctcagggggcaaggccccgctggcccgggccagcaccacattcttgttcatcttgagggcgtcggccaccgtggccacatagtcctggggattgagggcccgggggctcccaggagcccggggaggagggaacagggtgctcagagctggggaactgccctccctggtgctgtctgcaggctcagagaaagccgggtccgtcaggaaatggtcctgcggtggagcgtcatcgtagaaacctaggaccaacgtgttgggcttcatgccacctgggggcagagcggggaaggcaggaacagacaggagtcaggctcacaggctaagtttacaccacgctcccacacactgacagcaaggtgcgtcagccataggtatgacattcccactgtgtacgggctcttacggcaacattctgcatatttgcataaagacttttcatttttcctaaacactttcacatgcatttattttattatctcagtgactaatctcctccacttaaacaggcaaagttcgccttaggattcttgccactaatgagcactccaattctatggagaggaggatgctgtccactcccggcttctagcggggcatctgtttcacggcaggggatgcgagtttgactctgttgtgcaaaccagacaccctgatcagcca

SEQ ID NO: 587093 - DNA, 4001 bp, Homo sapiens
cgaagtctcactctattgcccagactggagtgcagtggtgcgatctcggctcactgcaacttccgcctcctgggttcaagtgattctcctgcctcagcctcccgagtagctgggactacaggtgcccaccaccatgcctgactagtttttttatttttggtagagacggggtttcagcatgttggccaggctgctctcgaactcctgacctcaggtgatccacccatctcggcctcccaaagtgctgggattacaggtgtgagccaccacgcccagccaaagtgttttcatttaaagaagaagcttttaatctaaaggtggggcctggttttacctgttaaggcagtgctcctaggaggggcctttgtgaggagtcagttccctgccccgtctcacccagggaatcagtcccagggagcctggtgtccctgaccagcctagagtggtcagggctgagattgcaaattcacccccatcctgaggccactgcacaaacaaagtccttgcctccctggccctctatccccactgcccctctgcagagggtccaagttggggctggaagctcactttctcagagacccaggggtcccactctaaagcaggaaggtgagattccactggaggtattgggtggggagatgaggaagcagagggcttgacagtatgagggctcagaggtacttgggaccaggcccagtgtaaactgcaaatgcaggaccccttgttcaaaattattaagaacttgaagatgaggacagcagggcattgaacaaagcacaggaatcttctggagtacaggggagccctttgtgactgctaatgtctgctcaacaacctcacccctcaggcagctgttgggtgggaggcaagccccaaaacacttggaggaagaagcagcccacaggattcgtccctgccccagctgctcttcctgggactggacctcagggctaagccatgaaatgatttacctgcaggtgtgctagccctgcccgaactaagagctctccaggagcaggcacaagtctcattcaatctttatgtcattgggatctaacacccctctgcacacagtagactcaataaaaggcagatggactgaactcagagccctccagtgtcacctgagctgccctcctccactggtcagcacccagtgttacaccaaacaaagcgctcctcccctttcccacacagtccactttcattcaaatgaatggcgtttccttatcgtgcttccaccacccacaggagtgcatcccttcttcagcagcctgcttctgccttccctccccatcccacacaacctggcttcttccctctggtcctttttggtcctttcactcccccttggctgtcattctgcctctgtccttaggtctaccctcaagattttcctgtgtggcccaaagccacatcctccaccgccactaaaaggggccagctgggattctgtaattaggtgggctggaaggaaagggtatgtctgagtgactggcactgacaatacacttctagggtgctgtattcggaaagcaggcccaggtgggtcagagggtctgaggatcacggcggtagggccacggatcgttctaggaagcctacctcttctgctgcagcatatgaagcttgtccaggtgctggtcccagtcttgttctctgaccagaaaggagggcagaagtttctggagttggctcccgggcccttctgccttaggtagaaaaccccccatgtcttctccttgcagacactggcagattatagaaatgtggcgaaagaaacaggtctaggatgacagcaactgagcaagagatggggtctatttggggctgggactctgagtttatctcctgtatgacttgtgtatgcagcatgcagcttgtaggtgtgtgtgtgtgcatgcagtatgtgggttgtggggtgtgcgtgtatgcacagtgtgtggctgtggtgtatgtgtgtgcatgcagtgtgtggttgtgaggtggtgtgtgtgcatgcaggtgcgctgaggggactgaccgccctgcctggggagaagtgcttttcctggagggggaggagctctttgcagagctgagccccacagccacagaaccaccctggggaagaaaaggaggaggggaaggaaggttcctaactgtgggctgggatggctgagacccgagaagctaagaggtggggcagaggaatttggaaaaagaaaagggatggaaggtgggtccacaaacaaggtgcacagttagttgcatgagggagaggaggaaataaagacttccagctcaagagtcaggcagagcctggttcaaatcctgactcttatcccttacagttaggtgagctttctgagcctcagttcctaacctgtgaaattggggtaacggctatgccgtctcacgggagcatctgtaaagcatgtgtcacaagtactcaatcactgccgatcctccttccacaagagggctcaagagacccccgggctgcttctcagagcttcccatttatgtgtcttgtggtcatctctgtcctcaaccctgtacctcaaaggagggtttctgacccccacttcccaggccaatccctctctgtgagaagtcctcatgaccgtgaccggccagcttcctggagcgtcgccgagcaggctctggtacctggggacgcaggtcagaggagcccccaggggcctcgagttattatggaggttgaacagcagaaactgagcaaaggtagacgacaaataaatcgtgattccatgtttgggactctttccaggaatgaaacaccaggaggaataagtaatgttgcactattttatatattttatattatattttatatattaagtagtttcccttatccacagtttcactctctgatggttcagttacctaaggtcagccacagttggaaaataggtgagtacagtactataacatattttgagagacagagagaaagagaacattcacataactttatattattataattttcattttattgttgttaaactcttttttttttttttttgagacagagtttcactttcgttgcccaggctggagagcaatggtgtgatcttggctcactgcaacatccaccttccaggttcaagttattctcctgccgcagcctccctagtagctgggattacaggtgcccaccaccacgcctggctaatttttgtatttttagtagagacagggttttaccatgttggccaggctagtctcgaactcctgacctcaggtgatctgcttgcctcggcctcctgaagtgctgggattacaggcgtgagtcactatgcccggcctaaactcttcactgtgcctaatgtataaattaaacttcatcatatgtatgtatgtatgtatgtatgtatgtatgtatgtatgtatgtatgtacgtgtaggaaaaaagatagtatatacagggtttggtgctatctaaggttcctggcatccactggggcgtcttggaatgtatcccctgaggataaaaggtgactactgtatatgatagcttgtatttatgttctcattttttttattattatactttaagttctagggtacatgtgcacaatatgcaggtttgttacatatgtatacatgtgccatgttggtgtgctgcacccattaactgtcatttacattaggtatatctcctaatgtatccctcccccctcccccaaccccacgacaggtcctggtgtgtgatgttccccttcctgtgtccaagtgttctcattgttcaattctgttctcattgttttcaaagaggtacatcaatattattgaattgcattcactcaatagacctatcaggtaaatgagaacaaggaagaattccgtctgtgagaattcttgggtgtgctggccccaagtcccatggctagtggcgagactgtaactggccatgaacttgggatctcagctccaaaccactctccagaccttgttgcttcttgggaatcttttggctgtaaaggtgtgag

SEQ ID NO: 587094 - DNA, 4001 bp, Homo sapiens
tctgggaagtgcccacccaaagaagagtcattgctctggacacctgatatccagcaagaagaaggccaagaaagtgcggaggccagtaaggagatcagggcagggaggggggatccctcccaagggtgacatcaagcctttctagccaaagtctgcagaggcagcccccatatgatctgaggaaaagtgagggcagacaggacatgcggaagcagcctattctcagccactcagcgcagggcctcccctctgctctcccctgatatcgcacacagggaatctccaccaccccttccaatcccccaggcctttttgcactctgtgcctggatcccctggccctggggtcctaagagtgggaagaggatgagtgaagccagtgaggacgacctactctctaacaacaatgccattctgttgccccaagatgtcatcagccaaacatgtgctccagtccccactctcccaggccttgggggagaggtgggcggctggagagatgggaagccataattcacagaaagagaccatccccaacccagaatccttcagcaaaagaaaacacaggggcctccaggcagcctccccggtcaggctaaagcaggctcctactcttggggtcagagaaaaaccctaaggcacaaagacttcaggctttcctctatgaccagacatctgcctccttcgtgacccagggaaagccccaacaggcaggacttccttctagcatgccaccaactgggtagagaactctattagagaccttgaagaagagaccacatgcagggatagccctgagttccgattccctgctcctctcctgctctgtactccaagctgtcatggtgaagaaagcaggacacgggtttaggaagttttcaggggctggaagccaccagtgaatgtccttagggcttaaacgctagagtctcgatttccaccacctgaatgcggaagagcacaggtcctcggaacatctgttattttgacccgcttcccctcagtccccacccgcactgagagagaaatacacctcaaggttgggtttgagcgttgtaggtcttcatatccccccagtgctgggcaaatagtaaggccttggtcagtgtctgatgagacagatacataggaatggtcacttttttcacattttgtcttattttctggttcctggtgtccgcggttctctctgcttcattcattcaatcgttcactcattcctccatgcgaacatatgtatactatgtgttcctgccagagagactgttctagaggcaagcagtggagatacagaaggcattgtcctcacctgccgtcccctcttgggtggaggggctgtgatgctctatccttacaagccccagcaagacgcctggcccttagagaagtactcacaagaggcttgcagaatcgaattagatcttaagatagtgaacacctgtgcccatctcaaccccatcctctttcaccagccctacaggctgaggctcttaagacagaatgctcccaaggagccagtccgggcctgggagcaccatctgtccagccaaaggtgccaaacaaagacgggaggtgagggaggggtgaggggtagaggtgcaggcctggggaggtggggaagggagcagaccaagggggccttacctcttctgctgcagcaggttctgctcatctcggctctgggcccaggactcccgtctctggaaccatctgcagaacttgctccataggcagagaattagccctttctccttgggcagtgacaaacccatggggtgtagggccggctccttgggggcctgaggccgaggccagaccctgacgggactcagccttggggccacatcagcccccccaagggccggcccaccgtctccctgtagaggtcccgtctcctgtctcctgccttcctgacgagttccttgggagtctcccagcagccccagccagtttggagagggctgtgagtttgttacacttggcagagccagccaggactctgcagggctggcctgtctggagctcctgctgggagtgagcaggaggagccaaagctgcacggacacgccctccctcctcccaaattacctgagatttaaagacacaggccagccacagacctgcctaccaagggggacttgtgccaactccaattctttctccacccagggctctctccctgcccccaggccagtcacaaccagggaggccttcagaaagactggcgaggcctcccttggacgtcagaacacccagtgacctaccctgagagactctaggcagtgagaaaggaggggaggagtcagggcaggcccattcccaatgttgaggactcccaggagggagcgccccactttcccacagtgcctcttctgccgaccacctgcctcactctctgcctccccctgcttatgtcctggagaattccattttctggactcttccagtttcattcttgccaggcctgaaataggtatataaattgcgaagatactcagttctcccagactttcctctcagtccccatcacctttgggtcagcaaactttttctggaagggctgataggaaatgtaaagatgttaggttttgcaagccatgtacactctctaatgtacgttattctttggttttgttttggtggttgttttctaaccacccccaaagatgtaaaatgcattcttcgctcaccagccagggcacaaaatctagctctgggcagaccccctgctcaggagctccacagactgtccacaatgccccgtgcatggggtgggtgcccgataaaatacaggacacgtggtcaaatttgaattttagataaacaacaaagaattttttagtataaatataccccacgttttgcaagtattctatctgccagccttcccgtggaggtgacattcagctgctactgtgtgctgggccttttaactgagcgttcccaggtaaactcgtaacaaacctgcaaggcaggtattattatctacattgtattgatgggagaaaccaaagctcaccatggtaaaggaactctcccaaggccatagaggtggcagaggcaagattcacacccatccctcattccaagcccacttctttctccctagcacacctcctcattctaactggccaacagagcttcagagaggttaagtgactcgcacagtcatacagaagaatgatggcattaagcatggcccatcgtcttcccacaacaaagagctccatcatgagcttgctggaagctgtcggaaaggtcatttagttcaacttttccactggaaaggggcagaagcccgggcttatccaacctcctggtgccagccaggtgccaatagcctaggggcaggtgtctgggtgttcagagtcacaggtgtgtggatcacttcctagcttcagagtctgttttgtcctaactttctctgactcagagttggaagacccagccaggggagtgtgtgtgtggcgtgtgtatggcgtgtgtgcccatgtgcatttgtgtgtggtgtttatgcgtgtgttcatgatgtgcatcggtggggtgttttgtgtgtggtatgctgtatgtatatgatgtgcctgtggtgtgtttggtatgtgtctacgtgtgtatgatatatgtgatatgtgtaggtatggcctgtagagcgtgtggatgtggtgtctgtgatggtatgtgtgacatgtgtgttgtgtatatacgtattgtggaaagattgttgcatgtgtgttgtgtgtatggtgtgtagtgggtgatgtatatggtacctttaaggtatgtgtgcgtgtacatgatgtgtgtgtgtgtgtgtggtgtatacatgatttgtgtagtgtatggtgggtttactatgtgtgtatgtatggtgtgtgttgtgtgtgtatgtatgtcatggggtgtgtgtcatatgtgctgtgtgtggggggagtcggtgtgtggagggaggtggatgctgaggtagggcaggggagagaaggaccccttcaagtggaaagctat

SEQ ID NO: 587095 - DNA, 4001 bp, Homo sapiens
ggagttccagaccagcgtagccaacatgatgaaaccccatctctactaaaaatacaaaaattagccaggcgtggtagtgggcacctgtaatcccagctactcaggaggctgaagcaggagaatcacttgaacccaggaggtggagattgcagtgagccaagattgtgccactgcactccatcctgggcaatagagcaaggttcagtctcggaaaaaaaaaaaaaaaaacaacaacaacaacaaaacgcaggcagcaggctggattggggcaaccttggtcgtacgtgtgactggtttccaaacttcagcggacatcaaaatccccaagtgccaaaggtgggctcccaagcagcacccctccagactgtggttacgtgacgggcacgggaaactataaattctgtttgtagctgccaggcagcaggcactcagtggctgctcccagctgacacacagatggagacttggtttctattttaacaggtgtcacaaagtatcccgagaagctggtgaaataagttgctttcacccctcctccttgcataatcctgctctgcactaacaggtggtttcatggcttcgttttctttcaacagacacaccaggacctcctttgcaggcctaccggatacactgctttgcagctgacacaggtgacactagagagctccttccggccactctctcctagacaccaaaaacccttcttccatgcagagagcatgcccacaggtgtcccacaacaagcccaccagaagccccagccctctggctccgggtaggaaaagccaagaaggaaaccaaggcgggggagtttgtcaagccctgctaggggacctggcaactgcctgtttcaggtgacacccccttccccatctccatcggcccaaggcatgggggtcacggactctccctgcccatccccatccgaggggacccaggactcgggatcacggtctctccctatccatccccatccgaggggacccaagactcggggttacggtctctccttgcccatccccatcccagggtacccaagactcggaagtcacggcctctccctgcccatccccatcccaggggacccaagactcggggtcacggcctctccctgcctaagaacctccctagtcctgtccaaacttcccccttcccacggaagtcgtcaactcttccatttcccggggtcccgcggagcctggggggccctggccggggggaaacgcccccattctgcgtgtctgaggaaaagcaacttcaccaccccggacgccgaaggcccaggccgggctggcgccgggcctgctcctactcctggggacaaactgccccgccgcccccagaccccgccaagcccggcctgaggcggcgccgccgggccagagggggcgctgtggtcgccgctaccttcgctccccgcgccgggcctaacgagtccagtgccggcgtagaggcccggaggtgccaggttggccggggggcgcctccggagggacaggcccccaacgtcccacccgacctctcagctcacaaacggccctccggttccctcctttggtcgccgtcccgggcgctccgtgaccgcgtcccaggccgagctacggcgagcgccgagcgccaattcccgcgcccgcgagcgctgcgcctcccacagcttcctctcagctcggccgcaaacgccatcggccccgcagccccaggtgggctctggctggggcctaggggatcccggggcgctcggagcccccagctccatccctccgcggagccgccgcgccgcagaggcctccccgcgcctgagggccgcgcgcacctcccggggccgttcggacgcccgcccgccaacttaccccgacctcggcggcccggctcctgcaggcccggcccgcgaccccggcgacccccagccgagccctcgtcgcaaccgctcggccgcgcgcagtcccgcccccgcttaaagcggcagcacccgccgaccgagcaccaggccccggcgcgccgcccccaagtgggtgcggcctgcgcgggcacggggaggggcgtccgccgtccgggtgggtcccggccctttaaatccccgacagccttgacggggccgggccggcgcccaggttctaggagctcctttttccctgagtctcctcccaggagccaggcctcggggaatgcccgggtaccctgggggcggtgggcacctgggggggggcgcggcttcccgagttggcagctatggggtccaggtattgtccaccactggactgaaggtggcaggcagggtagggtttgccacccccactcctcgctcccggtccccgctgctctcctggggttcttctcggcccgcagaatggagaggaggccaggagggtctttgggaaggtgacggctggagatggaccgagaccctgttagtaaaagaaagtccgggtgggctttctggaagtggccgcccaggtgcagaaaggccccattgattctgcagctgctttacctccgaggctggatccacatggcaggcagagctacctccatcaaaactggatggagagaggcctcaggccaggccagagcaatgaagggatagagtgggatggagccaggggaggtggcatgggccggaccaaaaggtgtctccaagggaaaggtacagtcaggcgccatggttaccatgttacagggacagagtgtggaagcatgacatgaacttggccacctccaggccctggttccacctcctacaccttccttcacctaccccccaccctcaccccatttatcactaacccaccaagatcattatgttcccttcctagacacatttcacaccctgcaataaataaatgtttcagtgcccgtggataccctggaggggaggtgctcttttctgaaacaagctccttgctcgtttaatgttgccactcgagaacaaggccacagctgaaatgctgggattgtgaatggatgtttttagtaccagttaattctgccccaggagaaacaaaatggctcagaatagcccttccatcacggaagaggttgcctgtttgcaagcaaaatctgctattgtcttacctccactgcccccaaaaaagtgggaggtccaagccggctgtggtggctcatgcctgtaatcccagcatttcaggaggccaaggtgggaggactgtttgagttcaggagttcatgaccagcctgggcaacatagcgagacctcgtcttagcaaaaaatacaaaaattagtcgggcttagtggcaggcatctgtggtcccagctactggggaggctgaggtgggagcgagactttgtcacagaagataaaaaaaaataagaggtccaaagttgaagactgaaatatttgagggctgaaattagtgtgctaaacgattgtttaatattgttttttgaggggagttaggaaaacagctgtagacgcttttttaaaataagttttggctcaattgcatatgataaagacctacagtcaagcctggccctaacattggcaaaatccctgcactttcaggtggcctaagcgtcttatcaaattagtcatcacactttcatgatttttgcctgttttctcatctgtctcctgaattagaggtgagggacagtgtcaacttcatcctgatcaggtaaattagatcacattcactcctctgcttaaaatccttcaggatttttggagattttttcggaatcccagctattcaggaggctgaggtgggaggattgcttcaggccaggaattcgagaccagcttgggcaacacagcgagaccctcatctctaaaaaatatttaaaaaattagcagggcatggtggcatgcacctgaagtcccagctactcgggaggctaaggcaggaggatcgcttaagcccaggagttctactctgcagtgagctatgatcatgccactgcactccagcctaggcgacagggagaggccctatctctaaaaaacaaaggaataggccgggcgcggtggctcacacct

SEQ ID NO: 587096 - DNA, 4001 bp, Homo sapiens
ccccatctcttctggagcacccaactccatccgcagccgcatgtctacagctttcctccgggacagtggaggggtcctggcccctgagcccccagcctccgcttccaccctcagagagggcaggggcgtggcagcccgggatgtgcccgcactctcaccggtctcaggctctggggggcgctgctggggtgaggaggccgacagtgggggtttctctgccttggctttgctgggcaccaccagctggcccagtcccccagtgaaggagcgggcctgaggtccaggagaggtggggggtggacggagccaggaggtggggccctgagacaggcctgacggtggggtgggggcgcccaggccgaggctggccagctccaacctggaatccaaagatctgcccccggcgccccctgaggcccctcgaattccctccaggagtccgccgaagctgtggggctccaggtctcgctcataaacatccacacacgtccagcgaccgcggcgataaggctctcccaggccgtggggcagcttcaccacccggaaacgggaggaaggggccccaggtggtggggagccattccggggggtgcccttgccccccggatcggggctgggctccccattgggcaggcggggcgggggcccggttgggggctgtggggtagggggatccgaagcccctgggctcccagggccctcatagtccgtggtgacgctggtgatttggaaactactcttcttcttgcccccgctcatggtccctggggctcagggctgggccaaggttgggggtgggttggggctccttgaaggggctcaggcacccctggaacaagggggccacatggcggggacatccgagcccctggggacgtctgggtccgacatggcaggagggcctggcgggaaccgggggtgcctgctgggtgaggggagaagaggagaggggaggtggcgggaggggggagcaggggcaggtttttcctgctgctgttgctgctgaactccagagctgagtttgcaaactggaaaaagagggggagagagagagagagagagagagagagagtgtgtgtgtgtgtgtgtgtgtgtgtgtgtgtgtgtgtgtgtgtgtgtgtgaaaccagtgggcaggccacctccggggcttcctctccggggagcagagtgggggaaggggaaaccgtcagagacccagagacaggcaagagatgacagagaccagggcagaggggactggatccaagaaggcactcagagtagaaagaggcagatgagtcccagagttgggcatttctcgcctgggattctgactcagggggcccgtattgtcccaagagctcggactccagggcctgggagaaccaggctgaagcagctccccagcctggcccggccactcagagagacctctcctgggcctcgagcccccaccctcaccccagctcccacatctctggggcaggccctgcccggctaccccccagcgccccacccagccctgaaccctacctctggggcctcggccactgatctgagcctgagggtcccggcgcctaagaggtcgggctgtccgttccctggggcctcctggccatgggcagtggcggggcacgcaggcggcgatcagaggctgtcccgtcctctccgggggccgcggctcatcctgccaggcatctccgaggaaagtttgctctccggaaaagaagaaacccgcgcctcctccgaggagcctaggagcggcctctgaagccccaagggtctggagactgatgtgggagggggcggccgagcccccctctgctcccggtggcagccagcgagtgggtgtcccgagtctcctcccgcgtgaccctgctgggtccgtgtctccgctcctcggctcccctgggtctctgcctctccgtctttctctttctgggctgttgacaacccccacaccaggaagtcctgcctcctcgggcctgctgactgctcctctcctcctcctcctcctccttcccctcttcctccccttcctcctccctccctccctcctggggcttcccgccagctggcccggggccaggcctgccacagccgctgctgttgcagttgctgcagccactgcttaggctgctgctcctgggggccccaaacagactcccttaaccccacacctgccgggccctagccccactcttgcagggaggggctgcagggggcggggctcggggagaaaggggaggagcttgcagggaggcgagggattcccttacttgtagtcaattgctgccattggcctagagacacacagaagagacggaaggcacaggccgggaggtgtgctgcatgcccacccagaagttcccagtccctgctgtggggcagctgtggctgttactgtcattctcctttggttttcacagcaactgcattattccccccattccttatttttaaaagtggattattgccggatcccggtggtggctcatgcctgtaatctccgcactttgggaggtcgaggaaggaggatcgcttgagaccagtttggacaatataatagcaagaccccatctctacaaaaaataaaaaaaaatagctgggcatggtgatgtgcacctataattccagctactcaaaggtgggaggatcgcttgagcccaggagttcgtgaccagcctgggcaatataacgagatccccatctctacaaaaaatttaaaaaattagcactttgggaggccgaggcgggcggatcacgaggtcaagagattaagaccatcctggccaacatggtgaaaccaagtctctacttaaaatacaaaaattagccaggtgtggtggcgggcacctgtagtcccagctactcgggaggctgaggcaggagaatcacttcaacctgggaggcggaggttgcagtgagtcgagatcacgccactgcactccagcctggtgacagagtgagactccatcttaaaaaaaaaaaaaaactgagtgtggtgatgtatacctgtagtcccagctactcaggaggctgtgaggcaggaggatctcttgagcccaggaggttgaggatgcagtgagccaagattgtgccactgcactccagcctgggcaacagagtgagaccatgtctcaaaaaaaaaaaaaaagtggattattatgaaaattttcaaacatgccatgcagacatggggagaccatgcaaactccacacagatggtggtcccagcccaaaatcaatttttagaaaatcatcaatgttataatgaaatgacattcaatgaaatgacattgtgtgggggccagctgtagtttgctggactatttgaaatcagatcctagatgttatactattcccctttcccccaacctgcccccgcctttttttttagagacagggtctctctctctctctgttgcccaggatggagtgcagtggtgcgatcatagctcaccacagcctggaactcctgggctcaagccatgctcctgcctcagcctcccaagtagctgggaccacagacacacactactacgcctggctaaatttctttaaaaaaaaatttttttttttggtagagatggggatcttgcaatgttgcccagggtggtcttgaactcccggcctcaagtgatcctcctgcttctgcctccctagtagctgggaccacaggtgtataccaccatacctggctaattttttagtttttgtagagacaggttattactatgttgcccaggctggtctcgaattcctggcctcaaatgatacttccacctgggcctcccaaagagctgacattacaggcgtgagccatggtgcctggcctcagggaaatttctaacccctctttttttgagacggagtctcgctctgtcgcccaggctggagtgcagtggctctatctcggctcactgcaagctccacctcccgggttcacgccattctcctgcctcagcctgtagctgggactacaggcacccgccaccatgcccggctaattttttgtat

SEQ ID NO: 587097 - DNA, 4001 bp, Homo sapiens
ataaaagtagaaatagccacgctatgtcgtttgtaggtcaactggctatagcgtgctacaaataatccccaaatccatgattctatcccattcaagcatagctaccttccatctgttgctggccaccagttgcaccattaactcaggtcagaggtcttaaaaacggtcccaacagagtaggtgacccatgatggagagaccaaaattcatcccaacttaacatcttaaagtttgtgccctttcattaagttatctaataattagtaatacagtataatatttattgtagcacttttcaaaatgattctttgatacctaaaaggaagcacagaatcccggatactcttcttcagggccaatttaaggcatagaactatatgaaaagcgcttctttagcccaacagcgtccatctggaacaagctggtgctttctttttgacaaaagcaaccatgaaatacagaccaagatccggtttttgatccagggacaatcagtcaattaaaatatgtttaatgagagtctactctgtgaccagcaccattcaacgtgctgtgggctatgcaataagttaatataaagtggtgtttataacttagttgggcaaacaagactacatacttggtttgtctcttttggctcattgctgttgactgctagttggccaacccaaggcaggtattcacccaaggccaaattcaggtctctaaatagtccacgttctgcaggggttcaattcaatccaaatattctttccttagcacacagtgtgtactcatgccccattcttgagcctgtatgggaaacaagaaaagactgataggtgctattgtagatgtagaaaatgcacaagacatgatgatgcttgctcttagaagttaaatttatttcacaaacgggggaggtgggagaaagcgattatccaatgtaaaacaatagtgacaaatacatgctaatatattaggtaagtcactttatctcttggggtctcaatttccttatctgcaaaatggaaagtattaactaaatgatttaaaggtgacattctaattccatgatagtgatgagatttaactataaaaagatctgaaataaaattaattcacatatgtccgtagaaggctaaaggtggagaagcagccatcttccaattttctcctcctgtcaacaaagccatgctcattcatagattaggcctgagaagctgggaaaagtgtgtgtatatattgggaatgggaggattgctatactttttgatatagacaattagaaatggaagatacaagctgataaggtagaaccaaccatttagagaaaagaaaggtcagtgagccttgggatgtttcctaaaggttgtggagcttgagcagaacctcgcaggatagtgtatgaagtagtctaattggaagattatttgtcgttgttaagtaggaagaaataaaagcaggtaggtcgaatggagtcacattataggggccttgacaattaagtagaactttgaaaagacctacatcagcccaaattcctatgaagcccacaggtttagtggaaagcccatagacaagggtttatgtctaacttgattgtctagacaaaccctaaagatgatttctagagtttatgacaagactgagctaaacccttaaagttcccttctagggaaatagagtaataagcgtttcacccttttctcacctttaatttttctggaattgtaagtccaattcatgtatatggtgaaactaaaataaaaatgagctgtcaaattgggcagtataagtcttgggttgctagtctgcaggccaggctgaaaaacaaatcacacaaacactaaaactacattcaaaataagaatgtaaaaacctggtgtacactacctttaagaacatcacgaaatcatagtttggtgaagaaggcaaagtctttggcatgggaactttccattttgaaaatatcgtaattattcttttctggattctggaggagacagagggaatttgtgatgaataggcaatctagaatgctgaggtgttctgtgttggagacagagaatgaaaaggccaaaacttaaaggcatatttaaacaaaatctgccaatctcttattttgccagcctatgacttctctacacacacacacacacacacacacacacacacacacacacacacacatcttcaccatctcttaatctacctctacctaagccaatgttttcactgcattcttcaaatacagtgagcattttttcttattccccatacttaaaatgctgtccccaatctcttcagccatttgaatcttctccttctccttctccttctctttcttctgacggagcctcacactgtcacaaggctggagtgcagtggcacagtctcagttcactgcaacctctgtctccctggttcaagtgattttcctgcctcagcctccagagtagctgggactacaggcgcctgccaccatgcccagctaatttttgtatttttagtagagacggggtttcaccatgttggccaggatggtctcgatctcttgaccttgtgatccacccacctcagcctcccaaagtgctgggattacaggcgtgagccaccatgcccagccctgaatcttctttctttatgttactactcaggtcattcctttaaagagaagattttctagattaatgcaatcccaaactctagactatagtcactgggttttgtgcatgtcattgtatagtgtcttgtagttctgttttcacttttcttatgtgcgggtcttgtctgcctcttaagctgtgagtcccttaaaagtggaaatgtaaattttaaacatatttgtgcccccctcccagtgctttgtatcttatgcattcaaaactagtgtttgcttatttcaatatatttgctgaacatttatgacatattagacactctcctaggtgatgagaacaaagcataaatcagatgtaattcttgagctcctttaggagctcacagtttagccaggaagagagacaaagaaacggttgattgcaacagagtagaatgccaaattagatctaaatttagggtactatggaagcaatgaggaaggggacttaacccatactgagaagagactgagagagatttggaactactgcctaaactgagctggggaagatgagtgtgaattaaccaggtgatgagaggacagacatttgagaaagagggagaagcagaggcaaaaacatgagaatacaacaaagcctggcttatttaggggaattgaaaatactgtaattgcaatatgccaggaacataagatttaggggaagggtagtgagaggtgagactagagaggaagacaggatccaaatcctaaaatgaactatttgataggaagtttgtgggttattctgagtaatgaagcgctaacaagagattttaaatgaggtataatctccttattgaacaatatatattttagaaatacaaaaatagtggcatgtgaactatagattggaaagacagaagaactatagattagaaagatgcaaagaggtccttgagaagtctatgacagtgctgaggaggggttgagaaattataagggtctatagccatcaccaattagtgccattcactcctgcatcctagctctggatgattgattcaaaggtggccaaccaggttatactaagaatttgaaagtttgctaatgacccacagagctgtaagatgattgcacctgagccacctcatgtggtatcccaggctggaagactctgagctctgagctctacctgctgaggtccccggagctgccccagatctagtccttcctaaagcaagactacacaattttctcttcagttctgtgagctttcctaatattctttcaaataaatcctttattttcttagggttcatttctgcagtttatgaccaaaaaaaaaaaaaaaaaaacctaatatgggctctgaagcagggtgtccaatcttttggcttccctgggccacgttggaaga

SEQ ID NO: 587098 - DNA, 4001 bp, Homo sapiens
acacaattccttaaactttgccaacttagaattagttacataaaaatcacccttcagaccgtatggaatcccctagacaaatctactcagcctttctgtgataggttatctgggtgtgaattccaccaccacctccccctcgtccccgcccacaaaaaatatattaagacttggcccaactagattttacaggcgacagagatgtaaagaaacaatttatggcttgcacaattatctaaaattcccgcaaacaagcagttccctaagtagtatgtcataattttcttatctatgagtagaagcacgtgcatttatttatatccctagattaacttcaagtctaattttactgccagtagtatccaggggtggatttctttgttctaattacaaatggaacttgagctagatcaaaggcattttaagaaggtcaaattttacttctctgaaaaataaagggtgttatcccatgtaattaattaatgcttagccatgccctttggcgcattatccggtggctgcagaaaaccagagccagccgttcccacctgttggtgcagtgaaacttacttacccaaaagagcagattgagggcgtagagcaggcagcgcagacacttcacggaatcttctctggccattgtgagccccgtaagggagaagccccatcctttcaccacatcctactcccaagggcaaaacggcagcgatctgcagggggcgggggagagagaacacgggacatctcaccatcacgcttcccacagcctgcccgtccctcctccacccgccctcagcagggtccagagggtcccgaggcccagtgcattcgagacatcgcctcatcaaaaatcatttgttaaaatcataatggtaactaaactcccaaaagttccaaaccggcttcagataacacctgctgggaaaagaaaagagcaactatccggatgaatgaagtcgcacagtaaactcgcgttctcaggggacacgcggcggagccctgtgcattctgatgagacgctcttgaaaacctccctcactccacgcccctcctcgaggacagctgtgctcggcactgtcctgaaggtgagaaaccacactgccccctaccccggacacgtcagaggcgccaccggcaagcccgagagaatgagcgcccttctagttaggacagttcctgggcactccaactccgcacccctctaccccgtcccgcagctcgggtgtgaatgcaagggactggggcggcggggcgggggcgggggcgggggcgagggggcagcgcggagttgagattccgcccggctactagggtttctctgggagaacgtgagaaatgatgttttcggccccagaatgatggattagcctgggacagtgggcggggggcggggggcgccggggaattagggccgatgcagctgtgcagacgccgggttagtcattcaaaccccgcttcccccgcccgggacgctcccgcgacccctcgctcaaagccgcccgcggagcacaaagcgagcgcggccaccgacccagccatcgcgtccgcgcgcccccggcagggcgcgaggggaagcgccggcggcagggagccccagagccagcccttaagtagtttagcacacagcgcggagggcagccgccggcgggctggcgggacagcgggcaggaaaggcgacagacgcgtggccacttaccgtcggcgctgggcccggtgccccacgcccgcctggggatagtcggggacgcacggcgggggctcatcggggcagggaacttcttcgcggagagccggagggctgcattggcttcagctggagacgcttctttctcttcctctccccccgccgccgccgtcgccgcctcctgggaaaaagaaaaaaaaaaaaaaaagtcctgggcagcagttgctggaaagtctctgctaagccacctcccagcgccgctgtccctcccaagtcctctccgagtccggacgaggcagcggcggcagccagggccagctgcacaaactctcagcgcatgctcgagccgctggctgccggggttgggtcctagtgggtgtttcttgtccctctcacccagcgagagtccccaaagggacgcttcacctctgcaggatagggtccagaagataatgcctaggaacttgggagaagtccgtgcagtaaatccctttaaaatggtggcgtcgaaggaatggaggctgggttataagcatagagaagcaggcttttattatatgataatatttgtgtttgagaaggggggtgaaggggtggcccaacccaattcctgcaatgagaaactagttttcacaacctttatggagccacctcctgtgatttgttattaacatggtgccctatgatccttcttattgctttgttgccctcccggatttttttttttttaagttctttcccactttcatagtgcactaatagcatttacggaaacatcagagtaatcatgtgcagtctgacatgcagaagaggaggaaagaacatttttaactcttagaagtaactcaagctttccaaaatttctcacgataagattgttttgagttaactgggtgatttattttgaaatgtgtacatagtagtggatctttggaaaatctaatttttttaaactagaaattcatgaagtattacacagcaggagaccatccttccaaaagaatcttcccttttagaagacagaagtttcacactaaataaaatgccactggatcatatcctccacataaaatgtggatgtgttgtgctatgcctcacagtactgctcatttctaggattacttttgtgggcactgcatggcaaataaaacttcaccagcaaatatgaattacctggaatacgagcaacatctttgacctaataactggagtccttggatttccttgcagaaaaaaaaaaaaaaaaaaaaatggaatcctatgtccatgactgcctgtctagagttagttgctgcatgactggagtgacaataagacatgcagtctcatatggaaaagtcaagaccaaaagacaacatggttgtcctgggttaggctaggaaaattattggtaagcaagtcactaagcagtatgtaagacagcaacccaaaagagtataaagaagtatagccatacacaaaaaaaacaccaagaaacatgtccagttatccatcagatgactccaactctgataatgaagcagcttctagaatactggggaagagcaaagaaacccacttttatcctctgccagtttcttctcaaattagggtgcatgcctattttaagcaaaggactgctgaaacaaccagccatccaaatgctgttggtgccatacattccccggagaggtataaacatccccgcattgaaaggagtccatgactgctattaaaactgagaaaaagagtgccaacaattcccatgtgtcaaagcagagatcctcttctactcctagaaggtagttaagtgccctttccttaattcgtatacctttaagggtcaactgccttaaagtaataaaatactagaggaagttactttagaagtatgcatgtcctcttcttcctggtaaacaagaaatacagatccaagataaagtagttgctcaacgtcacatctgtagtccaacctagattccaaagtaaaatccagaataatggctcttagtactctagtttaatggttctcgaaattgttgtacacgagaatcacttggagagctttgaaacaaccctaattctctggcatgcctgataccacttaaatcggagtctctgcaggtgaggcctagacacacagggttttccaagctcccaaggtaattctagtttgcagcaaaatttgaaaaccctgcaacgagggctttacagctgcctaaaaactagcaaaagggtctctttagatttcgttggatcaaatccctctcctgtgagtcgataaattgggattattatccccattttacaagttaagaagaaaacagagctgtagtta

SEQ ID NO: 587099 - DNA, 4001 bp, Homo sapiens
cccttcagtgaagtaagtatgcaaagtagacattccactctgtgtaagcaggcactgtaagactaagtgtctggcaaacagatgactaaatcattggcagaaaaaaaacagaactcaggtcacaaaataaggaatttaaagttccaagcaggccactcacactgatttaaaaaaaaaaaaaaaaaccctagagaactggtcagcatttacttaataaacagccagggtgataagcatacctcagggtgatacagatgaattttgatctgaaacttgacatgtatctccaaggaactgtatcaccaggtgttctaaaatttttttcccaagtctactattaatgaccatgttgaccagattcttactaactagccataaaagcgtactcaatgcctgtttctgtcttgccttcaaagcttgcagtcatgttcacatacaaaggaacagtaaaggtaaaatgacccaacctccttctcctgttggtgaccacaaggcagcctctctattccaaggaggtaatctaagcttgcacagatggcctagctctctgctaatgcaggggtgctgggtttgttttcagggtgggtgctgcaaagcgccaggtatatttatagaagggagcaagactactatggagggatgatgacagaagaggaagtttcttccgcccggtagagacagcctgtggaaagatctggattccacagcctaggttccactcctgactcgtcaactaccagctatgtaaacttactaaaacctttttggtctgttaccttatgtataaaatgcagataatgccccattccctcagaaggttgtcagaatgatgaacgagcattgtgtatgtaaaacctgggacgtgataggcattcaataaatgtcgatctgtcctgcccatcctcctgttcacccagaattgcgcctcaaaaaatcacaaagagagcctgcagcgttaaaactaagaggcccaagctggttggcagggaaagaaacgacttgggtgggggctcgcttatttcctggaggacttggtttaaaatggagttaggatattgatcatggacaagacacacagaaaaagcaccaagtactagcaaaactgacaacaacaaaaacaaaaagacatccctttactgtgagcacgaaacaaacttcggaagcagcggacatcctgtgaacctactcagtggcctcaattaaaatcccgagggtaccaagagctaacccagaggcacaccagccatatgccgcctcgtcagtttcaggccacgccattccgcaaaactgtccgcaagccctgacggctctcgcgcctccacgcctggcccagatgcgtctggatgtcaggagcgagcggcagaagggtacggggtgggaaagcggagaggtccggttgaatgtttgaaaaacaaggcggtgggtgagggggcggggtggagcaatgtggcagagacgcggccagcgagcctgagagaccgcggcttcacaatgaacgaaaggaagagactgcgacaagcgccggcgcccggtccccggcggggacggatggtgaggccgggggcgcgcagacgtgggaagccgggaagggggcgcgggatgcaacgagtgagtcgctgaccaggcagggaagccaaagagctcccaagcaggtgcaaagcccccaagcgagcaggaacggactggggatactcacggtgtaaagcaggttgagggcgcacaggcagttcttggaacacgcgaagcccccgcaaaccatcttggaacctgtggttgccggcagctgcacgtaaattcgactccggcggaggttccctgacagctgctttgtccttgcctttggggcctggcccaggcggggcagcaacgcagacgtgggtggggggccggggcctggggctgcagtgcgcggcgcgcgcgcggcggcggctcggacccgctttggaacctgcggccgccgcagctgagccggagcaggagcccgagccccgcccagccccttcgtctcgccccgcgcgctgattggccgctggcagggaacaaaggtagaaatatgcaaataaatgcgctccgccgaccgggatccgggaggggcggagcggtcccggggcgagggggagagggccaaggccgtgtgggagggagccccaggccagagcggcggccttggtgtagtttccccaggagcaggtgaggagggagggcggggctcggaggagatccacgctggcaaggagaaatatgacagcacctctggattcttggccctggcagatgacgtggcaccattttgaatgagatttcaaaactaagcacctggccttgtttgagggaaggaaggcaggaagcaagtaatgaatgaaaacatgtgaaagatttaaaagagaacgaagtagaggcaaatgaaagggagaaaataagtgaaacaataaaaaataaaataaaatccctgcttctctcagaaaataagatatgtgccctataattgtgacctggacaggtcagacttatcctacaaagatttgcaaaatactaataaactttatgaatacatgcatgcaaaggaaaatcaagagcgggagaaggtggggatggttaataggtccaaaaaaatagaaagaatgaataagacctactatttgatagcacaataaagtgacaatcgttaataagaacttaattgtgtattttaaaataacttaaagaatgtaattggattgtttgtaactcaaaggataaatgtttcagaggatggataccctattctccgtgatgtgcttatttcacattgcatgcctgtatcaaaacatctcatgtaccccgtaaatatatacatctgctacgtgtcaacaaaagttttttaaaaaattttaaaaagaaaatcaagagagattatttttgtgttctggtcgtgaatttcaataaacttattttttcacaaaaataactgaaaatcttcaaataactcagacttcacctcaattaattcattatcagtttactgcttctctactatagaaatgcatcttgtatccttaattcctcacctataaattgagattttagaagtatgtcaagcactttttgcatagtggctggcacaggggaaggcctcaataaatgtcagctagtattcatagatctgacattttgtaaaggcctactgtgttccaggcactaagcgaaggcaataaaggtttatttacttcatagtagtttctaccaaagaaaaaggttttataaagagatttgcaagtttacaatactatatctaacctaaaggttcatacggagtaaattatgtaattgcaaatgctaaattgtattaaattaaattaaacattgcagctgattaaaataattcgtcttcttagaattctctgctccctcttccagcctctccttccctcccctgaccccaccataccaacaagacctcattaatttgttaggctttctattccacattaaccttttatatacagctagaaatatttcaaaaactaacctggaaaatgatcctcaaacacaaacaatgctttgatgatgctcaactttcctttttaatagccagaggtttacaaaagatgaggcattggcagggaaatctattcattctcttcccattcctgggtgtcaccaacattagtaccacttcaactatcactcaaccaactattgcaactctctctttggcttctgcataatatcttcactatctccctataggctgaatcactttgttttcccagagaagtaccacctatcagtcagggtcccagcaaaaaggagatgactcgttcaaatagcataactgagaagaatttcaaaaagggactattttcaaaagtgtggacaaagttaaaggaaaccggctgggtgcggtggctcacacctgtaatcccagcactttgggaggccgagggtagtggatcacctgaggtcaggagtttgagaccagactgaccaacatggtgaaaccccgtctctactaaaactac

SEQ ID NO: 587100 - DNA, 4001 bp, Homo sapiens
ggggagtctcttagtacatcccccagcactggtagagtggtaagggattttcttgtgtttttccctaacctccagctgaagcagaacctagactatgggaacttgggttgactggttaactactaatactgcccataccccagctatagcagcagccatctgtgctgaggacttcccccagcggcactgtggttcagtagaaaggtcaccagaccaagcctgctaaccagctgttggaccttggacaaaacatttaacatctctgtgctttagttttctacattttatagacataaacacagatgctggacaagatgtcttctaaaatttttttccagttttacaactgagcatttgataggagcacaagtttcattttccccaggagtaggatggctgagtgcgctgtcatcaccaccctatgggatttctctcatttgtcccaacaggccagcacttatgggctttgtgtctgcacctcaccccacgggccctgtgaaacctttccagcaaatggcttagatgtctgttctgctccctcccctaggaaacatattttagactcaattcttccctcctgcaagtctgaactttaggtctccagctgaagtgggcaaggatggtgggctccagaagcagcagctctggtgtggtaggagccagaagaggaggtgaatgggggaaggatgtccctatgttctcacaccccaggacctccaggactctctagccaggaaacagggtcgagctggcattgcatgatctggttcagctcaattctcagcttcagcagtctttctgccacccctgatcacactgggttggatttgtgggggagggagtcaaggcctgcagacatgaacatacatgcttaggtcggtcaagtcaacaatgaacggcagagtgggatgggaatccaggtgtccggagtcccagcccaatactttttccaccccaagcagaagattctgaaaggacccctggccctccggcccaacacggggtcctgtttaaagacactggtgattgccaggctccaggggtgaagtctggtcctgagaagggtggcagggaggggacaaagtttggggcagtgctgggatgggaaagacatctgcacctggaggccattcttcctagactttgggggggtggaggtgggggtagatgaggcctgcaaaaggaagagatgatgccagtaacccatcctctctgaggtggtggagagagaggtttgggtttttccttcctcttctttctttgccagccgggcctccaggcccccaggcctgaaagtcagccgccacccccgacccccatcatgaatgtgtcagtgggtccgccttgggccaacaggctccctcaaacccacatttctagcctaacacagaccctcctccgacgccccgagaatacccatcagtctttactgattccctggcataccctcctccctacaacgccccctgcagacgcggcgtccccggggtgtccctccccaggataaattcccccaaagtgccgtcagcccagaaaactcggcagtgcggctcccgcgcgtggggcaccccgggccacccttccaccccgcggggggaccccgccgcccaggtgccctcgaccccgagactcacccagaagagcatgttgaagaagaagagcaggtatttcaccagcgggctgacgaaggagaactcctccccggaggcggccggcgcccggggtctccgcgccatggccccgccgccgccaccgcccccgggggcctatttcccagcggctgccggccggcctgtgtgccccgcgcccgggggcatgagccgagccgcgccgcgcaggagcccggccggcgggggagcctgcgctgcggcgggaggcgcccgagccggggggccgggagcggcgcgggccggggaaccgcgcctggagctgctggagccgcggtgggcagcgcgagcggacgagactcacccgcggccgcaggaccagcccggccagccaggcgcccaggaaacccggcccgcccccggccgctcattggcgcgacggctggagcccgacttcccattggctcgtggctgatgtcactaagtatccagccatccctctccaccgagagtcgggggagacacctgttctgtgagggataacttgttaaagggtcagcggttctgcctctcccctacccctaagggaaagcatccaggctgcagctgctcaaaggaacaagagtgaggagaaggaatgcacagtgcatcccacacccacgtcctccgcccagctgctgtgcacatatgcaaacacacatacattaaaatcaacaagtacgcacaccgtgtgttgagcaatgcgccgaaagctctgggaacgcgggagaacagaaacaatccctgggggatgacaataaaatcagggagacaaaactaacctacacataacaattagaccaagggtagatgcaatcttgtttagtaactatacattttaaatgcttatttcagaagctctacaacccaacagtggaaatttggaaacatcaccgccaatcccgccatcctaattcattgctgtctcaattcccgcccccgcagcccctcttcccttggtctacttgcagacaccgtttttaacatgctgatccggcacacacaggttgagtgcagcgtagctggcgaatatattatgctggctaccctaactaatacaagttgaacctcggggagggaatctgattccaccataattagctgcgtgaaagctgcaagctacttaatctctcggagcctcagtttgtttaatgttaaatgggagagtcctgacctagatggcgatttgaggattaaatgagataatgcatgtagctcacttagcacatggctggcacatggaaggctcatcaaaggcattacagtatttcgttttagcagaattaagaatccagtgtggaaatatgataaccgcacaaataattataatacgtttggtagaaggttagtgaagatagcgtggcaagtgaaattaggggaggatgggatttagaatagtagagacggaggggaaacataatccaggtggattaaaaaaaaagggggtgaaccaaagcctggaggtgcaaaagcacgccatgtgtttcgtgcaaaataagcagactgctgtggctggagcacagggtatgcttggaatagcagtgggacataatgctgaccgatgccgttacatgtggaattgtgttaaaactgcggaagtaattgaatatcagattggggagttagtgcttaattgacttggaaataagagttttggagaaaaggatgatggaaaacccatggttttcagttggagtgggaaagaggctggagagagaaagatttgttagaagcatgctgctcatcatccagataatcagaaatcaggaactgatttaggagtaatagacagaataatagatggttaggagaggatagaagggaaggcattggaaagatagaatctctagggctaggctgtggtgacaagcaggcataacaggagcaccaagagtggaggttaaagaaggcagtcacagccaggttactgggagattactggcccttaacaggttaagtgacactggagatcagttttagtataaagcaggtagggtgggcagaagtcattttccaagaggttaatgagtgaataggtaggtgccattttcagatgttagtgcggggaggatagagaaatagaccaagatgctgaatgtttctattagatgatcttccagaaatcagttttatttttttgaaacggagtctcactctgtcgcccaggctggagtgcagtggcctgatctcagctcactgcaacctccgcctccctggttcaagcgattctcctgcctcagtctcccaagtagctgggattacaggcgcccgccaccatgcctggctagtttttgtatttttagtagagatggggtctcaccatgctggccaggatggtctgaactcctgacctta

SEQ ID NO: 587101 - DNA, 4001 bp, Homo sapiens
accctcctataacatgtgtttcccacaaagcagttttttaaagcacagtctcctgggaccatctccatcagaagcacttagactactcaccttaaaatgcagattcctgagcacctctgcagacttacagcaggagcccaggaatcgatatcttattaagtaccctaggtaattccaatgtatattaaaaggtgagaactactgccatggagatttgaaatattttctggggctatattttcaaccgtaagcatgttagaattatttaagtttgatcaaaattttagaacacataataggaaaaaatcatacattggtcaagggttgggataagcaatgtgtgaaatgacattgtataaaaggtcccttcatatttttagattgtaatcactgttggtgaactagacatactcaaaagtggccctcaagaaataagttttgttttgtttttttttttttttttttttgagacggagtctcgccttgtagccaggctggagtgcagtggcatgatcttggctcactgcaacctccgcctcccgggttcaagcgattctccagcctcagcctcccgagtagctgggactacagacacgtgccaccatgcccagctaatttttgtattttcaatagagacggggtttcaccatgttggccaggatggtctcgatctcttgaccttgtgatctgcccgtctcggcctcccgaagtgctggaattacaggcatgagccaccgcgcccggccaagtttagttttttagttcgttttttatcaggtttatagctaacttggaatctggaatctgtgcctgactagatttacaggggatttgtacaggaagccccagaatgcacccacctatttcaagagcatagcaaacagcattcacccaagcattcatctacagtctggtattcatacactaagaagcaacgttctttgggcattacctccaacagggtaatagctccagtgaaatctctttttgaaagtagctcctctagttttggaatcttcctacctttcttctttcttttgtcagtgtgctgtacgcctctgcctacagcaggtttggcccttgaaagcatctgtaaaagaaacaaagacagctgtatggtccaattctgattatcagatttaaactgagagtgacagctctgtaatttataagtcaaggccgggcacagtggctcatgcctgtaatcccagcactttgagaggcgaaggcggcggatcacgaggtcaggagttggagaccagcctggtcaatatggtgacaccgcatctctactaaaaatacaaaaattagccgggcgtggtggcatgcgcctgtagtcccagctactcgggaggctgaggcagaagaaacgcttgaacctagaggcagaggttgcagtgagccaagatcgcgccactgcactccaacctgggcgacaaagcgagcctccatctcaaaaaaaaaaaaaaaattataagtcaaatccttaacaacgaaccccagggaagcctattcaaactcgttttgtaacaggtattctactagaagagccatcagccaatacttaggaaggaccaaacagctactcccaacttttatcttctctggctagagatgctttcgcattgcttctgtcatctcagctttcccttcctctgcttcccatcccacgagtggtttaaatgtgagtaaacggaaaagcaggagggaagaaagcaccgaggtatttacagttgcatccctgtcccccgtgggaacacagggagagctggggattactctctgcggacacacctagacttcacacagaagtgtgctgggaacctctaatcgccagcctcaggacctactcaaagtactcccttactattcagagccactaaccatcttgacgtcggtcttgtgagtccccaccacacagcgaaggccgcgcctcagcgtttcgccgcatccacacagcacgttctgtctccacggtaaccccgcctggacgctggtacgaacgggagaaaagctcgttggagaaccagcgcccgcggcttcttggttccgtgcagcttctgccgcggaagagccgaggttcctcttgggaggagagcgtcgttctctgggctgagagcgaaagtttggttgtctctatttatgagtttactttaggaaaaggcgaattggaatggcattgtttttcaaatgcaagttttctgggaaagaaattttcagggaccacttctgtttggggccgtgttggactccatagcaacccttgactatgtgcaccgcagaatcttggtctctggctggtgcgggaagcttagaaaatttctgctgaaggagttgtagttctgtgatttggaagcaggagtgcaccaaaatacagtttcctatttccacagatacacctacacacaatagagaactgtaataaatatttgtcgattggatgacttaatttatctatcttactcctgaacccagttaatacaggggcaaccacagtctttaaattcacgaaatcgtggaatgttagagttggaagggaccttacaggacctctggtcaacccctcagaattaacagactgaagaactaacatcttgttagttaactaatgtcagcctaaaataaccaaaaagctcagggatccagttgaaagagtttattcaagtgcaaagtgtgagggcggctatcccgggaaccactgacagcaaagaatggtgatcagtgctccctgatgcagggaaaggtgagggtcatttatatcaccaaaaacaggagtgctgtacgtaattacagcattttctagatgaggctaacgtacacagaagattcaattcactactattgattacactgtaagggggttgtttaatattctattgtaaagaggtaacaatcacaagggtctctatctccaacgtcatttagtctgaataaagaataaaaaatctggttaatatataacatcaacacaaagatcaggaagcaacagtcatgcaccagagaagaaaaacagccatgttctgtgatttagtttacagggcttaacttttccccttggcatagtacgtttggaaagtgctgaaattttcttttcacattttccccttttcttcaaaagctttcagagaaagcattatagaagaattatattctcaggccgtgtatttgatcaaacctcatgtcactaggaaggccccttcctggcagtcacatcccagggaggaggggaaattggaaaggaccaagtccgaattataaagcaacaagagaaagtagttctggaacctgattcaggctacacggctgcctcttcaatcaaacaattctctgagtagtctttgttctacacattttctcagctgtgtgttgacccaattgcagataaataccataacagctctgcagacaaaggcaagacaaaacacaaactatgataattcctaaaatacataacagcttttgccaccaagttccccaagatccaaatcaattacttaaccagtagcttagagagggttttggatccgaaaggttaattattagagtttttcaaatcagttattaatttggtgacgttatttgattcatctgggatataaacacagcattcagtttctgtcatagcacagattcctccttgggctgcagtgagtatgtctaagaccatacagttttgtaatacagtcttctcatgacagtaacttcattatttaataatgagacattcatgtggctgttatttagggccttttgtgtgtaattggttagggcctgtacatggcaaatgacatcttcaatacacagttgtggtacaaagacagaagtgaatctaagtggcttctggaaggtaagcactttctatttcttctgttaaagacactattgcgtaaacctttacagtaagttccagattcatcctttaaataacatgcgtctgtaaaccaaacaacattagcctaagtaagaaaagtctcttgcagatcagtcctaggagaaaacaa

SEQ ID NO: 587102 - DNA, 4001 bp, Homo sapiens
aggctgagcagaggggcctggctactgcccggaggctcttgtgggctgcagacatcatcgcccctcactccctctcactgcctgtctcgaatgtgggaatgcaggcaccccggagggctggaaggaagtccaactgtggctggcagctcgggcaggtggcagcccaaggggcagcaggaaacagccgccccccacgccccagggctgccccggagcttaagaactgacaaatgggccaaaccctcagggcagagaactttccaaagtgaagcacaccctccttgcagcttcaacagagtcctccagggacaagtggcaaagccatcagcatggaataagttccagaagttcctgaatgtgcattgcccccacactgaacggtcccccagggctgggcttctagaacgcaggcgtgagattttataccaatccttccgcctccctcctccctgctgtgtctgggcgtgcctgggccgatccctcgcccccttcctcatctgttaggaaacgtcatcggctcggctggggggcctgggtgcaagtgagcgcgaggctgggagcagtgggctcccaggtgccctgctcctccacttccgcctccctcctctggatgcgggaggccacagacaacgcagttctgaagagtccaggtgctaggctgcccgcggaataccggattcccaagccattttgataagcaaagccatccccaccccaccatggggctctgccatgatccgtccagagagaaactccgggtgaccagggaccctggtcacggggcttctggaatccggatctctaggcaggaaggaaatgcccacagcttggtcccctgccccgcactcaaatgacagtagcttggcgatgggggtggtgctggggcctggcatgatgccaggctaagggctcccctgggagagggctgcaaagggcccccagccgccccccaggtctgcctgggctcagccgcttccagcctccctgcctgaggcccacggtgcttcctggccgccgggcctccctcccccgggggctacaggcagcctggtctcccacggccacacacggcaccctgtgtacatcccacagcctgaccgccaagcagggggtcattaccggccacagagggctggcggcggcccaggccattcacccactggaagcctggcagtgggattccccagtcgggggtgagtgggcgaggagtctctgcctgcctgcacccaatgtgctcaggcacccgctctgatctcagagcctgggggtcatctggggaggggtctctgctgggacacagcaccaggccgccaacagtgatggtggagaggccctccactggccaagggggctcacggagtggggagaggcagctccatgaaacccaggggccttagtgacaccagaagggaaggccagaatcgggaggggggccgtggaccctcactgggggttggagggtatttagacctttgaggaggaggccatgaccctggaagaaagggtcctaggactcagaagggaccctcgagaaggaaggaggccggtacctgcgaggaggaggtggccgtgaccctggagggggggatgaggggtctttaggccctcggggatgggggccgtgaccctgggagaggagggggccgtgacctggggtccctgaccccgcgaccccgagaggcccatgtcacctgctggtagtcggtgtcctcgggccggaactggctgctagtggcctcccagctcaggtcgaagtggggcagccggtgcaggaggctcacccaccagggcgccgcgtagctgaccccggccatggcggggcccggccgcctccggatgcgcgcggcctgcgcggggctcccttgctggcccggggcgcgggcttcagggacccgtcgacccccgcctggccgcccgcatcatccgcgcgctcctgggcccggcccggcccggctcggcccggctcggctgcgctcggctccgctcggccgcccgcgcccgccgcctctttgttcgccgccgccgccgccgccccctccgcacccccgcccgtccgcccgccggccccgcccccgagcctccattggcccgcctcccgccagcccagcccccgcgcgccccgccctctgtcccgcctcttacccaccattggtctatcccccgccgatcccgccccacagcgtgccccgcccactcgctcctgaacctctattggtccttttacctgatggttttgcccctccactcgcatccccgcccattacccaatggccccgcccctccacgtgtccccgcccttcggccccgcctctgtaccgtcattagtccgccggcagaagctccgcctacttcctcgccttcttggagggacgcctggcccctaaggcgctggaagaccgaccctcagcgctgtaagacccgggccagccagtctttccacgtggccgtgggggctggaaccctggctgcatatgcagctgcgcttcattccatgaattcgctcttcgtttggatctttgcatgtttcttatttgactcgagggtccggcctggtgggctgggctggtcttggcctccccattgcacacacaacagcccacagcccgcagcgcccagcaaggcaccgagtggcctatctgtacaatggacatgatctggattcagggcctggctggggcacctagagctgtgtgatctggggcaagttacttaaccactctgtgcatcggtgtccttgtctgtaaaaggggatgataaagctacgagtgttggcagggcgtggtggtggttcatgcctgtaatcccagcactttgggaggccgaggcaggcggatcacctgaggtcaggagttcgagaccagcctggccaaaatggtgaaaccccgtctctactaaaaatacaaaaattagccaggcgtggtggcgggcgcctgtaatcccagttactctggaagctgagggaggagaattgcttggacctgcgagatggaggttgcggtgagtggagattgcgccactgcactccaacctgggcaacagagtgagactccatctcaaaaataaaaaaaattttttttaaaaaggtacgagtgttaagtggatccgcaggtagattcagtccccatccggccttccctctggggaaggttgagtcttttgtcaagacctaagatgaagacggtgccctgttctggtgtcctggggcctaaaaattcaggcacctgccagagagggcccatcatgggctttggagccacacagccaaatttcctaacagggcctccccatgcctgtgcctcctcctttgctaaaggggagatgggagctgccagagccaggaggatggacatagtgcgtgcttgggcccaggtgcacgcctccctccgcactctagggcagtgggtgcatcctggctctgcttcatcacctggggccttattcctggacctcctgtgtactgagaaacaggtttccacacccgggctccaccatctgctgtgcccgacttggccagctctgtgggcaggcaggccgttcctggcaggaagagctctttgcaggcagggacggttccgggcagtgtcttcccaggaggcctggactttggctcattgactgccctgactcgcctgttttcctgtgatagggcaccgggcaagagggactagctgagctgcggtttccacccgctggataacttggagacaccacccagctgggaaataacagccaggcagaaggggggaggtcgcattctccatccctaaaggccgaagagccagaaatttggggtggggtggggatactggctcaggttcctctctctccaatgccaaggatggtgggagctccaggcagaatgaagccccccccaaccccctaagaccaaggctacctacttggagtgggctggtacctggccaggtgagtcctcttctttggcgccagctgattgctcactgtgaacaggtggcttaggcaggacgcccactcctagcctg

SEQ ID NO: 587103 - DNA, 4001 bp, Homo sapiens
gactatggttttgcaggccagtttgatcccagtatttttatttctaaaggtgttcttatagttcctctgattgttaccattttaaaatagagaaagtccatagtgatgcctttcctttcagtggctgattggcacgacctcttgagaatgcatgcatgaaaaaaataaaaataaaaacattcttcgtcaaaaaaaaaaaaaaaaaaaacacaaacaactgttcagacttctatcagaatgcagaggtgtgaggatggtgccgctgcccgtctgggaatcactgtccacgggcctgtctcgctttctcttttaaaagtgcgccccacgccctgtttctttgaatttggattttgctcttctaatttccaagaaaatctttggcatatatttttatttttagttatccagctccagagtctctagactgtccattttctccttctctggaaacaatgacatctgcaaaaacccagaggggggggggggagtcggttattgtttaggtctctgcggctgttttctaagactagtgagcactgttcttatcaccaccactgagaaattaagctgaacaacctggaaggatttcagcccaagggcaagaggaagtgggtgggtggaaaggaggaggaggtggaatttgttttaaaacatttgttttaaggagaacaaaaattgaaagccgaaagaaagggtggcgctgacaaaacggtccttacccgtgaccctgggtgtctctgtctcccctcctgtcacgcacactcacgcgcacacacacccctcaccagggcgcatccccctggagactgctctccctagcggggtcagaccggccttccggggacgctgggggcgcgaggcaacggtgccaagtgaggtgggaaggctgagcggagagtgggagaggggaggaaatcgaggtggactgggaaccgcggcctggccggcctgccgtctgccacctgagaggcgaaggggtgcagcggcgcggtccttacctaggtctccggccctgctgagggggtggggggctccgcctgctagtgggacgcggacatggaccaggccccctccatcctccagaccgagaaggcgtagctgagccgctcgtgagccacatagctgcagcttgccatcttggagtccagctcgtcgctctggaggacctggtagaggaagtcgatgtacctggccgccagcttgagggtctgaatcttgctcagcttgtccgagggcagcgtggggatgatcttccgcagcgcggcgaacgcctcgttcagcgactgggtgcgctggcgctcccgcacgttggccatgacccgctgcgtctgcagctcctcgtaagactgcggactcccgccgccgctgctgctgccgccgccgccgcccgcgccgccgccgccgccacagcccgcagacttcttgccgcgcttgccctgggccgggctgcccggctcgtcgccgcctccgacgcccccacccgcggctccgccgggccccgcgccgccgcccgcgctgcgcctgctgctgcgccgcttgcgtcccccgcgcttgccgctcggcggctgctgccggtctggctcttcctcgctgttgctcaggctgtcgtcggccggcgagactggcgagctggacacgtcctgcatcatctctcgagcggcgacgcgtggcctcgcgggcccggggcagaggagaagagcggggcgcctcagcccgccagcttcccccgcgcgcggcgccggcccgggcgatgcggcccgcggaggagagagcaggaggacggacgggagggacctccgcggggagggcgcgcgggggaggcggggagggaggcgggagggggaggggacggtgtggatggccccgaggtccaaaaagaaagcgcccaacggctggacgcacaccccgccaggcctcctggaaacggtgccggtgctgcagagcccgcgaggtgtctgggagttgggcgagagctgcagacttggaggctcttatacctccgtgcaggcggaaagtttgggggcagcagtgtcattggcctgacgtgaggaggagggacttttcgaagttttataggaaagtttccgctttccagtccccctcccccgtcccacctcccttcctcggggtctaacaattcgtcctcccaaaccattcaaaaacgacctggcccgggcggccggcccctccacccgcctcctagccgccctcccccttccctccccgtcgccttcctccggcgggcgcggggcgatttccttccccgccggagcgtgcgggcagcgcccccgaaccctagcgcagcccaggaagcggtcggaggagactgtcctggccgcggtggcagccccatccggagtggctgtgacagcagcaatggcaacagcttctacacagtgggtgatgtctcatctcgcccaagagccctctaggtccgtggggccgatttgggattgctggggctgggggggtggtgtggcgcggggtgggggggcatgccaagaaaagtgtcaaccgcggagcccacccaatggtcaggtagacgaaccccttggagttccaaaggccaaaccgcggcggcccagcccggaggtcctgggcgtttctgaagacgtggccgcgccgcgggggctgaggatttgcgtcccggcctgctctctcgcccttctgggccctcctttcccctctacaacgacccagtctgacgctccccaacatccaaaggactacgcctcggaaggtgctcgaaagaggcagaagttcactcttcggtggaaggaaacccagtccatgggaaaggcagcagagccagaggggggcagcgcagcgcctttgctgcggccctaacagctggcaatgccaacccaagggagagaccctgtggccatttcatccccacccccaaattaggctccgcattgtgaccttgaaaggccagcttgtaagagagtgaagtgggaatttgatagcgcctagacataggggctgcccgctctgagaccccccccgccccagcccccactatctagggcatccagtggacaattaggcttcgtgagccccaattccaaatgcttggatacgctaacattttaagcatttctgtctgtaagttaaaacgaagagccccaaagagggtgttaatgtagatcctggcaaactggaagcagcaaagttggtgaaccagaaaggaagtcgccttggataagaagcccatcttttgcaatgccatacttgtttcctttttgaaatgaattgaggtaaaataaccgtttcaggtccatcccttacatggcaaagtaaaaagctggagtcagtacacagtgttggggtgggggcagcgtttgggggcgacgagttttgtgcaccgcgctggagtaccctgcacataaggtccgctcatgggcttctcagtacggactcgccggcgggaacaattaattgagcaaagcgcccctttctgggctggagcaaggttcgcggctgcagatatctcaagctgaaggcaagagcccaggcgaggcgcaggcaggccacgtggctgttccctgctgagactcgcagctttggtcttggaaacctcagggtgtggagctgcttgggccgactgaagggttcagctttttgggagaagtgagggcgagtgttatttctccagcgaggtgtaaacaagactgtgctttcatgggagggacaaattgcagagttgatcccttaccatttttacagaaatactcagaaagtgactacagcttgtcaactggcctgtttagtgagccgctgccttactgtaaaattgtctgaaaatcagattcgacttgacctccacttaatttcagtagcactctagcagttctcaaaacagtcacccctgcacccttgcgtttgcatcttccgctacaggattttatctcttggaagcgcttagagaatgcggcagaaattctgccccactctccaccaagtgttctttttgtaaatctgaatttacagtattctgc

SEQ ID NO: 587104 - DNA, 4001 bp, Homo sapiens
ggttacagaaaacaagatagttgcttgtgtttccaaatgttatgactactttgtatatcctttaatttctcaaatccatcctctctaatcattttctcttggacaattataacattatcttaattcctctccttgtccactttctcatcctatttggtagctaaccattaagtaaatgttgtttcttaaactgcaaatctgatatgccagggactgcagagaagtactagtttctcaaaagtgtgccaagtctcagcgttaaagggactgagaggacggagcactaaccctgcttaagaaaacagaaacacaaaaggaaaaacaacaacaaccccaccttacccccaaaataacaaaaactggcaatggcaggaagggaaaagcaaaatggccatcctctctgagtcatctttgaccccctgccctcctctccaatggcatccaatgcctttcccctgacataaaccttattctacttatataatagatacagttctctgggcaaagcataccagttcacatccagtatccgtttgtttatgccactctctttgcctggaatgttaccatgttaaagtaccctcttcaatcaagttgttctcaaaggtcccaagatccaaattctacactccttatcttattagatttctgtcaaattttaacactttactatttattggcttgtatttgtatctctcctacagcttaaagctccttgaaacagagattttattttttgtttttgtatctcaagtgttcggtatgtaatataaacatacaagaagtgtatattggtgcttggaagaatctgcagattctagacatgggtggaggtccaggatcccttaagaaactgataaaaacttccgatgcagtgcccaaggaacttcacataggaattcctgaagggcaatcatgaatccctagagaatccattccctctagttttagaaccccgcttttaaaccaaagtatagtccagaggaatactcaagcacatgcccgcgccccccgccccacacctctgtaattctaagttttcaagtcacttttgaataccgtaatataaatgcatacgttttggttttttctctccccaaagcaacaggctcactagttcgactgaataaatcttcttaaaaacaacaaaatcccgctaaactaatggcattttcataatccccagatcaggtccaagagaagagaaaatggggaaattaccagagcgaaatccaacaacaaaaaaggtccttcatgttttacaaatagaacggttgtactaatgcttcgtatgctatcttctatggaatgagaatctactcaagcactgcaaaccagatttttatcgtcaaatgagaaagcatcatccgtaaggggataaatgaaacgttgaatgccaaacagaactgggcctactaggtctccagatccctggtcttttcctacccctacaccagggttctggagcaagaatctccactccctccgcccacacctgaacttcatctttaagttttcttctctatctatgaaagggaccctgtatagatctttaccagagcggtactggccttgagggacggatcgcgactctagaaatccagggggctaagctctggggggcaatgcgacctttgccatttgcccctttctgctgcgtcgtcagcacatccacctgctttacttcccgtgcacaaaagaaggaacaggcaaagagatcggtacctctcagaatagcgaaggagctccgcatcaagctgttctcgaatgccggtgcgtttcctgttaaggtagcggggcgacagcgcgatgtgcctttggtgcggcccggccaccaggcatgagtagcgactgttcaccagcgcacaagcagcggcataagtcggcaactctaggcaaggcaggacgccagcctgccctaccagagacccatcagaagccgccgctggccgcggcgcctctgagcaacctgcagccatgctgcttgtcaaggttcccacggcgcgcgccgttgacgcaagcacaatcccatgtccccggcgctcgttttacgccatccaccaacgaccacgcccctaggaatttcccctcttttcgctgcattacgcagccctgaccagcagggggaaccgcgttttcgcgcttcgagaacgggagcttagagcctcggaaatgcattgagcacgcaggaaagccaaccgactgctcttttaagggcaggcaaatgtgtgttttcgcacagaggcttattggattaagtaggtagcttaaaaatgggggttctcactttgatcatttccagtagtgaggtgggtttggtagaattttacaggcttggactgtacaataaaaaatcaaaatatttatggagtatattttatgcagtacacggaatcctaagcaggcctgataattgtaatgcaacgcatctgaaaacgaacccactagttctctcctgtcccgcttctcttctcattatgcaactgctaaatcagggaatcatacagccaagctgtcagcctcggatcctcttttgtatccccaagtatcaaatcagcctgaagacctgtattgcccaaagtggaaatatcattctatttggacactattctctttccctgccgccaaaaccgcaggactccctgcctgtggaagcctagctcaatggtcaggaggacactctggggcagccagatcttccctgaaatacatatgatcgtgttgtgccctgtttaagccctacataggcaccccattttctctaggacaacacaaactcatgaaaatggcttataagttacaaggccattttgtgatctgcgtgggcacacagcctctctcttcagcttcatttgtcacactccccaccctaatattatcatgctgcttgatctactttcaggtctctctttgtgcagtctcacgctgttccttccaccagggaatataatagcatttttcacaagggtaaattctactcatgtatgaatttctagcttagattttacattctatacctttgcaaagagttttcaagcaccccactcctctttctctataaggattaggtagttacccatctatgttggtttttatgttaattttttattaactgtctttgcttgcctgttccatcaatagattcctacactcactaaagtggggaccataatatctgtattgttcactacagtagccccccacaatttatccctcctccaaagaaacgaaaccaagaaaaacccaaccaatacatcttgaatgaataacctgatagtgagttaataaataataagtgataaagagctcacagcctaagtggaagtgggatctaaacataaacatataacaggttatgctggataagtgccaagagaaatgtatagcagtgatgtgagtattaacatactccctcatctcctaaatactgcaaaaagcctcttagcctctctaaacctgatttctgacttgtaaaatacgaaaaataatacttgccctgctaccttagagagatgataggagggtcaaacaagataaataaaaggcattttctttaatattccttaaataactgcaaactcagcatgagatgatagtgggatgagactgcccccaaaacctaatagtagacacttttaagtccataaatgggaaacataatggcttttaccttcattttgttgcaaagtcctgtgatacccctgtgcaggacccttttgttcaatgtgctcaaacttggctaaacaatgaagtcacctaaggtgaggagctttaagaactcctgatgcccggatgacatcacagatcaattcaatcaaaacctctccaggtgactacaccttacagtcaagatggatctagactggctgtaagtgatttgaatgaaaacaatttggccaagaaagaatttagtaaaaaacaagctggacatcatgacaatttgatcaaaacaaaacgttacctgaaatcaaatattccagtaataatctttcacaactagt

SEQ ID NO: 587105 - DNA, 4001 bp, Homo sapiens
ataattacacaaaatccatcaagtctaaatcgtttcccaacttcagcagggatgaaaattagcacagatactgacacattttatttttctcttaatctgacacactgtatttttctcttaatctttctggttgtattcctcaaatattagccccttggtataataaggtcctttaataggcaggacccacatttttaaggctcatgatttcctttccctccaagaaaaaactttacatacttttatcctataaggtattttagtagaataatagtaggaacttattttctgatccttaattaatggaaagagaggactactgacccttaaaggtataaaacaaatttgtttttcatataaaaggttcacttttcattacaaaaatcttcctgtatcttaaaaatgagacacacctatcaaagaaaaagtaaagaacttaatccaagataacttagtctccaaaaacttagagaagaaatttattttaggcatttcattaaaatgtctaaagaccaaacacaaaagtaattaaaggttccttttagtatttaaatcctctataaaatctgatgcctaaatactccattaaaaaaaaaataactccacttacctgcgtcttgatgacaatctggacacaaatccaaaggctaatgctaacagcaaagcccaaataaatgtaaaacctgtttatccataatgatattaaaggtgagaagaggtcccatgtatccgcagaaggatctaaatttaaaatgacacacacaatttcatttaaagctacatatacaaagatatccatcccaattttaagaagaaaataaaaccaaccttacattcaacaacccagctaagaaatctaatttaaaaatcaactgttggccgggcacgatggctcatgcctgtaattccagcactttgggtggctgaggcgggcagatcacctgaggtcaggagttcgagaccagcctggccaacatggtgaaaccccgcctctactaaaaatacaaaaattagccgggcgtggtggcgcgcacctgtaatcccagctactcggggggctgaggcaggagaactgtttgaacctgggagggagaagttgcagtgagccaagattgcgccaccgcactccagcctgggcgacagagcaaggctccatctcgggggcgggggggtggggaacaactgtaataaaaataacacactatgtagtaacgtaataaaattatcacactgttaacactaactcaaagaaaaaacagaatataaaattgtatcttcacttcgaaatgagcatttagaagcaagagaaggaacacaaagtaaaaatacttcatgtgaaattaattttgttttgttgtgcttgctccataaaaaaagcttaagtagtaaaagcactctttttactaactgtactttcaaaggctcacggttaaacttgtaaaagattctcaagtaactgaccttacacctcatttttttttttttaagagagatatgcagggacctggcttcaaacgttcaacctgggagcaatttcaaaagtcgaggcctgaaatttaggctttacaggtgcaaaagtcctaatacacgtaggtaaagtgggaggggtagttttctgtctaaccccctagcctcaaaaggcaaaagccaggtcaaaagtagggatcagtcctccttgctctcagcggcgactagccggtgctgtcaagtgcaacagtctccgaaggaaagggaccgaggacgccactccgcccggagagggtctcagtaaaacgtttacctcccctgccgccccagggtccttgcccgccgagtgcccttacccatcctcctcagagccgacaggagactaggatctcggacctggatagcccgatgattcgcactggtaccgcgagacgcaccgagctacctcgccgcgttagcggcgtaccgagtgcctgcagacctgtgggcagccatgacactgccaggccggtcctgattggttcagaggacgaagaggtgggcccagaggaaagcccagagctccgggaaaggaagccagtgcccggtgcgctctcggccctgctccgattggctcagaggggaaagggggcgtgcccagaaataagcacctcccagagttccaggcgatgaaggcggagcgcttccgcctccatttggattggctcagactgggaaaaggcgggcccagagagaaatgattggcatgggaaaattaaaagaggaaaggagcggggagcgggggaaatgctatgtgggcctgtttggatcttaactgaaataaaccgactgtagaaaggcattatttttgggaaacccgaggatggactcgctattagatgatattaaggaattgtagttaatctcgtcgcgtgtatctgttaagggctataggctgaagtatttaatgctgaaaccatatgatggtttctttaaaatacccccaaccggccgggcgctgtgactcaaacctgtaatcccagcacttgggaagccgaagcgggaggatcgcttgagcccaggagttcgagaccagcctgagcaacatagtgagacctcgtctgtacaaaaaattttttttaattatttatttaattaaattagcttggcgtggccgctcacacctgtagtcccagctacttgggaagctaacgctggaagatcgctcgaacccaggaggtcgaagctgcagtggggccatgaccctgccactgcactccagcctgggtgacagagtgagactgacttaaaaaaaaaactgtaaataaaaaagcaacaaaaaaatgaaaaaagaataaaacaaggatggcaaaatgttgatagcggggtgatgggtacatagaaggttcattacacttttttgtctacattttatgttaaaatatttctattataaaagggtgagtaaataaaaatatttattataaaataattctattataaaaaatatttatattataaagtgggtctggcccttgaattccgcggaacgaggtggtgccaacgctgtgttttaacccggtcactaaacatccgcgagcatcctgtcagagctctcagctcattggcgaaagtaaatacgccaaggaaaagcacctccctttttgggcgtggaaagatggcgtaaaaagccacaatacgcaggcgtcatcgctcacttttcccctcccggcttctgctccacctgacgcctgcgcagtaagtaagcctgccagacacactgtgacggctgcctgaagctagtgagtcgcggcgccgcgcactggtggttgggtcagtgccgcgcgccgatcggtcgttaccgcgaggcgctggtggccttcaggctggacggcgcgggtcagccctggttcgccggcttctgggtctttgaacagccgcgatgtcgatcttcacccccaccaaccagatccgcctaaccaatgtggccgtggtacggatgaagcgtgccgggaagcgcttcgaaatcgcctgctacaaaaacaaggtcgtcggctggcggagcggcgtgtgagtagccccctccctcgggcctgggcctgggcctgagccgtcacctccgaggcggcctgtctctgcccaagtcgagtgaatgggccaggctggggtgttggccggggaggaaatggaacattcctgctgtgagcatgagacgtcgctgtccgagcttggcgcctaagccaagggtttcttctttatttggttggttcggattgggttgttggtttggggttttgttttgttggtgtcataaaagctgcagccaagaaatctcgtaattgtggtccttttcctagaataatgatggctgagaacctagtcttacgaatactgtcatagttgtgggtacatctggtgtcatagatctcagtagccctagcagtttaaagtgcgtagtgtcttcactgctgccatctagggactggcattccgtggcagcagctgtctgcaccccaccccacccttgtgtttcttacgtcctcccatgacatttt

SEQ ID NO: 587106 - DNA, 4001 bp, Homo sapiens
ttgaagacaaataattacacaaaatccatcaagcctaaatcgtttcccaacttcagcagggatgaaaggtagcacagatactgacacactttatttttctcttaatctgacacacctgtatttttctcttaaatctttctggttgtattcctcaaatattagccccttggtataataaggtcctttaataggcaggacccacatttttaaggctcatgatttccattccctccaagaaaaaactttacatacttttatcctataaggtattttagtagaataatagtaggaacttattttctgatccttaattaatggaaagagaggactactgacccttaaaggtataaaacaaatttgtttttcatataaaaggttcacttttcattacaaaaatcttcctgtatcttaaaaatgagacacacctatcaaagaaaaagtaagtaacttaatccaagataacttagtctccaaaaacttagagaagaaatttattttaggcatttcattaaaatgtctaaagaccaaacacaaaagtaattaaaggttccttttagtgtttaaatcctctataaaatctgatgcctaaatactctattaaaaaaaataactccacttacctgcatctcgatgacaatctggacacaaatccaaaggctaatgctaacagcaaagcccagataaatgtaaaacctgtttatccataatgatattaaaggtgaggagaggtcccatgtatccgcagaaggatctaaatttaaaatgacacacacagataatttcatttaaagctacatatacaaagatatccttcccgattttaagaagaaaataaaaccaaccttacattcaacaacccagctaagaaatctaatttaaaaatcaactgttggccgggcacagtggctcatgcctgtaatcccagcactttgggtggctgaggcgggcagatcacctgaggtcaggagttcgagaccagcctggccaacatggtgaaaccccgcctctactaaaaatacaaaaattagccgggcatggtggcgcgcgcctgtaatcccagctactcgggaggctgaggcaggagaactgcttgcacctgggaggcagaggttgcagtgagccaagattgcgccaccgcactccagcctgggcgacagagcaaggctccatctcgtggggggggcgggggaatcaactgtaataaaaataacacactatgtagtaacgtaataaaattatcatactgttaacactaactcaaagaaaaaacagaatataaaactgtatcttcacttcgaaatgagcatttagaagcaagagaaggaacataaagtaaaaatacttcatgtgaaattaagttaattgttttgttgtgcttgctccataaaaaaagcttaagtagtaaaagtattctttttactaactgtactttcaaaggctcacggttaaacttgtaaaagattctcaagtaactgaccttacgtctcatttttttttttaagagagatatggaaggacctggcttcaaacgttcaacctggcagcaatttcaaaagtcgaagcctgaaatttaggctttacaggtgcaaaagtcctaatacacgtgggtaaagtgggaggggtagttttctgtctaaccccctagcctcaaaaggcaaaagccaggtcaaaagtagggatcggtcctccttgctctcagcggcggctagccggtgctgtcaagtgcaacagtctccgaaggaaggggaccgaggacgccactccgcccggagagggtctcagtaaaacgtttacctcccctgccgccccagggtccttgcccgccgagtgcccttacccatcctcctcagagccgacaggagactaggatctcggacctggagagcccaaaggttcgcactggtactgcgagacgcaccgagctacctcgcggcgttagcgccgtaccgagtggctgcagaactgtgggcagctacgacgctgccaggcccgtcctgattggttcagaggacgaagaggtgggcccagaggaaagcccggagctccgggaaaggaagccagtgcccggtgcgctctcggccctgctccgattggctcagaggggaaagggggcgtgtccagaaataagcaccgcccggagttccgggcgatgagggcggagcgcttccgcctccgtttggattggctcagactgggaaaaggcgggtccagagagaaatgattggcatgggaaaattaaaagaggaaaggagtggggagcgggggaaatgctatgtgggcctgtttggatcttaattgaaataaaccgactgtagaaaggcattatttttgggaaaccccgagggtaaaccccgaggatgacttaatatcatctaatagatgatattaaggaattgtagttaatctcgtcgcgtgtatctgttaagggctataggctgaagtatttaatgctgaaaccatatgatgctttctttaaaatacccccaaccggccgggcgctgtgactcaaacctgtaatcccagcactttgggaagccgaagcgggaggatcgcttgagcccaggagttcgagaccagcctgagcaacatagtgagacctcgtctgtacaaaaaatttttttaattatttatttaattaaattagcttggcgtggccgctcacacctgtagtcccagctacttgggaagctaacgctggaagatcgctcgaacccaggaggtcgaagctgcagtggggccatgaccctgccactgcactccagcctgggtgacagagtgagactgactttaaaaaaaaaaagtaaataaaaaagcaacaaaaaaaatgaaaaaagaataaaacaaggatggcaaaatgttgatagcgcggtgatgggtacatggaaggttcattacacttttttgtctacattttatgttaaaatatttctattataaaagggtgagtaaataaaaatatttatcataaaataattccattataaaaaaatttctattataaagtgggtctggcccttgaattccgcggaacgaggtggtgccaacgctgtgtttcaacccggtcactaaacatccgcgagcatcctgtcagagctctcagctcattggcgaaagtaaaacgccaaggaaaagcacctccctttttgggcgtggaaagatggcggtaaaagccacaatgcgcaggcgtcatcgctcacttctcccctcccggcttctgctccacctgacgcctgcgcagtaagtaagcctgccagacacgctgtggcggctgcctgaagctagtgagtcgcggcgccgcgcacttgtggttgggtcagtgccgcgcgccgctcggtcgttaccgcgaggcgctggtggccttcaggctggacggcgcgggtcagccctggtttgccggcttctgggtctttgaacagccgcgatgtcgatcttcacccccaccaaccagatccgcctaaccaatgtggccgtggtacggatgaagcgcgccaggaagcgcttcgaaatcgcctgctacaaaaacaaggtcgtcggctggcggagcggcttgtgagtagccccctccctcgggcctgggcctgggcctgagccgtcacctccgaggcggcctgtctctgcccaagtcgagtgaatgggccaggctggggtgtttgttggcccgggaggaaatggaacattcctgctgtgagcatgagacgtcgctgtccgagcttggcgcctaagccaagggtttctttatttggttggttccgattgggttgttggtttggggttttgttttgttggtgtcataaaagctgcagccaagaaatctcataattgtggtccttttcctagaataatgatggctgagaacctagtgttccgaatactgtcatagatctcagtagccctagcagtttaaagtgcgtagtgtcttcactgctgccatctagggactggcattccgtggcagcagctgtctgcaccccacccttgtgtttcttacgtcctcccatgac

SEQ ID NO: 587107 - DNA, 4001 bp, Homo sapiens
taaaaaaaaaaaaaagagtcatactctcagagatcctgtaattccacctctggcaatcaaacccagtaatgtgaattaaggaaaaggctcattgtacaatgatggttgatctggtttggatatttgtcccccccaaatctcatgctgaaatgtgatcgccagtgttggaggtggggcctagtgggaggtatctgggtcgtgggggcggattcctcatgaatggcttggtggcccccccacaataataagtgagtgctcactctattagttcatgtgagatctgggtgtttaaaagaggtggcatctctcttgctccctctcttaccaggtgacacgcctgcttctcctttgctttctgccatgattgtaagcttcctgaggcctcaccagaagcagatgctggcaccatgcttcttgtacagcctgcagaaccgagagccaaataaacctcttttctttattaattacccagcctcagatattcctttatagcaacacaaaacagactaatacacagttcgtaacagcaaatacttagtgaagaattttgaacaataacagcagctaactcgtattgagtgtttggtatacagcaagcatgtgctaaacacatttcatagcatttaattctcaaaacaactctgtaaacatgtaggactgggaggctaggaatgataaagtgccttgcccaaggtcccactataagtgacctcacattctctaacccaggtctgtctgacacccaagtccatacttttacctactacaggtaatgactaaataagttactagtcatgtacttgtggaaagttaatgttaaaaattagttataggactgggcatggtgtctcacgttgtaatcccgccactttaggaggcagaggcaagaggaccgcttaagcccaggagtatgagaccagcctgggcaacatatcgagacactgtctctacaaaaaataaacaattggctggcatggtggcatgtagtcccagctacccaggaagctgaggagggaggatcacttgaacctagaaggttgaggctgcagtgagccatgattgtgccactgtactccagcctgggcgatactccagcctgggcgacagagcaagacctcaaaaaaaaaaaaaaaaaaagttataaatactacttcacaacatgcttacatttactattatgtgaataagtggaatacaaaatgcagtataattgttttaaatatagaaaaaaaactgaaggtaggtatgctaaaatgttaacaaatagtaaagtgatagaattagaaatacttctttcttctactgttgtgcgttttccaaattctagtgaatgcattaaaccctcatggactccctcttacctgcaggataaaaaccagttacttcagcactgctcctaaggaccacccaagtccacaccatctgcccttcagcttccccgctaccctgtcagtcctccaagcctcgtagtctccccgttgcagggaaagccttttccccttttccccacctgccgagttcctactcatcccttaggacccagcttcttcctggatacccttctggatacccacccagcccttctggataccctacagggggaacccgctgtccagaagcctgcaggtggccccacggcgccccgcccgcatgacgcagccctcgtggccacggcccggccccgccccgcgctcgcgcaatccctttctcaggctgcgttcgcttttcaggctgcgcgggaggctgttctgcctccttcccaggcaggtgtatccgcgactcgcggagcctccgtcacctttcacttcacggcagcggcgccccgcccacacctcgacgcttcggacacccaaagagttggagggtgggaaagtgcgtaccttctggatccgctttagcgccatcctaccccgctgccggggacccgggcggcccggccggggctgcctgaggcggcccgctgccggctcagccgccaccaagctgcacgccgggagccgcagcctgcgcttgcgcgcgcggggcactgtggggccgtcgtcgccgcgtgccgagcgtcctggcgcggccgaggggaagcagcggggctgcccgggttacgctggccacccgcacctggtcctgtggcttcgaccactagtcagcaaggccccggagaggccagcgaagaggaggggctcgttggctttacggagacgcgcggagcaccctcaaggtgccacacgctcgcctgctccctgttcctacatcctgggcgtcttcccaggctgtcatataactcctgagaatagtggttcttaactctgtaagtatatataccctcgtacgccttatggctggatgcgttacagccatttccatgtagatgtctgtgcatacgttcacacgcaaaactctccgcagttttggagatctccgtgttcagtcgtacctcacgtgatcttgcactgccaacattgagaaccctggccttagactatgcatctcccaaacttaattatctgtctccttcctattttcccaagacttggcaggcgtctaggtcagagttgttcaaactgagggttatgaactagtgtgtcacgaaatcaatttaataggttgcaaccaacatttttttgaaaaaaaaaaaaaaaaagccagacgaggtggctcacgcctataatcccagcactttgggaggccgaggcaggcggatcacttgaggtcaggagttcgagaccagcctggccaacatgctgaaactccgtctctactaaaaatacagaaattagctgggcgtagtgacgtatgcctgtaatcccagctacttgagaggctgaggcacgagaatcacttgaacccaggaggcagaggttgcagtgagctgagatcacactgttgcactccagcctgggtgacagagcgagactctgtctcaaaaataataaaaaataaaaataaaaaaacagaataaaatatcagtgcatttcacatagtaaaggtaagaattgtggaagttttgttggtgtgtgtatgtagatgatatttaatcttcagactgagacatgtttgagcatgaaagtggctgttaatataattactctgggaccaacgctgtaatctagaattgtctccagccagccaagacacatggtcacctctatgtttgtactcagtcagcatataaaatgtattatagacatttcaatagttgcccagctttgtccctggctttcacgctcccattcccccaatctgtcctccacacaacttcatgaactgtctgaaatataaagcttaccacactgcatccttacccagaactcttcaaggaagccccgtggcctacagcatcacattcactgtcatccaggggccttcaaaatccaggatcctcggccgggcacagttactcatgcctgtaatcccagcactttgggaggttgaggtgggtggatcccttagtccaggagttctagaccatcctgggcaacatggtgaaaccccgtctctacaaaaaatacaaaacttagctgggcatggtggtgtgcacctgtagtcccagctacttgggaggcttacttgagcccaggagatcaaagttgcagtgagttgtgatggcaccactgcactccaggctgggagacaaagcaagaccctgtctcaaaaaaacaaaaactcaaagtatcctccagctttaccttctccttcctacctccagcccacctgactatcaagtgtttccatcaccacagcatctacattccttgactagagcattcaccttccaaagccagctcaagcatcacccattgaacagcccaagtcaagcacttccccttggtgtcaaacattgacaacagaaatttttgttagtccatgggccatccatcctcctacattattgacatggccttccctccccataaaacaagtgattctagattttataaatgttgatatatttgtgtaagaatatataaatggttatttatgtgctaataatgtatatggtggtt

SEQ ID NO: 587108 - DNA, 4001 bp, Homo sapiens
attagttgctccgctctaatctcccactcccccaaaaattctaaactccaaaccacaaacttagaagtctatctactgctcctaatttctaaccaagttttccctgagcaaggagaaaaacaccttatttctgaaaagattattttttaaaaatctcttgcccagacaacttccctcccatcccccactgccaaaccatatgcaaaaactacttttttaaaacttcagcaaattccctaactgaattttttgacaataaccactgatctctacaaagaggtaaaacactcaatcaaaaacagcaacaaataaaaggaagaaaaaaggtattcacctgaagaatttagccaaacaacttgagttatataaacaaaaccctgcaacagggggaaacggtggggggatggggaggagggagagaaacaggagacaggacttttaaactgtgttccacactaccaccctctaagcccccacttgcccccctccccaaggactagctgttcagaactctgggctccccctaccctctaaactacccttcaaaaaaaaaaaattctcgatttgtcacaggaaccttcgcgaatttctctagctggtcctgaaataatcagtctggactccaaccaaaaccactgcctgaagggctcttatcagttatagctttcccactgcaacctccagagtgcataaagttggggggagggggcagaaaataaagggtgtcacttggcgacatcagggcaagtattcccccaagaacctgaccctcacagaggaagttttgcccaagtggccagtccagggactatttattttgtccaggagctcctctttccccagctgtcatacccacaatatggagggtggcttgctggagggcccgggggtcttcatcacatacaactatgggtgggacaggctttgtcagtggaaaggaaaacagtagggttctcccggggaccagaaagcttaacaggagggactgactgaaaacacacagagctctttcttagaagagggggccctgagcaggagactctcttcctaatatagaaaggaattagggataaaagaggtcgcttgagtgaccccagttcaagcagcattgtggttggaggaaatgggggcatctcaagaaacggagaaaggcttccctctcgggaatttctgccttgattccctaaatccaaagcgagcaaacaggagagagaaaccctgaaaatgggctcggtggtagagagtgaggcgactggtcgtgcaaaaagaaaaaaggccgtctcgggagtccaaacgtcgcggaggaaagtcacaggctctggggatacaggaagagcgagcagcaacgcgtatttcggggtgctgcggagaaaaggcgagctgaaaaggctctcggcccctgggaggtgccaaggagccgccgtaggcactgggggaggaggggagtctcggacagtggcctggagtgccccagggcccttgcagtggttccgggggtgccctgggcatccccacaccgccccccacacacagcccgaattcccctccacgaaggatacagcttgaccacgtccgtgtccatccgcctcttgcccggactgggagatgacatggtgtcgccgccgcctctctcccttcctcggcccgtctgtcacgggcccggggccccggctctgaggagcccgcggccgcgccggctcctcggtggaggtggcaacacccccgcggtcccggcggtcccgtcagccgccgccgccgccccccgcacgggggaacaccgggcactgtccggccgggtgggggtggggaccctgcggcgcccggctcgggctgcccctctccggctgtggttccgccgcggccctgccccggcgctcctctgcgccgcgcgacgctccctcctgcctgctgtggctcgctcgcctgctccccactcaccctctgaccggctcctagcagcctccactataagcggacgactcctgctcagtcggcctccctaccccagcctcgctctgggcgccgtgacgtcacctctgtgacgtcatcggaggggcgggtctggtcgctgagaggggtggggcgccgccgcggcgtgggctttcccggggagttctgggagttgtagttcctctttctccggctgtctcacaccctctgtcccctcccccaacttccccacctacttcatccctcaactgccactgtcgttatcatcatcctaaacgataagagtaaataatggcaatattattacattcgtggatttaagggtaatgaacctcccttaacactctgtttaacaagctgttaatttctttgatttggaggaggccaaggtagcaattactcaggcaccaaaatctggaaatccccacaccagcaggttccttgcactccgcttcctcgttggctggagagaatttgtttccaaggattgtagaccacagcaaggcttcctcaggcttgcataccagggtatgcagtgtctacggccactatttcaaagattagagttgacgcagcaaggtggtaaggtcagaaataatttagtattaatatccttattctacagagcatgaggcaacttcgcaaagtgtgtgaacctcctacaccaaccttaaatacttcattcatccaataaatatttatttagcacctcctacgtgctaatcaccttgctggacatgagggatataatggtgaactaagaaagactaaatttagccgggcacggtggctcacgcctgtaatcccagcactttgggaggccgaggctggtggatcacctgaggtcgggagttccagaccagtctggccaatatggtgaaaccccgtctctactaaaaatacaaaaattaaccaggcgtggtggcgggcgcctgtagtcccaactactcgcgaggctgaggcaggagaatcgcttgaacccgggaggcagaggtcgcaatgagccaagatcatgccactgcactccagcctaggcaacagagcaagatctgtttccaaaagataaagaaagactaaatttacgcagccccctagtatagcctgtggatctatagtatcagcatcgcctgggaacttgttagaaatgccgctagagcttcacttcagatctactgaatgagaatttgcagttttaacaaggtccccaggtgattcttatgcacagtgaagtctggaaaaatactgccctataaggtcctccaaaagaagtgatatggaactcaggagtcaaccaggcaaaggggccagtgaagagtgttccaggcatcgcctatatttatgtcatattttcactaccttttcaaaagttttatcttttccctcattcccatgaatatacacttgtactttgtcagaccatgtgttgtgagttgagccttccttacataatctcctatgcacacacacctggggcagcagcaatgagctaagattgaacatcttttgcagctatcatttcatgcctcaaaaaacttgtgctttttaaattgtaaaacatacgtaacataaaatttaacattttaaccatatttaaaggtataattcaataggattaaatacattcacaatgtcgtgcaaccatcacactacccatttccagaacgtgttcaccatcccaaacattaaacaataaccccttcccccccagcccttgataacctctctttatgttctgaaaaaggtgggctattttagctgtttctgaaaggagtgtattgttctttcaaattgtacatagctgctggtccaggtgcagtggtgtttaaaactaattgatcacaaccagttacagatttctttgttccttctacacgcccactgcttcacttgactagctttaaaaaacaataaaaataaattgcatggccgggtgcggtggctcacgcctgtaatcccagcactttgggaggccgaggtggggcggatcacgaggtcaggagtttgagaccagcctggccagcgtagtgaaacaccgtctctactaaaaatac

SEQ ID NO: 587109 - DNA, 4001 bp, Homo sapiens
aatctcccactcccccaaaaattctaaactccaaaccacaaacttagaagtctatctactgctcctaatttctaaccaagttttccctgagcaaggagaaaaacaccttatttctgaaaagattattttttaaaaatctcttgcccagacaacttccctcccatcccccactgccaaaccatatgcaaaaactacttttttaaaacttcagcaaattccctaactgaattttttgacaataaccactgatctctacaaagaggtaaaacactcaatcaaaaacagcaacaaataaaaggaagaaaaaaggtattcacctgaagaatttagccaaacaacttgagttatataaacaaaaccctgcaacagggggaaacggtggggggatggggaggagggagagaaacaggagacaggacttttaaactgtgttccacactaccaccctctaagcccccacttgcccccctccccaaggactagctgttcagaactctgggctccccctaccctctaaactacccttcaaaaaaaaaaaattctcgatttgtcacaggaaccttcgcgaatttctctagctggtcctgaaataatcagtctggactccaaccaaaaccactgcctgaagggctcttatcagttatagctttcccactgcaacctccagagtgcataaagttggggggagggggcagaaaataaagggtgtcacttggcgacatcagggcaagtattcccccaagaacctgaccctcacagaggaagttttgcccaagtggccagtccagggactatttattttgtccaggagctcctctttccccagctgtcatacccacaatatggagggtggcttgctggagggcccgggggtcttcatcacatacaactatgggtgggacaggctttgtcagtggaaaggaaaacagtagggttctcccggggaccagaaagcttaacaggagggactgactgaaaacacacagagctctttcttagaagagggggccctgagcaggagactctcttcctaatatagaaaggaattagggataaaagaggtcgcttgagtgaccccagttcaagcagcattgtggttggaggaaatgggggcatctcaagaaacggagaaaggcttccctctcgggaatttctgccttgattccctaaatccaaagcgagcaaacaggagagagaaaccctgaaaatgggctcggtggtagagagtgaggcgactggtcgtgcaaaaagaaaaaaggccgtctcgggagtccaaacgtcgcggaggaaagtcacaggctctggggatacaggaagagcgagcagcaacgcgtatttcggggtgctgcggagaaaaggcgagctgaaaaggctctcggcccctgggaggtgccaaggagccgccgtaggcactgggggaggaggggagtctcggacagtggcctggagtgccccagggcccttgcagtggttccgggggtgccctgggcatccccacaccgccccccacacacagcccgaattcccctccacgaaggatacagcttgaccacgtccgtgtccatccgcctcttgcccggactgggagatgacatggtgtcgccgccgcctctctcccttcctcggcccgtctgtcacgggcccggggccccggctctgaggagcccgcggccgcgccggctcctcggtggaggtggcaacacccccgcggtcccggcggtcccgtcagccgccgccgccgccccccgcacgggggaacaccgggcactgtccggccgggtgggggtggggaccctgcggcgcccggctcgggctgcccctctccggctgtggttccgccgcggccctgccccggcgctcctctgcgccgcgcgacgctccctcctgcctgctgtggctcgctcgcctgctccccactcaccctctgaccggctcctagcagcctccactataagcggacgactcctgctcagtcggcctccctaccccagcctcgctctgggcgccgtgacgtcacctctgtgacgtcatcggaggggcgggtctggtcgctgagaggggtggggcgccgccgcggcgtgggctttcccggggagttctgggagttgtagttcctctttctccggctgtctcacaccctctgtcccctcccccaacttccccacctacttcatccctcaactgccactgtcgttatcatcatcctaaacgataagagtaaataatggcaatattattacattcgtggatttaagggtaatgaacctcccttaacactctgtttaacaagctgttaatttctttgatttggaggaggccaaggtagcaattactcaggcaccaaaatctggaaatccccacaccagcaggttccttgcactccgcttcctcgttggctggagagaatttgtttccaaggattgtagaccacagcaaggcttcctcaggcttgcataccagggtatgcagtgtctacggccactatttcaaagattagagttgacgcagcaaggtggtaaggtcagaaataatttagtattaatatccttattctacagagcatgaggcaacttcgcaaagtgtgtgaacctcctacaccaaccttaaatacttcattcatccaataaatatttatttagcacctcctacgtgctaatcaccttgctggacatgagggatataatggtgaactaagaaagactaaatttagccgggcacggtggctcacgcctgtaatcccagcactttgggaggccgaggctggtggatcacctgaggtcgggagttccagaccagtctggccaatatggtgaaaccccgtctctactaaaaatacaaaaattaaccaggcgtggtggcgggcgcctgtagtcccaactactcgcgaggctgaggcaggagaatcgcttgaacccgggaggcagaggtcgcaatgagccaagatcatgccactgcactccagcctaggcaacagagcaagatctgtttccaaaagataaagaaagactaaatttacgcagccccctagtatagcctgtggatctatagtatcagcatcgcctgggaacttgttagaaatgccgctagagcttcacttcagatctactgaatgagaatttgcagttttaacaaggtccccaggtgattcttatgcacagtgaagtctggaaaaatactgccctataaggtcctccaaaagaagtgatatggaactcaggagtcaaccaggcaaaggggccagtgaagagtgttccaggcatcgcctatatttatgtcatattttcactaccttttcaaaagttttatcttttccctcattcccatgaatatacacttgtactttgtcagaccatgtgttgtgagttgagccttccttacataatctcctatgcacacacacctggggcagcagcaatgagctaagattgaacatcttttgcagctatcatttcatgcctcaaaaaacttgtgctttttaaattgtaaaacatacgtaacataaaatttaacattttaaccatatttaaaggtataattcaataggattaaatacattcacaatgtcgtgcaaccatcacactacccatttccagaacgtgttcaccatcccaaacattaaacaataaccccttcccccccagcccttgataacctctctttatgttctgaaaaaggtgggctattttagctgtttctgaaaggagtgtattgttctttcaaattgtacatagctgctggtccaggtgcagtggtgtttaaaactaattgatcacaaccagttacagatttctttgttccttctacacgcccactgcttcacttgactagctttaaaaaacaataaaaataaattgcatggccgggtgcggtggctcacgcctgtaatcccagcactttgggaggccgaggtggggcggatcacgaggtcaggagtttgagaccagcctggccagcgtagtgaaacaccgtctctactaaaaatacaaaaattagccagctgt

SEQ ID NO: 587110 - DNA, 4001 bp, Homo sapiens
ccctctcgcccttcctcctcaatttcacttgcacaaggatctctttagtgtttgtgaacctgactgtatcttaagttatacctcaataaaaagagttttgtttttaaaggggtgattcttttacacagctcgtgctatcttcccttgagattctgatcaacagttaagaaatctcactccctcagagcagagatgcactccttggtgaaaagggaccaacatccgtggcccgtggggtgttcctgcctgcaacagaggccgcgcggcgctgtgtaaatggcatggagtctcagatggtctgccactagcttgctgtgtgaatgggcactccttcaaatgttctgcagctcaccttccgaacttgtaagcaaggcgatttggccctgagattctctgaagtctctcctaactgtagaaatcctttgatctcataaaacattttcattaacgtggaagaccctaagtgctaccacgaccacccttaactgcacagtacttagttctggagcacaagtgacttccaagcaatcaccatcacacgaacctcaaagctgaaaaattatcagcacacttctctcccaactctttacccaggttcccttctaacctcagaaaccaccaaacacagccccacagcacaatcttaataacagcagttcctccttggcctgccagcacccactctgcgttatgtgcctacctggtggttgtgatatacagaatatactgatagacaagaaaaactaggtgaagcattttaaagaacatttcagaaatgatgggaaggggtgggaagggaggggcgggaacaagaccacacagtgttcaacgacttagcggttccagtgaaccaactgatgcccgtcttcagggacagacagctagaaattctagactagaacagaggcgtcatggtttgcctacccttatcctaaacaattaccatgcgaacaacttaatgtcgatcacaacagatgtaagtccggagtctctccacagtttccaggaggctggtggcaaataattgccctcgtcttggattcaaacacgtggctattcatgagacgttctgcctctactttagagattatcgacatcagcaaatgcgtgccgttcaccttctacaaccgaaaacgcccttcaggtggcattcgaaaagcagccactccctgatgccatgcgggagcgagcatggaaagcgcatttctgaaaggaaacacccagaaagggtaagttcaccttgggtggcacaaagcgtgccagggttcaccggcctcctgcatggaagggagccacggccagcgcgcccgggtcccgaagcgcagtggacaggcaaggcccccacgggcgcggcctcgagttccagccagggaggccccgagtccagtcctaagccccagccagagtcctggccccaagtctcggctccgagtccaaccccgagtcccggccggagcggccccgagatccggcgaggaagccccgagtccccgccagggaggccccgaatccagccccaagtctcggccccgagtccagccccgagtccagccccgagtcccagccccgagccccggccgcgcaggccccgagccgagggcgccccgccagcccggccctcaccttcctgctcgcgccgccaagggacaccttgggccgcgtcttgaagtcgccttcgaagctgaacatcctggcagcctagcccatgtgcgggcagcgccgccgcggaagcagccgggcgggcggggcacggggcgggctgggaggctctcggcgcccgcccgcccggcccggggcagcgaggacgcggcggccgggaggcgacccgagcccgcccccgggctgtaccctcccagccctgccctggggcgggaggggcggcaatactggaggggcggccctgcctcgcctgcccctcatccacgccggccacagctcgggccgctgcaggggcgcccagcgggcagcaaacccggcgcttgcacctggaactgccgcctcgggagggaagatggcggtcagccgtcagtgcgtgcgcggccctgcagacgtgcgcggccctgcagacgtgcgcggccctgcagacgtgcgcggccctgcagacgtgcgcggccctgcagacgtgcgcggccctgcagacgtgcgcggccctgcagacgtgcgcgcctccgccattgacggcacggcgctcttcccggcggttccgctagcgtgcgcggccccgcaaggcgcgctggagcctggggaggacggcggtgacgcgggctgggcacgcggcggagtgggcggggcctggtgcgtgctgggggagcgcggcgaggggcgcgggaggtgttgggtgcggggcagggtgcgggaaaggtggagtgcgaggcacgggccgggatggggtgcagggcagggtgcggggtgcagggtggggtgcaggggccggcacccggagcgggctgggagcggccaatctggtgccagactcgagtgaggcgggaaaggagcagctaggcccagcccgtctgtttacatcccacctgttctatgtctatgacacgcacagacggacgtaaatatttaccatgtacacagacatgcgcagatttgcctcatacatagcacacatatgcatctatagatacagcatcaatacatataaatatgtatcatgtacacatacctgtgtatgcaaaaatatttgctcctggacttaccatggggctttgtcctgataaacccatcgtaagatgaaaatattgtaagttgaaaatgtatttaatgctacaataaacccatcacaaagtcaaaaaattgtaagttgagccattttaagttggggaccacctatacataaacatgtgtcttatatccacacatacgtatacataatatctcatatacatgtgcatatacatatatatcatacacgattgaaaccaatttctaaaaattgatttttggttgtatacaaggtgtgcaacatgatgatttcatagagacattgtgaaatgactaccctctttgtgtgtgtgtggtaagagtacataaaatctactctcttagcaaaatttcaacacacaatacgatatcatctacagtcgtcctgcggccgagcacggtcgctcacgccggtaatcccagcactctgggaggccaaggcgggcggatcacctgaagtgaaaagttcgagaccagcctggccaacatggtgaaaccccatctctaataaaatacaaaacttaggccggtgtggtggtgcacgcctgtagtccaagctactctggaggctaaggcaggagaattgcttgaacccaggaggcagaggttgcagtgagctgagatcgtgttattgcactccggcctgggcgacacagagactccgtctcaaaaaaaaaaaaaaaaaaagaaatacagtcctggcgccgcctgtaatcccagcactttgggaggctaaggtgggtggatcacctcaggtcaggagtttgagaccagcctcgccaacatggggaaaccccgtctctactaaaagtacaaaaattagctgagcatggtggcatgtttatgtataggtggtcccccacttaaagttcttaaacttctagctgcttgggaggctgagacaagagactcgcttgtgtctgcgaggcggaggttgcaatgagctgagatcgtgccactgtactccagcctgggtgacagagtgagactctgtctcaaaaaataaaaataaacaggccgggcgcggtggctcacgcctgtaatcccagcactttgggaggccgaggcgggcagatcacgaggtcaggagatcgagaccatcctggctaacacagtgaaaccccgtctctactaaaaataccaaaaaaattagccaggcatagtggcaggcgcctgtagtcccagctacttgggaggctgaggcaggagaatggcgtgaacccgggaggcggagcttgcagtgagccgagatcgcgccactcgcgccactgcactccagcctggggaacaga

SEQ ID NO: 587111 - DNA, 4001 bp, Homo sapiens
acacagtaagaaccagtaaatgtcgttattgctatgtatttttatccaaagataatgcttttctcctgtaatttatgaaaattacaaaaactgcaaaccaacttagattagcagctcaaatacaatgtttgaaaaatgctccaatccaatatttttaatattcttttgggaaaaaagtgacctcagatttataaagaaggggcattcaagtgagtctgacgagcaaaatgttaggtggaagtgaccaaaatgatctctacctttaaacaattcattttggttgaaaacattttgtaatgatttgaccacataacatttctaaataatgatcaaaacattagctggccatgaagtaaacaaaacctagtgaaattgttcaacatgatactttgtgactaagcagtcagtcattttgaccataaaggtagttgaagatgaaaacaaaacaagggacttctggagtccattagactcaagctaaagcaaaacctaataacgggtataattgctaagcaacagagaaaactgttctctttccttactgttaatctatcatttccttttctaacttacttctgaagatccaccaacccacaacaataaaaattacaattacgaacataacccctatcctttctccattgttcacctcttacatcaaaagcatacctatatattttcaattattttaaaaaattcaaagctgacatttttttcatcatcctccgaaaattacaaaggctgaatacaatatccttctataaactaatgatagtacacttaaataatatgacgggtaggtgtcaaataaaacaggagacaccttcccattcaattacaatatgaacgaactccacaaaaaaggaaagctaaaaaggttttccaataccaacacgagagaaaaattagtaaccagattaactaacccacttctccattcctaaagtgggatccttagtctctgaaaacctttaattattcttaaattcccttcgattaagaaaaatatcacaggcacgcaagcacacctcagcagccacggcgcccagcaaaacaaacagtgatgaggatgaggatgatacgagaggggttacacaatctctgcttcagactggggggcgtgtcccccaaggttttctcttcctttctactggaacgacagctgtagcgccacagggagaacccagccacacggcctgcagggccccaggattttgtgtggggagcagaaaggaaagaaggaaaatctgaggttccgaaaggtgcacaagaaaacgagctcggcgcggcgttgggagcgagtgccgggggtttggggattcggcgcagccgggtgagagcctcggccaccctggggagtggagaaagcagcgctcaccgccccgtccacccgctcggccccggccccccgcaccccaccctcggggcgacccggacgcgctcggtgggcgtcccaaggtgcaaaccagctggggaaggcggcgggtcctgaggctcccggggtctggggcaggagggaagaatcttctgtacccgttgttctccgcacagcagcagctccgggtaactgaactccacgcagctctcgtcggtggggtccttaagcaccagctccaggcgcaccgtctccctcggcggccgcggcggctgctcagcccgggaagccgactcccgcggcgggggcggctgcaagggcagcggcgggaacggcggcggcggctcgggccgcgggggctcccgctgcagcgacatgggcggctcggcgcggctgacctcgcgctgggggagcggcttctcccgcgacgggggctgcgcgtccgagcggggggcaggctcccgcggggccggcggctccgcccgggccggctcgcggtacggctgcggctccagccgggggggctcgcgggggtactcgggctcacgctcgggccccgggtactcggcctcgcgccgccgcaccggtgacaagctaatgaacgctactctgcgcggctccgccatccccactgttctggccctccgcttttgctcgagccggcgctcgcttctacggcgcgctgcgtgcctgcccgcccttcctcttgctctctgtcgcttttcttccctccaccaccctcagccgtctccgccggcgccacggtgagtgcggaccgtgtccccttccccgctactacgttctgatgggcttcaccgccatcgccagggtcgccgcggccgccatgttggatcccccacataaatagaagcaggccgctgagcgggcgcatgcgcacagaggagacgctcgcgtccactgtcgtggctgttgctcagttttcctcttttcctcccaacagtctggagtccagacaggtcggcggaagtgacgacatggctcggcctgtttccgtggaaacggagacgccgtctgcacccttcctcaaagggagggttctggggtttcccgagcagtttactattcgcacccggaaaccagaggcgctccaggagcttcccggggctagcatcgggatgggactgagaccgacctagccattggcgccgggtctcccgtgctgggttcaagggaattggggttgttagctgattattcaaggcggactctgggcaagggtagagagacgcgccagccgttgtgcctgcccgccctgtgtccccgtagccttaagtatcgagggaaaaaaggaagtgcccagcttcagccagactagccccagcggcttccctcccgaaagcgcaggcctccccttcctcgacctactccggtttccctcgcccggccgcagtgggcgttgcgtggggcagggtcattaaatgttcaataacgctttgcagttggaaaattaacaagcagatgaggagttctgggctcattcagaaggcctaaactgctgaaatcatagaaaacttcttaagagggtttagtggtatttcaggaaacgtactgtttatgagaatgctaaaggacccatttcaggatggggaaggaattgattgggcacgccccataggctcacttgtaattaattaattggaagtcgggtttaaaaggataagaattactggccattttaatccattgaataaaaagtaaatttgagggctcgcccttcacatcctgaagggaatccaagccttctgttaattgcattaactattgaaagctcttttattaagtcagtgtgacgtcattgacaaattctgagagggttccgttttttcctctcctgttattactttccctacttggacgaagatggtgatgaaatctatgattccaaaggtctctcccagctctaaaaccctatcttttctactcggcgccatgttttacctacattatctccttccctattgctccttttctgattctgaattcgggtctcatttttagattgccttagtgatacttaaatgacctttctgccttcagtctctgttcccaccagtcttgagacggggtcatattaatgtctctaaaagagtttttattatatcgttctctgttctggctgcaacttacctacaaactgagttctatgtatgtatactcatattcaatatcctccacaatttagctcagagactgcaaactggtggtctgtgggccaaatccttctacaggtgtgttacttatccaacattatcttctaacttctcacccactgagttttccaactttttgatccataacccacagtaagacattttacactgtaacctagaatatacacccatatatacataacacatatgtgcatatgtgaaatataagtttcacaatacttacctactgcttaggataaagtaaaagcaacagacgcaacagagttaatttaatataaaatattttataatacagtgtagaaaaaaatgttaacatcatatagaagcaaattaggaaagattttatttaatgccatggaagttcttgcctgatcataggtttattgcactccagaattcattaggacagtggtacatgaacatctgatccactg

SEQ ID NO: 587112 - DNA, 4001 bp, Homo sapiens
gcaaacatatcttcaacaagcatgcagagaaaattgaggaagtgaaaaaggaagtcgcgttttttaacaacttcctcactgatgctaagcgcccagctctgcctgagatcaagccagcccagccacctggccccgcccagagtaagatacgatccatgaaggtcgcatgtgccctcttccttgactacccagggactcctgtttctctttaacgtgtcaccccgagaagtttctgccccatcctcaggccatagccctagaagtcaattgtacccgtatccccctccccgcccccgcagtaattcatgtccctgtccgtgttgtactccccccaggtttgaccccaggactcccctacccacaccagactccccagggcctgatgccctatggtcagccccggcccccgatcttgggctatggaggtaagtacaggagggagatgaaggggcttggtgagtgtgtggctttgggagaagaaaacagaggatggaattgaggacatagttttgcaactcaacactgatctctgtcatagctggtgctgtccgccctgcagtccccacaggaggccctccatacccccatgccccgtatggtgctggtcgagggaactatgatgccttccgaggccagggaggttatcctgggaaacctcgcaacaggtgaggagggcagacgcccaagctttgttgccgcctgcagactcccttttgggagccctcagctctcatcctgtacctctcacctcacaggatggttcgtggagacccaagggccattgtggaatatcgggacctggatgccccagacgatgttgatttcttttgagccgtcccccgttcctcagtcctgtatcatccatacttgtactaccttgtcctatgaagctctgagaattttttgtacgatcagccttactgctaataaaagcacttccacagggctcctgactctcgtgtgttacataactcctccatccttccagagtaactcctgaggtgttgctcagccctgccacttttattattgatgtcaaaagcgccaggctttgcagggacaccagtgggaggtacataggtgcgtgtctgggacccgagaatctcagttctgtaacttcgtcctcagtccaaggtgcgctgctgctgttgggagctaaggctggtcaagcacaggttgtagaaggagttggggtcaaaggctgcactcacctcttgccagcccacccacccagcagcctgtagttcactggggctttttggagtgccccagtagtgagggtccaataccaggacataggcttccgtgcctgaccctacgcagactcccagcaaggccttggacctggcatctgcgtcccccccaaccatgactgggcccccaccccctgcgaagtgcgagtaaagcctctccagctccccgtgcagccccactccccggggtacgtggcagaggcgtccctggggccctccgaagtgagcgaggcagaggctggcctccacgcagccgatccagtcccgggagccccggaagccggggggcttgtcgcccatgtcctccagggccgcctgtacggcggccagtccaggtacgcccgcgggctggccctctggccacgagcacagcgtctgcagagtgcggtagccgcagccccagccgcggtcgtccaggccgtcgcagccgtagtggtagtagaggtagtggcccgagagcagcgccaggcggacagggccgcggctcggcggggacaggcccacgtggacgtccctcagcggctccagggcggtgggcgggagcggaggtcccaggccaggcacagcgtcctcctagcggcgcggagcgacctcaggctccaacacttcctttcggctccgggtcttgggccagctgccgcaggaccggcgcgcagactggggacgcgctccccgggcctcgttgatcaccgcaggccgcaataggcagccaccgaccggcaccgaccgaggagctcccacaatgctccgccgcgccccgccccgccccgcccctcccctcccctcccctcccctcccctcccctctcctcccctccgccgtgccagctagcctgcctgcgggcctcattacgcaggcgcgagctccgcccggcagggcagggctaggggttggcctttgccttgcgcccgcctcggagctcgcctgtttcttgccctccagccccgctcctgcatagactcggcccccgtgattccggcgttctgcctctacccctggctccctagtcgcgcacactcccgtggctgtaacagtttattggcagcccagaggggcgaaggcaccgcgggggagggagctcagcctgagacatgcagaggaccgggagccccgggggacgtcggggtggggtggggatgggcagagtctggggctcgtctgtgttatagcccagccctgaaataaatagtatatacagctagggggccgggcggagcggaggacatgggggtcccgccggggtcacaggtctgagcagcgatcctgcttgctgtagtggtcgaactggttcttccagtgcaccatgtaggagctccagcggtggaactcggccttccactggcgctccgcctcgtcgagcgtgtctgcggccagggcgcccagcgaggcgggaggggaggacggcacgaggaaggtcggggatcggacatttgggcgggttgaagggggggtatgagtgcagggaggacgcacggagaaatgcaggcgaccacgtgggacggtggcaagaggatcaggagaatgtgcgaaagacgagagggaggatgagggcagaggcggggccggagaaggacagcaggaaggagagaggaggagaaaagaatgaccggaagacgggaacagaggggacaggagggggaggttgggggaaaaagaagagacagaaatggttgaccgttatagccccaatggggggtgctaccccgtccggggcctcccacttccccccaatgtcaggctcaggttccaaaagataattttataaaagaatactggcttttccatttccattcaaacaacaaaggcgtgggggtccctgagaagggtgggaggcacggccccctcctcctgccctgtccagtgtgagtctctcggtttgaggaggaagggagcactaggtctgagatccctgagtggggcccttccccacggtccgaccactcattagaggaggggcccctgtggccgtaggggaagaggccgtgttcacagccgccggaggtgggagaggaagaggaggagaagctggtggaggaggaggaggggcagggggaggccgggcctcggagcagcctccccatgggtgaagcctgggcaggtgctgggagcctccgaggctagggggagaagagaggggttacacctggcgggctcccactcccctcctcccagccgctgcccgctggcccctgcataccggtggcgctgagcaatttggggaggaagcggttccagaaggcgcaggcctgggcgcgcagcccccgccgcacctccagcggccgcaggtccagactaacgtactgctgagcccccgccgtgtacgggggccattgtggggccttggggtctcggggctcattgggatccctgcggaaggaagggaaggctcagtccagacgggcagtgggaggaggtggcccccaactccacgggatcccggactcttcagctcagcggagagccccagagaacccgtcccctccctcccaccactttctccaatgtgcgcggtcattggggtcttcccttcctcaagcgctccgtctccttccgtttccctcagcttttctgttccatctttgtttctctcactaaaaaaatggctaggatgtcttgagactttcctaaataaccaggacgggtcctatgtctacaaacatcacattttttaacaacacccatccaatgctagatttcattgtcctcttctcgatccaggtaaactggtgtgtgtgtgagagaatgtgt

SEQ ID NO: 587113 - DNA, 4001 bp, Homo sapiens
attttaagtgactcaaaaatacacgaaaaagctgttttaaattatcttcctgctcatctccctgttttaaaagaaagcctttgcttaaaagtggtctttctaactgcaggtaaacaacgacattaacatctggtactcacaggagtgctctttaaaaaaaaaaaaaatcactattacagggtacgcaccaaggctcacacctgtaattccagtactttgggagggagacgggggagggagggatcgcctgagcccaggagtttgagataagcctggtcaacatggcgaggccccatctgaacaaaaaaaaacaaacaacaaaaaaaaaatctttattagctgggtgtggtggtatgtgcttatagtcccagctacttggcaggctgaggtgagaggatcgcttaagcctacgagttaaaggctgcagtgagctatgtgcatgctactgcactccagtctgggtgacagagagagatcttgcctcaaaaaaaaatgctattaaagacattgatgtgtgtactctcccctatataatgcacatcaacttgctttgcaaaacaatgctaaagtacaaaagacttaaagctgtaatataaaatagactttactgacttgcaccaatacaaccacaacttttttatacaccactgacacacattctacatctgtttaatgaaatcctttaaagtaccgttagtgagtaaaactaagacaaacctattaagtgctaaggaaacactaagggagactatcatttaattatcgtacatgagattccaatcttaaattgccacgtgaagtctcaaatcggatcttttttgcttaagggaatttgaacgatgacaattctgtagctttgggccaattcacagactcagtttccacaacgttataatacccaattaaaacttctgtccaatttccaccgtaccgtttgaaggtatttttatgtgcactcattctagaatactcctggcaaggccgccggcttcgggtcacaagatgagccagggacagattggagactacccccaaatctcccaggaatcggttatcttccagacctccagatcgccctccagagtctcgcagtgtggagggcaacgacagaaagactgctgagggggtttaaactgttgagtcaaacatatggccaaaagtcagagtcaactgggaccttgcaaatcattccgcctaacccttcgttttgcagatggggaaaacacgcctcagaagggagaaccctagctcggggaaccctagctcggggtctaacaacgatttaagcttgtctcccctagtactggccagtggttcttccccgttacccatccttaagtgcttctattggctgccaacacggaggggttagcggggtgaaagaaccggcgcctccgcagtgtggccaggttgggctaaaaaacgtcttagaagtaatcggatcaatctctcttcttacaggtggagaaagtggagaaagtagagtgacgcagctaagggagtaaatcgaccctcagccaacaagtggcaaaagcctgaagaaagtgatcaagatcactgatgaccccgctgcccatctccaagggggcgggtatcacaaccccgacgccacaccacgtatcattccgcaaaactcccgcgcctcccacgcagaactggcaagagggaaggcgagacagcagtgaacagctggtacgcagcacccacagcaccgcggcagcagctagtgccgactcccgcctagctcttttgactctgttcgcgggaagaatggggaaacagtaaggttgcggcgcctcccgcgagacgaggtacctgaggctggccccgcagtcccccgccgcaccagcaccggagcttcacaccccacttccggggtcaagtcaccgccgggaatcctgtgatcgcagaaaggtagtctcaggttccgcccctatccaagtcccgcctccactgcctctcgccctgtatctgtcaacttccgggacgccgcgcgtcactaagcagccaatctccacttccggactcatccagccccttctccacccctttcagagacagcgcgattgcgatttaggtttccgcgcatttaattggcgaagctggagcgctagtcttcgctgattggtgccgagaaatctgccccatagacacccgcggggcgcacagtttcagtcgtccgtgggtttcccgccagccgcagtcttggaccataatcatggtggacatgatggacttgcccaggtcgcgcatcaacgccggcatgctagctcaattcatcgacaagcctgtctgcttcgtagggaggctggaaaaggtgtgcgggttcgcaatcatgggctcccaagtccgtagctggagggagggaccccgcctggataacgggggatgaaaaaggacggaaagcctccgatcactgcgcccccgactcctttattttgcacaaggaactttttggaaattctttagccgttgtagccccattttggcgctcttttatggcacggaaacaaagtgttttcaaatgctgagttctaaattccagtgcccgtcgcctccgttctagccgtgcttacgtaagggaaattataaacaccactcccacatctaccttcagatttcttagtttactcagacgtgacggacgcagacaaaactaatctgctggtttccttctcttctgaaattacttatttttgcaaacctcgtttcctcgttgtgatcgcttctctgtaaaacatgccttggttgtccgctttgggtcccgtagtaacgagttatttaaccccagtattaaagtgaagttccctcattctacaggcgagaaacaggcccaaagtcttggaatcagtgacctgaaaagctgaggaaaagaaaactattatataaagacttatttagtagctcatttcatccacacatcctcttccttaaatgagtgttgctctgacttcccaagtagggaaactgagtaggagtggtaggtggttgactaaaatgctcagaaactcggcaaatggcaaagctggcattcaaacgcaatctgacagcgctctttacagctgcttcccaggagtaggacccagatattctagcaaccagttctccttttacttcatcatgcctgttttttaaaacataccctccgtgggatatgtactgtctaaatcatgagtgccagcagatttcacttttagggtgggcatcctttaatttgttatcagaatagggttgccatatttagcaaatacagaacctacttaacactacaaaaaaaatccttgtttatctgaaattcagaaattaactgtgtgttccatgaacagatttgataacataagattataatttgatccaataagttgaataaactgaatgaataaactgttcaagaaacagttgatttgtgctcaactaaggatcaatgtactcatctttagtcaaactttgttgttgttttagtgagattttaattatatgtttcgtttttagattcatcccaccggaaaaatgtttattctttcagatggagaaggaaaaaatggaaccatcgagttgatggaacccgtatgtttaagtgttaataagtctcttatatattatagttaattcttcatcttgatttggtttgttgccgatgtttctaatttttgcaatggatttaaaaaggatgagctggtaaaacgtccctggctgtaaaatttaattcttgtactattctctcattatatttccttttacatttttaaccaatgattttttgggcgtcatgatttttgaacatatcccataaatgttggataacaattctcattccttatgaaagaccataaaatcacataagaaaaatttacgttgcttttttcttcctcaagaggttttttgtttcgtttttgtttttttgttttgagacagggtctcactctgttaccccgggtggaatgcagtggcaccatcatggcgcactgcagccttagcctcccaagatcaagttgctccca

SEQ ID NO: 587114 - DNA, 4001 bp, Homo sapiens
agcgctacaccctcactcaaccgccagccaccaaacacacacagtcaaatccgtctgagccccgcggaagctcgggcagtcctgccctccccaggagggcgcgttaatacggattctttgtcgcggccacacagagacttgcacaatagcaggcccagccttgtcgcagggagccttgtccatggggaggtctccagcatgaagccgagccctcccccaacgctgtaaccgccttttccttctttaaactttttttttttttttttttggtgcgaattccggactgccttgcctgtaagaattagtcattatcgtattaggggagacatggaggggtcttgacttcacttaagacacttagaacaaattggatgaaaggatttccaagcagaagaggtcatgagaggaggtccaagcgcaggacaaacacacctttttagacaaagctattggtgataaacaggcgttttgccagcgtctgcctcaacgcctagcacccacaaccgcacaccgcaccacagacctggaccccacaccgcacccaccgcagaaaaagaggatttctttgctccagggaaacatttaattatgcacaaatcatcttggaatttttaatccaccaagctgacactgtatttttaaaacaataccatcagccatctccaaatgatagcaaatttacgggaaaacagtcgtaagaaaaagatgagaccggggttattattaaaaattcagacacctttttttctcccactttctcaatgtgttaactgtttaagcttctgcctccccttcctcagctgttcccttctgcaaagcgatgaataaatacatgtttccatctgaatattttgcaggcgcaaggtaaacagactcgttcgctccaggctgggtgacagagcctcgcgcggaaggttgaggcggtgcgggggcgggggggggtccccttccctctctcctccgggtcggagccaagccggcccctcctcccctcctcgcccctgcctggagacctcacttggcccggcctccgccaacccaccacgccgcttcccggttcggacgcagccgctgttctggtgactcgggtgctgccgccggcccttctcaagccgcccaggcttttggggggcagttacccaccccgctgtccgtgaggggccgagccccagaacccccacccctccactcttccccagcaggcgagcgcgaagcgggcccgcggcaaggggacgatatctcgccacctggaacaaaggcgtcccggcgcgcccagagcctggggtccggatggcagatccgggagcgacgccgggtctttacctgaactcgggactcgaccaggtctaggcgcagcgccagcgcctcgcgcatgaacacgtcgggatagtggctctcgttgaacgccttctccagctcctccagctgccagccggtgaagttggtgcgggtgcgccgccgcttgcagcccgggctctccttgtccgggtcccccgagtctgcgggcagtcacaggacgcagcgcggctcagccaccggcccaggcccgacccccacccctccctcccgctacccgctggccgcctggatccgggggggggggcgcagagacggccgcctaggagccggctctccttcgccagccccgggccccccagcgcctcggccggaccagggcccccgcccccagccgcactcctccccgccctcccgcccgccgcgcctacctgacagcttgaagggctggccgtccccgccgaccccgcaggcggctggcagcagcggcgtggggttgaccaccgaggcggcggcggcgcacgagcccccgagcaggccgtcgatggagaagggcaccgaggcggcggcggcggccgactgcagctggtgcccggccagctcgtacacgtggtggtggcccagcgggtaggggaagcccaccacgccgcccagcgagcccccgaactgggcatgcgggtgttccaggaggcggccgtccatcatctcgcgcggggggccggcggggccggtggcggggcgcgggggcgcgggccggggccggggcgggccagcggcgggaggcgcgggcggcggcggcggagacagggacccggagccccacacatgcttcgcccgcactccggcgctttacttatcaacatcaagctcccgataattagccgcggcccggggaatttgggaccaataagaagcgctaatcggctctgacgtcagaggcgtgctgggtgcagggaaacgttttccatatcgattgctaattatacctgacatgcacctcaataaacagtatcaggaactgtcacaacaagacgggctgggggcggggggagccggagggagggagggagggagggaggggccgcccagggccgggcaggcgcgggctggtgcctgggcccggggcaggggcccccagctagccccccacttcactcggggccggccccgagcccgcgcctcccgccagccgccgcctccccgcccctccgcaaatcactaatagatttccctttaaaacattcagcgccgtgttgtggggatttttcaccagaaatgctgtactctctgaacctttaaagtgatgttgctccaattacagagagacattgagcggcaaatagactgatccaataataggagattcatcatccgcttttccgaaactgtcacattgaatttaaaactacaaggcttctcatctcctcctctccggctgcaggcggcgggagaggaggaaggaggaggaggaggaggaggagggcgatcccgaaagagaagaactacagaatgtagcaccctgtcaataaagaggcgtaactaatgccctctctgattgactggcagtcgccctatctacaaagacagaggtggggggggctgcggaggctccccgacccccatccccataaagcccgggcgcagaggaggagagagggatggggacaggaggggaaaagtaactttggggtggggccgatccgcccccacccccttacacgctcgaataaagataaatacatccgctctgactcggcctctgaaggatggggctgaagcacccaacccatttattataattaaattatgttctcagagaagtgtcactcccttctctgctataaaatattgatagactcaaagctaaatcactaaaggatatattcttaaataagcagcaaatcaggattgtgggcagcaaggaaagaaatgaggggatgtcggtccatctctctcctttgtaaaaaagtttgtcagtggggtggtcgcatttggctgcgggaccccagtgctggactagttgggttagggccacctctccagcagtgagtgccccgagcctcggccagcccagggcggggaagagaggaggagagctccggcctgggctgggccagtctgcggagccaccaccaccccagggcaaagtgacagaccagttggctttgggtgtaagtaagtgacttgggccaggcctccaagccctagcccgcgtgagagggaagggcaggccgggaccgtgcgcatctctgcgtccctccgggtcaggtgcccgtgcctgggccggggagggtggggggtgccggaaacgctcaggaggggaatgcttgggttggcgggcgcaaggccaccccgtcctgccacacgactgcctgtccctgcgactggacccacagtctggccctgttcctaactgaaggtcgtggacgggccgatccacgctgactccgacttcaatgaccctcttgtctctccttgcgggagaggaggggacggcgcagggttgaggaccaggcccagccaatccaggagaccgagaggcggcctggaatttggggagccccctccctgtttccagtctcactaggaaaacgctgcgagtattcattccgaggtcagaggccaagagcactacttttcgccataatttaatttctgtctctataaatactaaatgtaaactccgtccatccgactcgatttcg

SEQ ID NO: 587115 - DNA, 4001 bp, Homo sapiens
ctgccttcccggcttcccctgggcctggtcttcctgaggtcaccccgcctcctcctgtgtccggacagtcctgacctggacacactgcctgcttccccatcccggctccaccccgatgttggcaggccacttgacctcctgtgcctcagtttcctcatctgtaagagcgggtaggagccacctctcctgctccctgcctaataccgacgagactgggtctgaactcggcccccgagtttcctgccagatctgcccgtggtgggggacaggggcctagactttggggaagctgccccctcccaccttgactaagatcccgcctccccaaggtgcccacctgctcctcctgggccttgcccggccccagcgggggtgagcactgttgctgactctacagtggaaggagcccgggcttgcaaaggggaggaccggggccggggacccctccctggaaagatgctagagagagcatccctggtcccagcaatgcgtccgccccaagcacagccccagtcccagggctccggtggggaccacccaccgatagggtccagggccagggaggggcgcgttgcagaagggctgctggtggcagccgtggtcatggcccacccgcagcacgggggcgcctccgctgcccgccatggggtcgccacagggcagctggtccggagacaggggcagcgtcatgtagtggccatcggtcagcagctgtggggaggccggaatgtcagccagtgtctccgggttctggaagcccctggaggctgcaggaggagagaacagatggaggtgggaggggagaaagcagctttgtccttatgagtgggggttctgtgttcgcccagtctccagccctgaccccccatgccacctcctccctcagggcccccagagatagtccagacccagtcgactttgttacccctgaaggggagcttccctctggccttttgtccccacccagagccaggagtggggagcagcgggcagtcccaacctgcccagccccagccccagccccattgcagtgcaccggccctgccccacaggaggccacatcctcccaggtcgcagcctcggttccctgtccaaaggaagaactacttggattcagagaaagggttgcagagcccttgacagctgacaaacccaccactagcactactcccgggatttggtgttcactacgtgtgtatttttcaatacacatattacccctttagataaagcccaattcatccacacctactctcccaaaggcccccacaggggctcaatcattgaaggcgcttgctggtgaggggctcctagggcccaccactctcctcagccgtcaccctcacccaggccccacagcagtccccgtaccattgctgaaggccaccacgagccagacggtatcgctggcgctggcaagcccatcgaagacacagcgcggctgctccagggagaaggtggtggctgtgaccttcccttccaggtcccaagctgttatctgtggtgtgtagggcaccagctctgtggccacgggggacaaaaggtgagccacggagacgggcgtgggggtccctggggctgcctctcccaatcggaggggggcgggcgcccagggtccaatcactccagcagggcccccagccccttgggtctggctggacgcgtccatccaggacccccactcacccaggctcaggctgggccggagacagttcaacgccaggaggagcatctgcagccctaggtgaggctgcccccagggtagccccatgacagctgccagcacccgggaggctcaggggctggtctggctgcttcgggctgcacctcacccccaacagcttggccctggagaagctggttaatcaggctgccccaggggctggaaagacctgcaaatgtaagtgcaccccacccccttcctcccaggccagcccacagcagggaggagctggggggactctggtgggaggcaggccagtatccagccccactgccagggccaagggagaggggccactggaaccccagatgccagccaggccatcccggagcctggattggggcccctcccagtctctccgccctggggaggagggtctggcttttggaaacaggctcaggaccacatgcctgagattcctgtgccccaggtgccaggagcctccctctgccttctgtccccacccagagtcaggagtggggagtagcaggcagccccaacctgcccagccccatccccatcacagcacgctggccctgccccccacgaggccacatcctcccagttcgcagcctgggttccctgtccacaggaagaagaacttggattcagagaaagggctgcagagcccttgacagctgacaagcccgccacttaaacactactcccgggatttggcgctcactatgtgtgtatttttcaagacataactcacataccttcacaaccttcacagctcagtggcttaaatatatatatgtcacccagggaggtcagttcacagctaactggagcctcaaactcccaggttcagttaatcctcccacctcagccttcccagtagctggaaccacaggcacacaacaccatgctccggctaatttttaaaatttatttaattaatttttttttaagatggagtctcctttgttgtccaggctggagtgcagtggcgtgatctgggctcactgcaacctccgcctcctgggttcaagcgattctcctgcctcagcctcccaagtagctgggattacaggcatgtgccccacggccagctaatttttgtatttttagtagggacggggtttcaccatgttggcttggctggtctcaaattcctgatctcaagtgatccacccgccttggcctcccaaagtgctgggattacaggcatgtgccaccgtgcctggcacccccgccaattttttttttgttttttttgaaacggagttttcactcttgttgcccaggctggagtacaatggctcgatcttggctcaccgcaacctccacctcctgggttcaagtgattctcctgcctcagcctcctgagtagctgggattacaggcatgtgccaccacacctgtctaattttgtatttttagtagagatagggtttctccacgttggtgaggctggtctcgaactcctgacctcaggtgatccacccacctcagcctcccaaagcgctgggattgcaggtgtgagccactgcgcccggctggccaatttttaaaaatgtattttttatagaaacaggatcttgctatgttgcccaggctgatctctaactcctgggaggatcaagcaaatctcctgccttggcctcctaaagtattgggattacaggcgtgagccaccgtgcctggctatttttttttttttttgagacatggagtctcaccctgtcgcccaggctggagtgcaatggcgtgatctctgctcactgcaacctccacctcctgggttcaagcaattcttctgcctcagcctccctagtagctgggactacaggcacctaccaccatgcccagctaatttttgtatttttagtagagatgaggtttcaccaacttggccaggctggtctcgaacgcctgacctcgcgatctacctgccttggcctcccaaagtgctgggattacaggcatgagccactgcgcccagctgctaatttttaaaaatatagtttttgaggctgggtgtagtgacttacggcggtaatcccagcactttgggaggccgaggtgggcaggtcacttgaggtcatgagttcgagaccagcctggcgaacatggtgaaaccctgtctcgactaaaattacaaaaattagccgggtgtggtggaacgtgcttgtaatcccaagtactcgggaggctgaggcaggagaatgacttgaacccgggaggcggaggttgcagtgagctgagatcgcaccaccgcactacagcgtggatgacagagtgagactctgtctcaaaaaaaatataataaaaa

SEQ ID NO: 587116 - DNA, 4001 bp, Homo sapiens
gaggagagtccaaatggggcaaccaagccccaacagctctggtctccccccgcccagatccagacttaacatgggagccccaagttacgggcacttcctgggaggtcaggtccggtatgaaccaggaagctttcccggcaactctatgccccatgggcatgggtgggaggcctgagtccagcccctggcccctctcttaggagcctactgggggtgggcactgtgggaggtctaggacaatggtggcatgggaggtcccaccctggcggtaggcacagttctcctgggccgggccatgttgggatggaactggaatttgggggcagcctgaccctaggctgaactctgttcctgacatgcccagtgacctccaacttaagtccctccagctccacccacatggtctaggttgttttgcttgatgagaggatgcgtggcttggcaggggtcggggggatggcacaggaaggtcctcttggctgagaccccaggctgggacacagactgcccagagggtccgggggctctggagccagagcttggttccgagtgagtctagaacgtcctcttcaacctgcctggttctctgccgcctcccaacatggccccgaggcatcttcgccttcaggaccaggtccccctctcagactcccacctcatctctctggggaagggtgggggacgaggacaagcttcccaggtctgtaccccaaaggggactcaggattggcaacttggcctgtgtccagccttgctggttggagagctcagacctccccaaccccaaatactggtctaggagaagcagaacgatggagtgggtttctatgtgagtctccagcagctgcccctgttcagttcagttcagttcaacttcattcatttacgttgaattcaactcaactccaaaggttcaggctagagtcttccttggggaaggattgtcacgattcctttcttacagctctcagtcctatctctgaagcccagggcactctgcgtgcaggaggcacgtaatgtttagaaagagaagtggaggccgggcgcggtggctcacgtctgtaatcccagcactttgggagactaaggcgggcatatcacgaggtcaggagttcgagaccagactggccaatatggtgaaaccctgtttctactaaaaatacaaaaattagccagacatagtggcgcacggctgtaatctcagctactcaggaggctgaggcaggagaattgcttgaacccgagaggcggaggttgtggtgagctgagatcgcgccactgtactccagcctgggtgacagtgggagactctgtctcgaaaaaaaaaaaaaaagaaagaaaaaaaagaaaaagaaaaagaaaaagagaagcggagcagtcagagattggggttgggggcagagattgtaggactgtatctctcagcctgtccagtttttcttttcttttcttttttgagacagggtcttgctgtttggcccaggctggagtgcagtggcgcattcatagttcactgcatgggctcaagccatcctcccgcctcagtctcccaagtagctgggattacaggtgcactccaccacacccagctaattaaaaacaaaaatcttaaaaaaaaaaatctttttgaaaaaaggggtcttgttatgttgcccaggctgggcttaccagagcttcctggggacatgcattgtcctggacatctggaaacctctcctcagggaaaggaaggaggcaggagccatgtgtgagaatttggaaacaaagtgaggtcttgggtttgtcctgcagcctgagatgcagcgggtacccctgtgccaatccccacccttactcacccacgtctgtcccaggctggacacgggtcagtagcagcaacagcgacactagcagctgggactgtcccgcagagagccctatggccgggccaagcctccagctgttgtccatctgtctgtccgtccgtctgcagtgtctgcagccccagaggctcccctgtctgtagtctgtgctgtgctaggggaagctgttcctggcatctcctgctgcccctcccagctaccccctcctctcaaacaactggttggacaggtttgggggcagaatctgccagcccagtgaatctggcatcgccagggaggggtctgaagagaacatacagttgcaagacaagcctggactaccccccccacccaccaggagcgcctgaccagggaggggctgaggaaggaggcggggcagcctcaggatccaggctgccccagggacaatcccgctaagtctaccccgtggatctccttgtccaaacagtccccaatgtagcgactcttcctttaggacctgaggtgggaggatcactcgagcctgggaggttgaggctgcagtgagccaagatggcaccactgcactccagcctggatgacagagtgggaccctgcctcaaaaaaaaaaaacaaaaaacaaaaaacaaaaaaccaacctaggaggagttggtgtctgtttttggttcatagggagtgccgctcaagcaaactccctggagtctcttttatttattattatttttttttggggggggcagggtctcactctttcgcccaggctggagtgcagtggtgcgatcatagctcactgtggccttgacctcccaggctcaaggttctcagattctcaggccccaccctggggaaggatggaggatgaggacaagcttcccaggtccacatgacagagggactcaggattggcaatttggcctgtgtccagctttgctgctcagagagctcagatccccaccctcaattcactcccttgtgtggaagggagtgaccctcactttctagcacacacagggaagagggcttggctaagagcacccaggaggtcagggcaggactggggattagatcacacccaaatgcatctctgtggcactcctggtatagccctgctgtccccctgtagcctggccctgggaggggggctcccagacttcacaccccctcacctctttatccaggggaccggctgtctcttcctccttcatccccagcctctgtcagggcagggtagttcctcctcgagacagaaaattaccagatggaagtccaggcatggtggctcacgcctgtaatcccagcattttgagaggccgaggtgggtggatcacctgaggtcaggagttcgagaccagcctggccaacacggcgaaaccccatctctactaaaaatacaaaattagctggacgtggtggcttgttcttgtaactccagctacgcaggaggctgaggcaggagaaccacttgaacccaggaggcagaggttgcaatgagccgagatcgcaccactgcattccagcctgggcaacaagagtgaaactccccctcaaaaaaaaaaaaaaaaaaaaaagatgagatggggctcagggcaggtggagcgagacctgtgaccacctctcccctggatcggggtgctagcccccgtcagcctgaccttcacgctctaattatgccagatgtcttcattctgggaaacccaacagattatcacctgtgggccccatttttggatgaagagggaccattccctgaaggggacatacctcagttccccgaggggattcagatgttcacctcaactcacaagaaaaacttctggccgggcgcagtggttcacacctgtaatcccagcactttgggtggccaaggtgggcggatcatctgaggtcagaagtttgagaccagcctgaccaatgtggaaaaaccccgtctctactaaagatacaaaattagccagtcgtggtggcacgcgcctgtaattccagctactcgggaggttgaggcacaagaatcgcttggacccaggatggggaggccgtagtgagccgagatcacaccactgcactccagcctgggtgacaaagtgagactccatcttaaaaaaaaaagaacaagaacaaaaacaaaaactaggaagagttggtgtctgtttttggttcgta

SEQ ID NO: 587117 - DNA, 4001 bp, Homo sapiens
cgcggttacagccaatgaatggaaccaatggtctttttaaccagaagaccccaggaaggcagaaaatgagccaaagaaaggccaggcaggggacagtggggaaaggaaacagggatggagaagcagagagggaagtgcagagacaggtcacccaggcgcctggaaactgcctctatggccttcacgggaaacggcctctttctactccggatcccagactgtgtttctttgaaactgaccgtcagaggagagcggctggaggcggacagacgtctgcagtgggaggcgctccaggcgttccaggcagtgtcctgccggcgagtcacccgcgaccgcgagtcacctcaccaagccctgaattgggacaggagacgagacgtgtcgacgagctgcggagttcctcgcttctctgggccctgccaggtccaagaacaggttgccatataaaagaatcgtgaagggacccccttccccatgcaaattatgtcatataacgcatatgcctgtgaagtttctctgcggagctgccagataactcgatgacaatattttatgcggtaacattttgttaaatgttgactcgatggccacttgacgccatctgaactctgaaagctcgcgtaacaatcatcctccaaatgaaattttacccccttctccctttaaaaggcggtggggacaaaacatcacttcgtcacttaagtcaccatctccttcctcttatctggggctcccagcatagttctaggggttcccgcactccccgcccgggtttgggctgcgagaagcgcccgcctgcgccctgcgggacctgaccctgccggctctggcttcaccctcgctgcgcctcggcccggtgggctccccgcccagagccccgcgcgctccgtcgccgggacgtgggagaggtaggcacggggtggacccgaggaagcacatcccgcccgcgcgcttcccccacgcccacctcgctccgcacacaccagccccagaacctcccggccgcgcgcccgcctccccgcgcagccgcgccgggccgctctctgctcctctgcagctcacagccaaggtgcaccagagcctccgtcaccgcccctacaggtaaatgggcacgtggccaaggcaggggacgggctagacccctgggaagagagaacggcgggagccgggccgcgggcgactcaccactcggcctgcgcagagagccgctacacccgcggcgccatcctcgcactgcgacaccggcgacaaacgcaatgctccagggccggacgaagggacggctctcgggaggctcgcagacggcggggcgcgggtctgtgcgccggagcactcgaatgagggaaccacctgcgaggtgaatctcatatggagtctgcgagcggccccgccctgcccgggggttaccgctaggctcgggccccgcctgccctgggccggcgaactcagctgaccgcatcctgggccatcccgcagacaagccccgcccgcccccaccttcctctgcccctctggccccgcctcccccgccttcctcctctccaccctcccgcgaaggtcccgggaggctcagcccgcaattgcttctcgcctctgcagagcagctgggcaattgtaaagaaccagcagccagttctgttactcattaaacagcccctactacagaggaaatcttcttacccacgtggtcctaacctggggcggaggaaaccgggctagaagcggctctaggactaacccaaggtcacgccgccaggcaggatccccggtctgtctgtctggcggtggccccgcggctggggccagcggagagaaatgacagcgtggaaccagccctggcccggtggtcgggaatgtggagctggcactgtcactgtgtgtaccctggatctctctggacggcctcggcttcccccctggggagtttctctgggaccttcctgatcctgggagttcccgcttgctggggcaaagccaggagctcgcccgaggaggggaagtgactcattcacttcgagtcgcagctaagtggccgaactgcctcaaaccggcgctgcactctgacccccaggggccggacctgcctgcccccggccggtgcccactctccgtctcaggcgtctttcctggtcctctccctgcttcccgaacgcgcactctggtgagagcacagagcctgggaaagaagacgacctagaggcccgggcagcccagcacctctgttacttgcttcctaaagggaactccagttcctgagaaaacatggggttgggccgggagtggtggctcacgcctgtaatcccagcactttggaaggccgaggcggatggatcacctgaggtcaggagttcgagaccagcctgcccaacatggtgaaaccccgtcactactaaaaatacaaaaaattagctggacgtggtgtcgcgtgcctgtaatcccaggtactaggcaggccgaggcaggagaattgcttgaacccagcgaaggatgcagtgagccgagatcgcgccattgcactccatactgggtgacaagagtgaaacacacaaacaaatcaaggaaggaattaagggttttattgaaaatgaaagtacggccaggcgcagtggctcacacctgtaatcccagcactttgggaggccgaggcgggtggattacaaagtcaggagttcaagaccagcctaaccaagatggtgaaaccccgtctctactaaaagtaaaaaaaaaaaaaaaacaaaaaaaaaaacctagccggtcacagtggcaggtgcctgtaattccagctacttgggaggctgaggcaggagaaccacttgaacctgggtggcagaggttgcagtgagctgagatcatgccactgcattccagccttggtgacacagtgagacgccatctcaaaaaaaaaaggtaaatgaaagtacactccacagtgtgggagcgggcctgagcgtaggggctcaaaggccccattccagaattttggggagtttcaatgtcctccgcttggggcacacactatgtaaatgaaagggatgatgcaaagttacaaagtcatttacttggcctacgcagaggctatttcctgtcatagctaaagtgtgaatcggccttatgttccctgcctccagaccctattttgctgcctcagactgaagactgaaactggcctggttaggaagttgctattctctctctctgaaggtagattaacaacttagttttagttttgttaccggaaaagggtcccaatccagaccccaagagaatgttcttggatcttgtgcaagaaagaattcggggccagggtgagtccacagagtaaagtgaaagaagcaagcttattgagaaagtaaaggaataaaagaatggcaattccatgggcagggcagcctctagggctgctggttggctatttttatggttatttcttgatcatatactaaataagggtggattattcatgagttttctaggaattcttccttttagaacatatagggtaacttctaaatgttgccatggtatttataaactgtcatggtgctggtaggagtgtcgtttagcatgagaatgcattgtaattagcgaataatgagcaatgaggaagaccagaggtagttttcctcaccttgctggtttttggcaggttttggccagttttggctggcttctttactgcatcctgtttcatcagcaaggtctttgtaacctgtatcttgtgataccacctgccaaccttctatttcatcctgtgactaaggatgcctaacctcctgggaatgcactccagcagatctcagcctcattttacccagctcctattcaagatgaagagtctctgagtcgactcctgctgacatatttcctgactctacaacccttaggattaagggttcccttgtaaaagggaagggggaataaccaaataactcacccctttcttggaaaactcaggaataatccaccccttgcttagcacatattcaagagtaatcataaaa

SEQ ID NO: 587118 - DNA, 4001 bp, Homo sapiens
agaggagaaggaagaagaatgtttgttgtttatctttagggaagaggaaaacctagaagtttcattttctgttatatatttgatttttggtttttgggtttttttgtttgtttgtttttacaataagtttgcgttaattttaagatcagtaaagtcaacaaaattccactttgacaaaaagcccatgtaaagaaacactaatttatccttcttaaatgaaacatgaatgcccaccagtgctgaaagtattggaaccaagaatataatttgtgctcgatacacctgtgctgaattaaaacggtctgcggtgatgaggtttaatgcagaggactagaaggtcagggtagcctctgaaaaaagaaataatgtaagagcagctgagaaatggggaaagcttgggccaaaatgcagatgggcaaacaaactgaaaggcgggagagacaaaggcctgccctgggaatggctcagcagcgcttgtagaaatccagagtaagacattctttctattcaaggaagtcacaaagttttttaaagacccgcggttacagccaatgaatggaaccaatggtctttttaaccagaagaccccaggaaggcagaaaatgagccaaagaaaggccaggcaggggacagtggggaaaggaaacagggatggagaagcagagagggaagtgcagagacaggtcacccaggcgcctggaaactgcctctatggccttcacgggaaacggcctctttctactccggatcccagactgtgtttctttgaaactgaccgtcagaggagagcggctggaggcggacagacgtctgcagtgggaggcgctccaggcgttccaggcagtgtcctgccggcgagtcacccgcgaccgcgagtcacctcaccaagccctgaattgggacaggagacgagacgtgtcgacgagctgcggagttcctcgcttctctgggccctgccaggtccaagaacaggttgccatataaaagaatcgtgaagggacccccttccccatgcaaattatgtcatataacgcatatgcctgtgaagtttctctgcggagctgccagataactcgatgacaatattttatgcggtaacattttgttaaatgttgactcgatggccacttgacgccatctgaactctgaaagctcgcgtaacaatcatcctccaaatgaaattttacccccttctccctttaaaaggcggtggggacaaaacatcacttcgtcacttaagtcaccatctccttcctcttatctggggctcccagcatagttctaggggttcccgcactccccgcccgggtttgggctgcgagaagcgcccgcctgcgccctgcgggacctgaccctgccggctctggcttcaccctcgctgcgcctcggcccggtgggctccccgcccagagccccgcgcgctccgtcgccgggacgtgggagaggtaggcacggggtggacccgaggaagcacatcccgcccgcgcgcttcccccacgcccacctcgctccgcacacaccagccccagaacctcccggccgcgcgcccgcctccccgcgcagccgcgccgggccgctctctgctcctctgcagctcacagccaaggtgcaccagagcctccgtcaccgcccctacaggtaaatgggcacgtggccaaggcaggggacgggctagacccctgggaagagagaacggcgggagccgggccgcgggcgactcaccactcggcctgcgcagagagccgctacacccgcggcgccatcctcgcactgcgacaccggcgacaaacgcaatgctccagggccggacgaagggacggctctcgggaggctcgcagacggcggggcgcgggtctgtgcgccggagcactcgaatgagggaaccacctgcgaggtgaatctcatatggagtctgcgagcggccccgccctgcccgggggttaccgctaggctcgggccccgcctgccctgggccggcgaactcagctgaccgcatcctgggccatcccgcagacaagccccgcccgcccccaccttcctctgcccctctggccccgcctcccccgccttcctcctctccaccctcccgcgaaggtcccgggaggctcagcccgcaattgcttctcgcctctgcagagcagctgggcaattgtaaagaaccagcagccagttctgttactcattaaacagcccctactacagaggaaatcttcttacccacgtggtcctaacctggggcggaggaaaccgggctagaagcggctctaggactaacccaaggtcacgccgccaggcaggatccccggtctgtctgtctggcggtggccccgcggctggggccagcggagagaaatgacagcgtggaaccagccctggcccggtggtcgggaatgtggagctggcactgtcactgtgtgtaccctggatctctctggacggcctcggcttcccccctggggagtttctctgggaccttcctgatcctgggagttcccgcttgctggggcaaagccaggagctcgcccgaggaggggaagtgactcattcacttcgagtcgcagctaagtggccgaactgcctcaaaccggcgctgcactctgacccccaggggccggacctgcctgcccccggccggtgcccactctccgtctcaggcgtctttcctggtcctctccctgcttcccgaacgcgcactctggtgagagcacagagcctgggaaagaagacgacctagaggcccgggcagcccagcacctctgttacttgcttcctaaagggaactccagttcctgagaaaacatggggttgggccgggagtggtggctcacgcctgtaatcccagcactttggaaggccgaggcggatggatcacctgaggtcaggagttcgagaccagcctgcccaacatggtgaaaccccgtcactactaaaaatacaaaaaattagctggacgtggtgtcgcgtgcctgtaatcccaggtactaggcaggccgaggcaggagaattgcttgaacccagcgaaggatgcagtgagccgagatcgcgccattgcactccatactgggtgacaagagtgaaacacacaaacaaatcaaggaaggaattaagggttttattgaaaatgaaagtacggccaggcgcagtggctcacacctgtaatcccagcactttgggaggccgaggcgggtggattacaaagtcaggagttcaagaccagcctaaccaagatggtgaaaccccgtctctactaaaagtaaaaaaaaaaaaaaaacaaaaaaaaaaacctagccggtcacagtggcaggtgcctgtaattccagctacttgggaggctgaggcaggagaaccacttgaacctgggtggcagaggttgcagtgagctgagatcatgccactgcattccagccttggtgacacagtgagacgccatctcaaaaaaaaaaggtaaatgaaagtacactccacagtgtgggagcgggcctgagcgtaggggctcaaaggccccattccagaattttggggagtttcaatgtcctccgcttggggcacacactatgtaaatgaaagggatgatgcaaagttacaaagtcatttacttggcctacgcagaggctatttcctgtcatagctaaagtgtgaatcggccttatgttccctgcctccagaccctattttgctgcctcagactgaagactgaaactggcctggttaggaagttgctattctctctctctgaaggtagattaacaacttagttttagttttgttaccggaaaagggtcccaatccagaccccaagagaatgttcttggatcttgtgcaagaaagaattcggggccagggtgagtccacagagtaaagtgaaagaagcaagcttattgagaaagtaaaggaataaaagaatggcaattccatgggcagggcagcctctagggctgctggttggctatttttatggttatttcttgatcatatactaaataagggtggattattcatga

SEQ ID NO: 587119 - DNA, 4001 bp, Homo sapiens
acccgttaaactcaaatcagattggtaagttacttgcataaataacttagcttgtaaacatttaaaatacttttttgaatgaacatatttcaaaagcaaatgtgtgtgagagagagaggagaaggaagaagaatgtttgttgtttatctttagggaagaggaaaacctagaagtttcattttctgttatatatttgatttttggtttttgggtttttttgtttgtttgtttttacaataagtttgcgttaattttaagatcagtaaagtcaacaaaattccactttgacaaaaagcccatgtaaagaaacactaatttatccttcttaaatgaaacatgaatgcccaccagtgctgaaagtattggaaccaagaatataatttgtgctcgatacacctgtgctgaattaaaacggtctgcggtgatgaggtttaatgcagaggactagaaggtcagggtagcctctgaaaaaagaaataatgtaagagcagctgagaaatggggaaagcttgggccaaaatgcagatgggcaaacaaactgaaaggcgggagagacaaaggcctgccctgggaatggctcagcagcgcttgtagaaatccagagtaagacattctttctattcaaggaagtcacaaagttttttaaagacccgcggttacagccaatgaatggaaccaatggtctttttaaccagaagaccccaggaaggcagaaaatgagccaaagaaaggccaggcaggggacagtggggaaaggaaacagggatggagaagcagagagggaagtgcagagacaggtcacccaggcgcctggaaactgcctctatggccttcacgggaaacggcctctttctactccggatcccagactgtgtttctttgaaactgaccgtcagaggagagcggctggaggcggacagacgtctgcagtgggaggcgctccaggcgttccaggcagtgtcctgccggcgagtcacccgcgaccgcgagtcacctcaccaagccctgaattgggacaggagacgagacgtgtcgacgagctgcggagttcctcgcttctctgggccctgccaggtccaagaacaggttgccatataaaagaatcgtgaagggacccccttccccatgcaaattatgtcatataacgcatatgcctgtgaagtttctctgcggagctgccagataactcgatgacaatattttatgcggtaacattttgttaaatgttgactcgatggccacttgacgccatctgaactctgaaagctcgcgtaacaatcatcctccaaatgaaattttacccccttctccctttaaaaggcggtggggacaaaacatcacttcgtcacttaagtcaccatctccttcctcttatctggggctcccagcatagttctaggggttcccgcactccccgcccgggtttgggctgcgagaagcgcccgcctgcgccctgcgggacctgaccctgccggctctggcttcaccctcgctgcgcctcggcccggtgggctccccgcccagagccccgcgcgctccgtcgccgggacgtgggagaggtaggcacggggtggacccgaggaagcacatcccgcccgcgcgcttcccccacgcccacctcgctccgcacacaccagccccagaacctcccggccgcgcgcccgcctccccgcgcagccgcgccgggccgctctctgctcctctgcagctcacagccaaggtgcaccagagcctccgtcaccgcccctacaggtaaatgggcacgtggccaaggcaggggacgggctagacccctgggaagagagaacggcgggagccgggccgcgggcgactcaccactcggcctgcgcagagagccgctacacccgcggcgccatcctcgcactgcgacaccggcgacaaacgcaatgctccagggccggacgaagggacggctctcgggaggctcgcagacggcggggcgcgggtctgtgcgccggagcactcgaatgagggaaccacctgcgaggtgaatctcatatggagtctgcgagcggccccgccctgcccgggggttaccgctaggctcgggccccgcctgccctgggccggcgaactcagctgaccgcatcctgggccatcccgcagacaagccccgcccgcccccaccttcctctgcccctctggccccgcctcccccgccttcctcctctccaccctcccgcgaaggtcccgggaggctcagcccgcaattgcttctcgcctctgcagagcagctgggcaattgtaaagaaccagcagccagttctgttactcattaaacagcccctactacagaggaaatcttcttacccacgtggtcctaacctggggcggaggaaaccgggctagaagcggctctaggactaacccaaggtcacgccgccaggcaggatccccggtctgtctgtctggcggtggccccgcggctggggccagcggagagaaatgacagcgtggaaccagccctggcccggtggtcgggaatgtggagctggcactgtcactgtgtgtaccctggatctctctggacggcctcggcttcccccctggggagtttctctgggaccttcctgatcctgggagttcccgcttgctggggcaaagccaggagctcgcccgaggaggggaagtgactcattcacttcgagtcgcagctaagtggccgaactgcctcaaaccggcgctgcactctgacccccaggggccggacctgcctgcccccggccggtgcccactctccgtctcaggcgtctttcctggtcctctccctgcttcccgaacgcgcactctggtgagagcacagagcctgggaaagaagacgacctagaggcccgggcagcccagcacctctgttacttgcttcctaaagggaactccagttcctgagaaaacatggggttgggccgggagtggtggctcacgcctgtaatcccagcactttggaaggccgaggcggatggatcacctgaggtcaggagttcgagaccagcctgcccaacatggtgaaaccccgtcactactaaaaatacaaaaaattagctggacgtggtgtcgcgtgcctgtaatcccaggtactaggcaggccgaggcaggagaattgcttgaacccagcgaaggatgcagtgagccgagatcgcgccattgcactccatactgggtgacaagagtgaaacacacaaacaaatcaaggaaggaattaagggttttattgaaaatgaaagtacggccaggcgcagtggctcacacctgtaatcccagcactttgggaggccgaggcgggtggattacaaagtcaggagttcaagaccagcctaaccaagatggtgaaaccccgtctctactaaaagtaaaaaaaaaaaaaaaacaaaaaaaaaaacctagccggtcacagtggcaggtgcctgtaattccagctacttgggaggctgaggcaggagaaccacttgaacctgggtggcagaggttgcagtgagctgagatcatgccactgcattccagccttggtgacacagtgagacgccatctcaaaaaaaaaaggtaaatgaaagtacactccacagtgtgggagcgggcctgagcgtaggggctcaaaggccccattccagaattttggggagtttcaatgtcctccgcttggggcacacactatgtaaatgaaagggatgatgcaaagttacaaagtcatttacttggcctacgcagaggctatttcctgtcatagctaaagtgtgaatcggccttatgttccctgcctccagaccctattttgctgcctcagactgaagactgaaactggcctggttaggaagttgctattctctctctctgaaggtagattaacaacttagttttagttttgttaccggaaaagggtcccaatccagaccccaagagaatgttcttggatcttgtgcaagaaagaattcggggccagggtgagtccacagagtaaagtgaaagaagcaagcttattgagaaag

SEQ ID NO: 587120 - DNA, 4001 bp, Homo sapiens
taacttagcttgtaaacatttaaaatacttttttgaatgaacatatttcaaaagcaaatgtgtgtgagagagagaggagaaggaagaagaatgtttgttgtttatctttagggaagaggaaaacctagaagtttcattttctgttatatatttgatttttggtttttgggtttttttgtttgtttgtttttacaataagtttgcgttaattttaagatcagtaaagtcaacaaaattccactttgacaaaaagcccatgtaaagaaacactaatttatccttcttaaatgaaacatgaatgcccaccagtgctgaaagtattggaaccaagaatataatttgtgctcgatacacctgtgctgaattaaaacggtctgcggtgatgaggtttaatgcagaggactagaaggtcagggtagcctctgaaaaaagaaataatgtaagagcagctgagaaatggggaaagcttgggccaaaatgcagatgggcaaacaaactgaaaggcgggagagacaaaggcctgccctgggaatggctcagcagcgcttgtagaaatccagagtaagacattctttctattcaaggaagtcacaaagttttttaaagacccgcggttacagccaatgaatggaaccaatggtctttttaaccagaagaccccaggaaggcagaaaatgagccaaagaaaggccaggcaggggacagtggggaaaggaaacagggatggagaagcagagagggaagtgcagagacaggtcacccaggcgcctggaaactgcctctatggccttcacgggaaacggcctctttctactccggatcccagactgtgtttctttgaaactgaccgtcagaggagagcggctggaggcggacagacgtctgcagtgggaggcgctccaggcgttccaggcagtgtcctgccggcgagtcacccgcgaccgcgagtcacctcaccaagccctgaattgggacaggagacgagacgtgtcgacgagctgcggagttcctcgcttctctgggccctgccaggtccaagaacaggttgccatataaaagaatcgtgaagggacccccttccccatgcaaattatgtcatataacgcatatgcctgtgaagtttctctgcggagctgccagataactcgatgacaatattttatgcggtaacattttgttaaatgttgactcgatggccacttgacgccatctgaactctgaaagctcgcgtaacaatcatcctccaaatgaaattttacccccttctccctttaaaaggcggtggggacaaaacatcacttcgtcacttaagtcaccatctccttcctcttatctggggctcccagcatagttctaggggttcccgcactccccgcccgggtttgggctgcgagaagcgcccgcctgcgccctgcgggacctgaccctgccggctctggcttcaccctcgctgcgcctcggcccggtgggctccccgcccagagccccgcgcgctccgtcgccgggacgtgggagaggtaggcacggggtggacccgaggaagcacatcccgcccgcgcgcttcccccacgcccacctcgctccgcacacaccagccccagaacctcccggccgcgcgcccgcctccccgcgcagccgcgccgggccgctctctgctcctctgcagctcacagccaaggtgcaccagagcctccgtcaccgcccctacaggtaaatgggcacgtggccaaggcaggggacgggctagacccctgggaagagagaacggcgggagccgggccgcgggcgactcaccactcggcctgcgcagagagccgctacacccgcggcgccatcctcgcactgcgacaccggcgacaaacgcaatgctccagggccggacgaagggacggctctcgggaggctcgcagacggcggggcgcgggtctgtgcgccggagcactcgaatgagggaaccacctgcgaggtgaatctcatatggagtctgcgagcggccccgccctgcccgggggttaccgctaggctcgggccccgcctgccctgggccggcgaactcagctgaccgcatcctgggccatcccgcagacaagccccgcccgcccccaccttcctctgcccctctggccccgcctcccccgccttcctcctctccaccctcccgcgaaggtcccgggaggctcagcccgcaattgcttctcgcctctgcagagcagctgggcaattgtaaagaaccagcagccagttctgttactcattaaacagcccctactacagaggaaatcttcttacccacgtggtcctaacctggggcggaggaaaccgggctagaagcggctctaggactaacccaaggtcacgccgccaggcaggatccccggtctgtctgtctggcggtggccccgcggctggggccagcggagagaaatgacagcgtggaaccagccctggcccggtggtcgggaatgtggagctggcactgtcactgtgtgtaccctggatctctctggacggcctcggcttcccccctggggagtttctctgggaccttcctgatcctgggagttcccgcttgctggggcaaagccaggagctcgcccgaggaggggaagtgactcattcacttcgagtcgcagctaagtggccgaactgcctcaaaccggcgctgcactctgacccccaggggccggacctgcctgcccccggccggtgcccactctccgtctcaggcgtctttcctggtcctctccctgcttcccgaacgcgcactctggtgagagcacagagcctgggaaagaagacgacctagaggcccgggcagcccagcacctctgttacttgcttcctaaagggaactccagttcctgagaaaacatggggttgggccgggagtggtggctcacgcctgtaatcccagcactttggaaggccgaggcggatggatcacctgaggtcaggagttcgagaccagcctgcccaacatggtgaaaccccgtcactactaaaaatacaaaaaattagctggacgtggtgtcgcgtgcctgtaatcccaggtactaggcaggccgaggcaggagaattgcttgaacccagcgaaggatgcagtgagccgagatcgcgccattgcactccatactgggtgacaagagtgaaacacacaaacaaatcaaggaaggaattaagggttttattgaaaatgaaagtacggccaggcgcagtggctcacacctgtaatcccagcactttgggaggccgaggcgggtggattacaaagtcaggagttcaagaccagcctaaccaagatggtgaaaccccgtctctactaaaagtaaaaaaaaaaaaaaaacaaaaaaaaaaacctagccggtcacagtggcaggtgcctgtaattccagctacttgggaggctgaggcaggagaaccacttgaacctgggtggcagaggttgcagtgagctgagatcatgccactgcattccagccttggtgacacagtgagacgccatctcaaaaaaaaaaggtaaatgaaagtacactccacagtgtgggagcgggcctgagcgtaggggctcaaaggccccattccagaattttggggagtttcaatgtcctccgcttggggcacacactatgtaaatgaaagggatgatgcaaagttacaaagtcatttacttggcctacgcagaggctatttcctgtcatagctaaagtgtgaatcggccttatgttccctgcctccagaccctattttgctgcctcagactgaagactgaaactggcctggttaggaagttgctattctctctctctgaaggtagattaacaacttagttttagttttgttaccggaaaagggtcccaatccagaccccaagagaatgttcttggatcttgtgcaagaaagaattcggggccagggtgagtccacagagtaaagtgaaagaagcaagcttattgagaaagtaaaggaataaaagaatggcaattccatgggcagggcagcct

SEQ ID NO: 587121 - DNA, 4001 bp, Homo sapiens
ccaaatgtcaccaactacagggacacagtttaagccctactggctcacagaaacaccagtgaagcattaagtccacctctgacccatgtctacaaagtagtgtacttgggcaccaaatgcaccactattttttttttttttaaagcttcgttcagggcagccccacacaggttcagccaccctcaacattgcctccaggaggctctgcccaccctttcctgacaagggggaaaggaatgctgcaggaccttgaacccctaggtcaatcagcctggccttcccagggatggttccctgcttactctattcatgagctcaaagtgctgggtagtcagctggcaatgaaaaggcctggtcccggaaatgaccactgccccaaagcctagaaagacagcaggcggggttcaaattcagcttgcttcattcaggcccactgtactgagccaaatcaccccagggcatggctcaggcctcatctggaggaggcacgaaatccatgatcccggccccttagcaccgtcccctccccacccctaccactgaacacacacctgtaaagctctttgggaactgttctgaatggctatcacagccactagatccaagaccctctgaatgatgggtaacagtcaaagaagaattttaacaactaaagcgatgaccttgagcctaatttctttctttgtaaaatgaaagtgttggactgtcattcccaaatttcagtactagtaaaattatcaaaacaaaaaacaaaaaaataatgaattactgaggttttagtttgccaagtgagaattttttctcaaaaattacaaactatatgtgtcgccatcatttcctaaaaggaataacatttaaatcaaaaaagttgaaaagaggtaatatcaaaataagcgcagccaccccaaggcaggccggtaggcaatggccccgaccaaggagatcccggagcggctctccggctgtcagcaaagggtctgcatctgcccggatcctgacattctgggtacgtctcaacgacgcggcaaacaagcgtccactcccaacgcgagcaagtttaaaacccaggaacatcgataccaggcgccggagcgaagcatttccaggcctccgcgggttgccccgggccgcggcgaggacccgcaccccggttccccagccgctcgccgggccctcgctcccgccgcgccccgggcacctccgggcctcgcgccctccccggatcccctaggcccgcgtacccggacccccgcatcccgggggaccgctgtcctccgccggcgcccccgcccgccccccacgcccgcgcggccggtccgcccaaggtcggcgcgagcgggccgtgggcctggtgggcctggcgggcgggggcgcccctggccgggtccgggccgcatcccagaccagagcccgcaggccagagccgctccgggtcccgctcccgttcctgccggcagccgcgggggcgcagggcctgcgaggcggcactcacccgggcgacgccatgagcgcagcgaggtctccgctcccgcctccttcgcttcctccgcgcggccgcggctcggcgccggggaggggcctggcccgccggccgcccgcccgctccgggacgcgctccaggggtggaggtggggtgaggtggggtaaggtgggcccggggtcctctcggagcagcccggggacagctggggcggggtgggggcggggcggcccaggtcagcccgcagcccgcccaacgcccacctgcccaggtgcctggaggccggaactcgccgggcggtgcctgcggtgccaaaagctgtaggataacctgccccagggccttactgaacttcacacctttctgtaattggagtttaatttctgtaagaaaaggcttttctttagccctgaagcgtaaggccttattattaagcaaaacaataactttcctacttcttacttgcagtgctgtgttggacgagttgctggcctctctgagacggtacccattgtaaaatgtgtataaagtggccttgtgaagctctaggcaatgcgaagcacttttattattctttatagtgtgttattaagaaaaataatgaatctgcagttcctccagtgaggtttcacaactattcttacaagttatgagtccttaggcaggtagatttttcagcttcagttcttctctctgcaaaatgagtttccaaaaatgatctaagtgaaaatgcttaataaaaagctctggacaatgtaaaccattgttgataacatttttagtattatattaaatatcactggccgaacgcagtggctcacgtctgtaatcccaccactttgggaggccgaggcaggaggatcgattgagcccaggagtttgagatcagcctgggcaacatattgagatgaccccctgcccgccccgcccgtttcatttttaaaaataaaattaaagttaaaagtaaaatatcattaacaaccactatttaaaaatgtttactactattaagaatacaagacagcaaagcagtgattaaaaccttagctctgaagccagaatacctgtgttggaatctgggctccaccaattaccagccccaggagcccctgcaagatagaacctttccagggccacagttccttatttgaaaaataaggctaaaaataagtcccttcctctctgtgaagattaaatgaattaatatttgtaaacatttgtaactatttttaaatgttagtaaacattgcgtgatgcatggtctcttttcctcctgggagaatccagtcaatgtttctgagcctccttgtcctcttcggtaaagaaattcataactgctaccttgagttcagaagataattaatgctctgtaaatgggagctgataggtaaagccacgcgaacttgtgacacccaaaataaggacaaatccaggaggaccagagttaggaagagtttgaggaatgggaaatcctaaatcctaaatgcctgattcaagggagtaatgaaatgaaggagatcaaactaaaagaattttttctttgtttgtttgagacagggtcttgccctgtcacccaggccagagtgcaatggcgagatcttggctcactgcaacctccacttcccgggttcaagcaattctgcctcagcctcccagtagctgggactacaggcgcccactaccacacctggctaattcttctatttttagtagagacagggtttccccatgttggtcaggctggtctcaaactcccaacctcaggtgatctgcctgcctcagcctcccaaagtgctggggttacaggcgtgagccaccatgcctggcctaaataagcattcttttaaacataaggaatacatgtttactgacataaaatctggttcagaaaccaataaccccaaaatatggcactttaacaagctgaactgaagaagtctcaaggtctctctgatctccctccccactggtttctcccaaaacagaaaatgtctttatctgcttaaagtccagaccctccaaggagaacaactgtttttcttgccctccctgtaagaccaagaatgtaaccacacctgaaaagaccctttcataggatagcgtacaagttaatctctgtgccctgatccattccttctccctagtaatcctttattgccccttgaaagaattcctctttctcccctcctgtaagttgttttgccaagatggtctacaagcttctgaaccttgttgggtggtgggaaatcattctgtaattctccctgtgcacacattcataaaatttgtatgccttttcttcaattaatctgctttttgtgagttgatttttcagtaaatcttcagagggcaaggagaaactttcccgtggcccgtacacttaacatgaattttagcatcccactatatggttagaccatcatgtttaaccaacccctactgttggacataaatattgctaccagtatttcattattataaggaatgtgagtaataaatatccttatagccaaaacatccc

SEQ ID NO: 587122 - DNA, 4001 bp, Homo sapiens
tatttttgagatttgagacttcaaaaccaccatatacattattagcacataaataaccatttatatattcttacacaaatatatcaacatttataaaatctagaatcacttgttttatggggagggaaggccatgtcaataatgtaggaggatggatggcccatggactaacaaaaatttctgttgtcaatgtttgacaccaaggggaagtgcttgacttgggctgttcaatgggtgatgcttgagctggctttggaaggtgaatgctctagtcaaggaatgtagatgctgtggtgatggaaacacttgatagtcaggtgggctggaggtaggaaggagaaggtaaagctggaggatactttgagtttttgtttttttgagacagggtcttgctttgtctcccagcctggagtgcagtggtgccatcacaactcactgcaactttgatctcctgggctcaagtaagcctcccaagtagctgggactacaggtgcacaccaccatgcccagctaagttttgtattttttgtagagacggggtttcaccatgttgcccaggatggtctagaactcctggactaagggatccacccacctcaacctcccaaagtgctgggattacaggcatgagtaactgtgcccggccgaggatcctggattttgaaggcccctggatgacagtgaatgtgatgctgtaggccacggggcttccttgaagagttctgggtaaggatgcagtgtggtaagctttatatttcagacagttcatgaagttgtgtggaggacagattgggggaatgggagcgtgaaagccagggacaaagctgggcaactattgaaatgtctataatacattttatatgctgactgagtacaaacatagaggtgaccatgtgtcttggctggctggagacaattctagattacagcgttggtcccagagtaattatattaacagccactttcatgctcaaacatgtctcagtctgaagattaaatatcatctacatacacacaccaacaaaacttccacaattcttacctttactatgtgaaatgcactgatattttattctgtttttttatttttattttttattatttttgagacagagtctcgctctgtcacccaggctggagtgcaacagtgtgatctcagctcactgcaacctctgcctcctgggttcaagtgattctcgtgcctcagcctctcaagtagctgggattacaggcatacgtcactacgcccagctaatttctgtatttttagtagagacggagtttcagcatgttggccaggctggtctcgaactcctgacctcaagtgatccgcctgcctcggcctcccaaagtgctgggattataggcgtgagccacctcgtctggctttttttttttttttttcaaaaaaatgttggttgcaacctattaaattgatttcgtgacacactagttcataaccctcagtttgaacaactctgacctagacgcctgccaagtcttgggaaaataggaaggagacagataattaagtttgggagatgcatagtctaaggccagggttctcaatgttggcagtgcaagatcacgtgaggtacgactgaacacggagatctccaaaactgcggagagttttgcgtgtgaacgtatgcacagacatctacatggaaatggctgtaacgcatccagccataaggcgtacgagggtatatatacttacagagttaagaaccactattctcaggagttatatgacagcctgggaagacgcccaggatgtaggaacagggagcaggcgagcgtgtggcaccttgagggtgctccgcgcgtctccgtaaagccaacgagcccctcctcttcgctggcctctccggggccttgctgactagtggtcgaagccacaggaccaggtgcgggtggccagcgtaacccgggcagccccgctgcttcccctcggccgcgccaggacgctcggcacgcggcgacgacggccccacagtgccccgcgcgcgcaagcgcaggctgcggctcccggcgtgcagcttggtggcggctgagccggcagcgggccgcctcaggcagccccggccgggccgcccgggtccccggcagcggggtaggatggcgctaaagcggatccagaaggtacgcactttcccaccctccaactctttgggtgtccgaagcgtcgaggtgtgggcggggcgccgctgccgtgaagtgaaaggtgacggaggctccgcgagtcgcggatacacctgcctgggaaggaggcagaacagcctcccgcgcagcctgaaaagcgaacgcagcctgagaaagggattgcgcgagcgcggggcggggccgggccgtggccacgagggctgcgtcatgcgggcggggcgccgtggggccacctgcaggcttctggacagcgggttccccctgtagggtatccagaagggctgggtgggtatccagaagggtatccaggaagaagctgggtcctaagggatgagtaggaactcggcaggtggggaaaaggggaaaaggctttccctgcaacggggagactacgaggcttggaggactgacagggtagcggggaagctgaagggcagatggtgtggacttgggtggtccttaggagcagtgctgaagtaactggtttttatcctgcaggtaagagggagtccatgagggtttaatgcattcactagaatttggaaaacgcacaacagtagaagaaagaagtatttctaattctatcactttactatttgttaacattttagcatacctaccttcagttttttttctatatttaaaacaattatactgcattttgtattccacttattcacataatagtaaatgtaagcatgttgtgaagtagtatttataactttttttttttttttttttgaggtcttgctctgtcgcccaggctggagtatcgcccaggctggagtacagtggcacaatcatggctcactgcagcctcaaccttctaggttcaagtgatcctccctcctcagcttcctgggtagctgggactacatgccaccatgccagccaattgtttattttttgtagagacagtgtctcgatatgttgcccaggctggtctcatactcctgggcttaagcggtcctcttgcctctgcctcctaaagtggcgggattacaacgtgagacaccatgcccagtcctataactaatttttaacattaactttccacaagtacatgactagtaacttatttagtcattacctgtagtaggtaaaagtatggacttgggtgtcagacagacctgggttagagaatgtgaggtcacttatagtgggaccttgggcaaggcactttatcattcctagcctcccagtcctacatgtttacagagttgttttgagaattaaatgctatgaaatgtgtttagcacatgcttgctgtataccaaacactcaatacgagttagctgctgttattgttcaaaattcttcactaagtatttgctgttacgaactgtgtattagtctgttttgtgttgctataaaggaatatctgaggctgggtaattaataaagaaaagaggtttatttggctctcggttctgcaggctgtacaagaagcatggtgccagcatctgcttctggtgaggcctcaggaagcttacaatcatggcagaaagcaaaggagaagcaggcgtgtcacctggtaagagagggagcaagagagatgccacctcttttaaacacccagatctcacatgaactaatagagtgagcactcacttattattgtgggggggccaccaagccattcatgaggaatccgcccccacgacccagatacctcccactaggccccacctccaacactggcgatcacatttcagcatgagatttgggggggacaaatatccaaaccagatcaaccatcattgtacaatgagccttttccttaattcacattactgggtttgattgccagaggtggaattacaggatctctgaga

SEQ ID NO: 587123 - DNA, 4001 bp, Homo sapiens
tacataatatgtgcatagcttaccccacaaaatgaaataaagcaacagtcatgagtcacttaacaacagggatacattctgagaaatgtgtcatttggcaatttggtccttgtgtgagcatcatagggcaaacttacacaaacctacatcgtaaggtgtactatgcacctaggcaatatggtacagcctgttgctcttaggctacaaacctgtacagcatgttacagtatgaatactgtaggcaactaacacaatgataagtatttgtgcatgggaccactgtcatataacgtggtcctccgctgtcattttgtggtgcatgacttgtatactaaaggttttgagacctcagcttttgcaatggatatcccgcagaaaattatagattacaaactgcagactcatgggggtcacacaaataatcacaaccgcaaataccaaatgtcaccaactacagggacacagtttaagccctactggctcacagaaacaccagtgaagcattaagtccacctctgacccatgtctacaaagtagtgtacttgggcaccaaatgcaccactattttttttttttttaaagcttcgttcagggcagccccacacaggttcagccaccctcaacattgcctccaggaggctctgcccaccctttcctgacaagggggaaaggaatgctgcaggaccttgaacccctaggtcaatcagcctggccttcccagggatggttccctgcttactctattcatgagctcaaagtgctgggtagtcagctggcaatgaaaaggcctggtcccggaaatgaccactgccccaaagcctagaaagacagcaggcggggttcaaattcagcttgcttcattcaggcccactgtactgagccaaatcaccccagggcatggctcaggcctcatctggaggaggcacgaaatccatgatcccggccccttagcaccgtcccctccccacccctaccactgaacacacacctgtaaagctctttgggaactgttctgaatggctatcacagccactagatccaagaccctctgaatgatgggtaacagtcaaagaagaattttaacaactaaagcgatgaccttgagcctaatttctttctttgtaaaatgaaagtgttggactgtcattcccaaatttcagtactagtaaaattatcaaaacaaaaaacaaaaaaataatgaattactgaggttttagtttgccaagtgagaattttttctcaaaaattacaaactatatgtgtcgccatcatttcctaaaaggaataacatttaaatcaaaaaagttgaaaagaggtaatatcaaaataagcgcagccaccccaaggcaggccggtaggcaatggccccgaccaaggagatcccggagcggctctccggctgtcagcaaagggtctgcatctgcccggatcctgacattctgggtacgtctcaacgacgcggcaaacaagcgtccactcccaacgcgagcaagtttaaaacccaggaacatcgataccaggcgccggagcgaagcatttccaggcctccgcgggttgccccgggccgcggcgaggacccgcaccccggttccccagccgctcgccgggccctcgctcccgccgcgccccgggcacctccgggcctcgcgccctccccggatcccctaggcccgcgtacccggacccccgcatcccgggggaccgctgtcctccgccggcgcccccgcccgccccccacgcccgcgcggccggtccgcccaaggtcggcgcgagcgggccgtgggcctggtgggcctggcgggcgggggcgcccctggccgggtccgggccgcatcccagaccagagcccgcaggccagagccgctccgggtcccgctcccgttcctgccggcagccgcgggggcgcagggcctgcgaggcggcactcacccgggcgacgccatgagcgcagcgaggtctccgctcccgcctccttcgcttcctccgcgcggccgcggctcggcgccggggaggggcctggcccgccggccgcccgcccgctccgggacgcgctccaggggtggaggtggggtgaggtggggtaaggtgggcccggggtcctctcggagcagcccggggacagctggggcggggtgggggcggggcggcccaggtcagcccgcagcccgcccaacgcccacctgcccaggtgcctggaggccggaactcgccgggcggtgcctgcggtgccaaaagctgtaggataacctgccccagggccttactgaacttcacacctttctgtaattggagtttaatttctgtaagaaaaggcttttctttagccctgaagcgtaaggccttattattaagcaaaacaataactttcctacttcttacttgcagtgctgtgttggacgagttgctggcctctctgagacggtacccattgtaaaatgtgtataaagtggccttgtgaagctctaggcaatgcgaagcacttttattattctttatagtgtgttattaagaaaaataatgaatctgcagttcctccagtgaggtttcacaactattcttacaagttatgagtccttaggcaggtagatttttcagcttcagttcttctctctgcaaaatgagtttccaaaaatgatctaagtgaaaatgcttaataaaaagctctggacaatgtaaaccattgttgataacatttttagtattatattaaatatcactggccgaacgcagtggctcacgtctgtaatcccaccactttgggaggccgaggcaggaggatcgattgagcccaggagtttgagatcagcctgggcaacatattgagatgaccccctgcccgccccgcccgtttcatttttaaaaataaaattaaagttaaaagtaaaatatcattaacaaccactatttaaaaatgtttactactattaagaatacaagacagcaaagcagtgattaaaaccttagctctgaagccagaatacctgtgttggaatctgggctccaccaattaccagccccaggagcccctgcaagatagaacctttccagggccacagttccttatttgaaaaataaggctaaaaataagtcccttcctctctgtgaagattaaatgaattaatatttgtaaacatttgtaactatttttaaatgttagtaaacattgcgtgatgcatggtctcttttcctcctgggagaatccagtcaatgtttctgagcctccttgtcctcttcggtaaagaaattcataactgctaccttgagttcagaagataattaatgctctgtaaatgggagctgataggtaaagccacgcgaacttgtgacacccaaaataaggacaaatccaggaggaccagagttaggaagagtttgaggaatgggaaatcctaaatcctaaatgcctgattcaagggagtaatgaaatgaaggagatcaaactaaaagaattttttctttgtttgtttgagacagggtcttgccctgtcacccaggccagagtgcaatggcgagatcttggctcactgcaacctccacttcccgggttcaagcaattctgcctcagcctcccagtagctgggactacaggcgcccactaccacacctggctaattcttctatttttagtagagacagggtttccccatgttggtcaggctggtctcaaactcccaacctcaggtgatctgcctgcctcagcctcccaaagtgctggggttacaggcgtgagccaccatgcctggcctaaataagcattcttttaaacataaggaatacatgtttactgacataaaatctggttcagaaaccaataaccccaaaatatggcactttaacaagctgaactgaagaagtctcaaggtctctctgatctccctccccactggtttctcccaaaacagaaaatgtctttatctgcttaaagtccagaccctccaaggagaacaactgtttttcttgccctccctgtaagaccaagaatgtaaccacacctgaaaaga

SEQ ID NO: 587124 - DNA, 4001 bp, Homo sapiens
aacagcttctgatgatatataaaagttacaagagcattaaaacaacaacctacaggtggggcatggtggaccaagcctgtaatcccaacactttgggaggccaaggcagcaggatggcttgagcccaggagttgcagaccagcctgggcaacagtgagaccctgtctctttaagaaaaaaaaaaaaaattagctgggtgtggtggcatgtgcctgtagtcctacctacttaggaggctgaggtgggaggactgctggagctcaggagattgaggctacagtgagctacaactgcgccactgcactccagcctaggcagcagagggagatcttgcctcaaaaaaacaacatgaacatgaatcgaggttggatctgtgtggaggaatgagacttcacaagtgtttcctttgctttaaatactagtcttactcaaagctttaaaattcccagtctcttatatggtatgtctcccttgttatcaaatgctagaatgcattattctttcttcatttgtggagtttcactatttagacactgtggcactctgcatacattgaggtaataatattagcacgtttaaagagaaactgttacgctctgcttcttcgtaaacaatgtaatccacgttctcatagcatttccgttataagagaaaacacacacgctttaaaaagacaaaaccttcgtcttaattatacttaagtaaaccaaacgactggccttaaactttataaaccaaatacttactgtagacttgattcaaagatacagaagagaaagtgaaactgaccctaatttaaaacaaataagtgaaactgatcattcatatcccctaggcaatttgaatgagtgacaaagtaaaaagaattaggtttaaaatgtacaactcttcgaaacgttttgagaggccaccaaaacgagaacctaggattctgtggttaccttgaaaaggaggcgttaactagtttctcaaacagttttgctgtcagggtattgactttacataaccaacatgttttcccataaacaagtgaccccacggcctcctaagagtcattaacaaaagtcatctccactgcatgcatgtgagaggggttaaagtcctagatgggaaaacttgttccgtccaattttcatttccaacatctgcaacggatcccccgttccaggtaagctggctcttcctgccccgaaaataaaaaacgctagagaggcacacatgcttttggggacgcgccacccggcttctcctctcccttcggggtggccgctccgcccggcgtgggcacctcggactctccacggagcagccaggtggctaggcctggggagggggcgcccaaggtgggaaaactttgcctctgttagggatgcagtgggggcggggaggccggcccggggctctgagggggctccggggcgggaggtggcagccacgcggggggcggcgggcgggccggggacgccggactccgcggtcagcggccagcacacgcccaccccggccgccccgagcctcccgcctgcctgcccggcccccaggccgaaggggcgggctggggccgggtgggggtgggagcgcagtgtccatggcaaccaggggggcccggcctcgccgcgcagcccggctaccccggtgcccgcccgccgcggccgccgccccctccccagcggcctggcccgggcgggcggtggcgccgcagcccccagagcggcggggtcccgggcggcccgcggctgtgtagggggaggcgggcgaggggccgcaccagcccccggcgggccgcgccggctgaggggcggccgagccagcggcggcccaggcgagcgggccgctgcgcgggccccatgccggcctgcggcgggcgggaaggaggcgggagcttacctgacccggctcggcgctcgctccatccccctcggccgccgccgccgccgccgcacacagcccagccgcccggcgggggacaatgacgtgcctccatccgggcaccgccgccgccgcctccgggtcagcgccgcgcccgccgcgcccctccgggccgccggggggcgcgccagggccgcgcccgaacgcgccgccgcccaggggccgtcgcacaagaagcgcggcgcgcagctaacaagcacggcgagtgtgggaggggtcgtcgcccaagagccgtgggcgaaggcagacgtcgcgcgtcaccagagcgccggtcgggccggcagagggagcgcgctgattggctgggctggtcgcgcgtctgcgcgccggcgaaagggctccttccgccctgtgcttccctgggcagagccagacggcgcgcggcgggcgtaggactttgggctttcgcctcgtcctgcgcttgaccccagatgcgtttccagaagcggggcacctggggacgcaggagtctgggatccccgtcccccgaaaacggacttggctccgagaaatcctccgcttcgtgggcttcgccctctgcaactaccttgcgcctcccttggcctagcggacgcagcctttattttttgtttcttagaaacaaggtctgggccgggcgcggtggctcacgccttaatcccagcattctgggaggccgaggcgggcggatcacgaggtcaggagttcgagactagcctggccagcatggtgaaaccctgtctctactaaagatacaaaaaattagccgggcgtggtggcgcgcgcctgtagtcccagctactcgggaagctgaggcaggagaattgcttgaacccgggaggcggaggttgcagtgagccgagatcgcgcctctgcactgcagccctccagcctgggcgacagagcgagagtctgtctcaaaaaagaaaagaaaagaaacagggtctgtagcccaggctggagtgcaatttcacgacctaactcactgcagctgcgacctcccgggctcaagcgatgttcctgtcttagcctccctagcagctggggctacggacgcgcgctaccacgcccacttaattttagggtttttgtttgtttgtttttggtgtggagttttgttttgtagggacagaggtcttactgttgcccgggcaggtctaagattcctgggctcaagcagctccccctccgtggcttcccaaagtgttgggattacaggcgtgagccgctgcacccgactaattttttaagttttgtttttttttttttttttgtagagacgggggtctcgctatgttgcccaggctggtttccaacttctgagatcaagcgattgtcccacctcagcctcccaaagcgctgggattacactccggagccaccgcccaagacctgatgcagccttcaagtccgcctgaccccaccggtgcgccactgtccatcagactcacacactgagttacagaaagggattttctttttcttttttttttttgagacggagtttgctcttatggcccaggctggagtgcaatggtgtcatctcggctcactgcaacctgtgcctcctgcctcagcctcctaagtacctgggattacagatgcccgccaccacgcccggctaattttttgtattttgtagagacagagtttcaccatgttggtcaggctggtctcgaactcctgacctcaggtgtggaattttaaacctggctctgaaggggatagacccctgttcaccccgtccagattttatctcaaatcctagcattgtacaggcttaggagacaactggaccagttcttgctccagagtgccagatccacacatccaatcatttattggctgtctccacctcgaggcctaacagagctagttcatctctgcatctcccctccaccatgagcctgcttctccctgcactgattaaggacctggtattctgtgctcaccagacctttcctctctcactgcctctttccctcccctggtgatctaaccctttacaccaactcatgtttacctggcctccccagcggctgctgtcctgaccctccctgagtcagcctttcttcgctcaacaattccatctc

SEQ ID NO: 587125 - DNA, 4001 bp, Homo sapiens
cgtctcctcctgggagcgcttgtcctcggcgccggcttccccgtcctcctcctccgcgaacaggagcgcgttctgccgcgccctctccgcctcctccgcctctgcctccgcctcggccgcctcctcatcctcttcccccaccctctcctccccgccgcgtctctcctgctccgcctcctcctcctcccttgcactctctcgctcctccgccgcctcctgcagcccccgacccccgaggccgcgctgccgggccccgccctgcagcaaatactggagcagcaggtccgaggcgaggtcggccagccgctcttcctgcgccgcggcctgccgcgtggcctccgcctgccgccgcccggcctccacctgcgccagcccttgctggagaaggcgctcgcccgcctcggagccgcccaggagtgcgctctccggccggcgcgccttggggaacggggcggccacgccttggtacgccttggacaggggtgccaatgcctcgcctaggtgtgttttgggggaggacactccttccccgaacttgtgggtttcgggaaggggcccgctgtcgggcatacgcgcctggaattgagagggggccgggggcggcaggggcgcgcgctccgggacacgcgcctggaactctccccaggaagcgcgccatacgcgctctggccccgggctctccagattcactcgggtcagcgtgtgcgtgcgggtttccgtctctgctgccgccgtctcctgctggcgcttggcgctacttggactgaaatctcgcagttcctggagcagggacgctagcgcctcgagctcctcggagggatcgctcgcctcgggcccattctccggagtctgagggcgaggcggagccgcgggctccgggctctccggcgccgggaggctgtgggtctggctgcgcacggtctcggtcagcagagcttcagctgcttcttcctccggcccctgctgggagccgcttggtgccgggggtgaggcgggacggtcgagtgcctgcagcagcaccgcggccagcgcccggggatccacgccctggaaaagctctccctcgtcctgcggctcggaattccgagcgcctcggacctctggggcgctgccatcctttggcccgggcactgcgtccccggctaccggctctttatgctcagagctgagaggaggaggctgcgcctcagggcgaccagggggtgctgcccctaacccgttgatcagcagaaggcagaagagggcggaagccgacaatctgagggctttcatgaccaagaggctgccggagactgaaaaatagaagggaccaaaaaaagaggatttctgtaagaattcccctctctaggtctacgttcccttcccccacctttcagcaggaaacccggggcttccctgatcccccaaaccttacccagaagaggaacgtttaggagcaaaggaggaagatgttgtgccgatctctggagccgtgtaaatgggaaaataacccccgaagccctcgcttacccagggcctcctcggccccttccctgagccatctcactgccatcgcccacgtactaagcagcagcaatatgggggaaaaaaaaatctctgctccctccccgtaggactccccggatggtgcgtgggcgacttcagcagcaagagaaaaagctgcgactcccccgtttaccggggacccttaccagggggctccccgctgtgtttgcaacacccccatcgagaggagagagaaccctccctcacgcccacggctggctgccgagggtttgagggacgaacagcggagtatttaccagctggtgtcacgacgcgagaggtggagaggagggtcggggcagggtggggacaggggaagatcgggacgcgtccgcctcggctccgagcggtggccggggtaggagcgacggtcgaggtctggcgtcccgtgggctgggctcagctgggtcggcgcggctccgggcggctagctcgctccggcttcagcacgctggacagcgcccgcgcctccaccgccttataaaggggagcgcgcggggtcacgtgggcgcgccccgccccattgacgtcaatgttcattcatggggaagcgggcggccgcccggaggaggaaggacgcccgacgattggagggtgcctgcctctcccggcctgcgcctgcgcgctggggccttcggctgaaggggtgtgcgctagcggagctccgggaaatgaatgaatgaatgaatgaatgaaatgctgaagcgggcagggcggggggctatgaatgaatgaaggagggacgaggagaaaaggatgaatgaatgaatgggagaatgaatggaagggtggatgcagaggcgctggaaggcgggagggtgggttgcagagcaacttggagctgctggatggagcccgcgttgctgagtggaatagaaaaagggtagtcccagcgtctgactgggcaccagtgggagctcaatactggggaggggaaggataaagattcaagagccgaccagggggccgggttccccaccccgagaccacgcgcccaaggacggcgtgaacctgagtgcagagggacagatctgcacgcctgcgggcgctgtccgcgaatcggcagtgcgggtggcagccccctgacaggggcagatgggtggatcttgcggttttggtaatcccatcgggaagggtccgagtcggaagagaaaagggaaagaatgaggatgtgtgtgcctctgggtcgtgtctgtttcacgatccgtgctgtgtctggagaaaaaggtgtgtctgtccttctgtcccctgactgccgcttgtgtcaaggccccccgctgtgcccccttcggcccatctcttcccacactcccccagtcgctttccctcctgccgctcccctcccccaaggacgtttggagggcgagaccagagcaggtggggagggggttgcgcaggtggggggggggtgactcaactccagctctctccaccgcttaaagggaaggtttgaacgcgatgggagggggacctgcaacgtcagagatagcccctctctgccaccagccccttcgaccgtatctcctgccagagaggttggggctgggggcttggacagctagaggttccgggggtggggggcgatgacgcacagatttgcgcaaagagaatccatcagagagctgggtccggtgaagggagaccagccgtgggcgggggtgggggggaggacggaaatggggagggggcaggggagaggagagggtggcaaggggggcagccactgcaggaatgaaggggagggagggaggaagcctggagggggctgcggtgctggcagagagcggtgcgggggcgtgggcagggaaggggggaatgacaatgacacacgccagacacacacgaactgcggacataggggtgctcgtgggcacacgcagggcacccgcaccctgagactctggaaaccaaggtcagggctgtctgtcagggtcttagagactctttcagaaacggtcctcgcccccctcctcacctcttcctggcactgaccctccttctaacctccccctccctacacacacactcacgtgctttctctctataaccagcagtggcttctcgcttccatcagtggctcgactttcccagaagaaagcccatcagctctgcggggaaagaaatggggaggagtggagagggagaaaagagagaagagatgggggcaggggaggaggaaggaatgaagggatctggaacaggtagaaggagcaggctaaaggagaaaaaaaaactgagaaccaaggtgacagtggagattccaaagaaaggagggaaaagagggggtaggagaccccgaggcgatgcctcccatccccacgcacaactaaccacggcctcccctccttcctctccccgcccccatgtccccttcatcttcccagcctggatacagagagcagtgggatggggagggggtcacgttaccttcctgaggaggatgaatcagagagaga

SEQ ID NO: 587126 - DNA, 4001 bp, Homo sapiens
gatagaagggctttatttttaaaggtgttggtacatgttcaaagcttaaccctctaactacagataaaactgcaatcgttttgactagaatttggggtggaagagatattcaaagaaatcagcaagatgaggagggaggcagaggtgggggaatcacaccattgtggccccacagagaagagggggcgatttccagtcaggatccatcaggggagcgaaaggtgccacaaagatagtaattaacagtctactaatgtgagaagaaggcagaactacacaatgcttcctctcagaaggcaccgtttctaccttgttcttcacgccctccgcgaagtcagcacaggcctgccaagcggcccttgggggcttaaggagggctccccccacccatccttttggtcttgatcttccccctcccccaccaccgaccaaaattctacttgtactaaagtagtaactaaagagaatcatactgttgggcgtactatggccatctatgtttagttatcttactattgaaatggtcaatgagagttccaaccaggaacacaatatcctaacagaattaaggggaaaacaatgctggaacttctgccaccttcagccccatttaaaagagccccgagcttgcttcttgctcgtgactgaaccagcaccaggcactgactttgggctccaagtcctctgttttcatgcaggacaagtaagtggcttaaatttcagaattaaggaaattatattgatgtaaaaagaaaaactttgttaaagtgtaaaagacattaataatacctgacgttcctggaatatgcacagcaatgacttcttttaggacattttagcaatgaaagcagcattaaccgtgataaaacccgttactttccaaggacccgctccgcaaagcgcccaccctcgagggaggaaagccgagctgcgcctccgcgcaaggccagggagtgtggctcgagccccgctgcagaccgggcgtcgccggttaatcaatgacactgtcgggtcagcagcgcagcctcccagctgcggaggggccgcggatcgatccagacctgcctcggctgcgacgcgcacgaaaaccgcgcgcaccgcaaacccgcttcagtctccaagaggaaagcaagaaacaaggctcgggtttttttctttcttttttctttcctttttttttaaggttcacagagggaataattcagaactccatgtgcgaaggcacttaatcaacaaacttatgagcagttagttcctccagtgcccttgggaaaaagcaactatttccaaaaggaaactttatttaaccgacgccacgtccccccgacactaaaactaaccagtaagtacagggagggaccgagaggcatctgcggccaacgccaaccccgatctccccgtgaaacgcgcagcccgcgcaggcgcccgcagctcccagctcccgggacggccccgaacgagctcatcgttgacgcgtccaggaagaaacgatcccgtttccagcaaaccccggacggtggggcgcggggaagggcgcaggcagcctcccaacccgagtcccgcaacccggcgggaccggagctcagcgcttcacgctctccgggaggaagctccggaccccgggcgaccccgctccctctcccggaccccgcccgcgctccagcacccgggaggaaggcgaagaccggcgggaggagcgctcttctcggaaggggagaaccgggtccgaggcgccgtggggcgggggtcgcgggcgcactcacgggggcgagcagccagcaggtcagcagcgcgggaggcagcagcgtccgcatcccgagctcagcgtgccgggggccgcccagcgcccgccgcctccgtcctaggtccccgcggttccgccgcctccagcatgggccgggagcgagtgcgcggagacctcgggccccgcagctgtagccgagcgcccgagcgcgggggccgccccctccgtcccggcagctggagcgcgctcaatgcacgcccgtcccccacgcgccccgccgctccgccccccgcccctgtccccgccccgcgctgccccaatcctcgtctccctcctcccccgagaacccccgctccgcgcccctcctcaccgccccccacttccccttccgctgcgccccgcgccctctcctcgcccctgggctctctgtccccgccgcgcgcgctccctctggtctcctcgacccccccagcctctctctccgttctcctcccctcttccctggcccacgcccccctcccggccgcgcctccccgatctgtgggcggaggggctgggaagcggggtgctcagtgcgcgcccggctccgagtagagagaactgggggagagcggccggcgcggggccgggagaggaggaccgggccaggtgtgcgctcggaaggggcggatgcctttgcggccgcctgtacctgcctttctaaacaactgcggaagcccaagaaagcggccagagacccgtccggggtgggcgcgccgtctttgtagccagtggggctaggttggggcatctgaaaatggagaaaatcagagtgctttttggtggggatccccgcagcctcaaagaggacatcaggtcgaacagaaagctggagaaaaacgcagacgggggtataggtgggtcccagcctcagctgggtggcgggttttgtgtcctgcgtttgcaaaacgggggtcattctctccccgcaaacgcggcggcgggtggggaacgctgggcggggactcacgcggtgccactggggccgccccgccgcgccccacgcgggactgcgcggcctcccaaggcgcccgcgtgaccaacccaggagagctcggcgttccccagcaagtggaaagcactggaatgagagatacaagttaagttcgtgttgttttaattttttatttggaaataatttcaaacttacacaaaaattagaagaataagaatattacaaataactcctttttatcctttttgtggattcggtcattaacatttacctcattgggcttatcatttgcttctctctgatcccccaccccccgtattcacagatatcgatttttctatcatctgatgtttatcatccacattatctatcatctacctatccatcatctacgtatcatctatcgatctgtcatgtacctatcatctatcatcttcctatcgatcatctatctgtaatctgtcatctattatctgtcatctatcatctacctgtccatcatctacctttcatctatccatctgtcaggtatctatcatcatgcgcctatcatctatcatccacctttcctctatcacctacctgtcatctattatctatgatctatccatctattatgtacctatcatctatcatttgcctatctttcatctgtaatttacctatctataacctgtcatctacctatttatcatctatcatctgctgtcatttatgatctatccatctatcatgtacctatcatctctgtatcatgtatcaatcagctatcatctacctatcatctctctgcgatctattacctatctattacctaccatctacctatttatcatctatcatctacctctctgtcatttatctatgatctgtcatgtacctatcatctattatcttcctatcgatcgtctatctgtaatctatcatctattatctgtcatctatcatctgcctatccatcatctgtgatccggcatatctgtgatctacctggctgtcatctatcaatcacctatcatctgcctatctgtcatctggctggcatctatcaatcacctatcatctgcctatctgtcatctgcctgtcatctatcaatctatcatctgcctatctgtcatctgcctgtcatctatcagtctatcatctgcctatctgtcatctgcctgtcatctatcatctgcctatttatcatctatctgtgatctatcatatctgtgatctgcctgtcatctatcagtcatctatcatctgcctatttgtca

SEQ ID NO: 587127 - DNA, 4001 bp, Homo sapiens
aaaacaagttgatttgtaaattcatttattaaatgggtagtttataagctacttgatttttgcaagtagtttataaacaggctgatcaaattgaacaaatttcttaatttcactgtatacatggcaaataagttatctactcttcttattagcaaatcttatttttacctaccctcctttggcaagcatctaagttaaactattttatgtccacagctacacaatgaaacatcactttcagtcacaacatattaaattcacatttaaaactataaagagatccagttacctttagtcttacatgtacttatacatacttttaatatactacttgatgttttatgcacaaacatgcagctcttgcaggatataactatgagaatatttagagtgtatgctaaatacacttttttaaagacaagtcaatttttaaaaattatttatttatattttatttatttatttgagatggagtctcattctgttgcccaggctggggtgcaatggtgtggtcttggctcactgcaacctctgcctcccaggttcaagcaattctcctgcctcagcctcccgagtagctgggactataggcacatgccaccacacccagctaatttttgtatttttggtagagacggggtttcaccatgttggccaggctggtcttgaactcctgacctcatgatccacccgcctcggcctcccaaagtgctgggattacaggcgtgagccactgtgcccggccaagaaaagtcaattttaagcacttaagcaggccaggcgcggtggctcatgcttgattcccagcactttggaaggcagaggtgggtggattacctgaggtcaggagttcgagaccagcctgaccaatatgctggtctcgaatatgctaataggcaacaacgtttaaaagtcattccaatgcctaaaacaccaccatatacataacatacttgtcctttactccaatgaagcttaaactagacccaaactcagaccatttccttctcctggcacactgaaacatacgagagggaatccaagaaatcagatatgttaagtgcgggtatcttcttccacagtagggtcaaattcgtgtttgccagcaaatgtcaccgtcccagttaagtctgcaaattctcactagcgctggagtacaaagaggcctgaccacggaaacacctgtcctagcaccaggaagacagtgggaaaggcaacccccctgtctccgcgccggccccaaagcctcggctgcagcgatcggggggacaagaggttgccgctggtctcaagggtgcggtggacaaggtcccacacccccggcccgcctcccgagaaccaggaaacctgtcaagccagcctggacccaccctccgcagccccctcgcgctcctgcacagccgggccccagcccgcccgaccgctccgcgtccgccccggcctcccggctgcactctgccacctcatccctccccggctgcctcgcggccccgccacctccgccccgcggcctgggctcaggccgccccccgggcaggagcgccccgccgccgccccccgcctggccccgacccgaccccgtcagttccccagcggcccggtccccgccgcccccaggcctgagctcccgccgcgcgctccccaccccgagactccaccctcgccccgctcggccgctcctggcccactcccccaagccggctacctggaggcaagggcggcggagcacttcacccagggccccaggtcgcagagggcccggtgctcggggtcccgctccttctcccgctccacgtggtaggcgtagatggagagcaggattccggcagcgcacactgcataccgggccacccgctcccaccgcggcaccgacactcttagcaggacgggagccgccatcttcccgccgccgccgccgccgcctccctccgcctccacctcagccgccgccgcccgtcggggcccgacccagccgccaccgccgccaccgccgcctccgccgccgccgccaccaccgccgccgccgccgccgcgccccattggctcggtggcctgctccgggccccgcccccacaggcgcgcggcccaaccgccccaaaaggagtgaggcggacggggcggggaaggcgcgcgcgggcgcggagggagggggtggagtgcgcaacggccgaagaggccggatcggcgggcggagactgaggcggcgtggcgctgcgccgcgcggccggtcgcgcgcgaggggtggagcccgggggagaaaggggtggggcaggggtggggatgggcggggcaggggtggggaggggcggagccagagaggggcggggccgagcgggccagtgcgggagggacttaaaggagcggtctaactagcacattgcaaggatgccactgtgggtgactgggcgaaccctcggcccctccctctggggatggcaatcaattgccatcctttttccctttttcgttgtatatttctgacccaatccaaatcaaccctggccaatgcttggagctccagagacccacacctatgacctgatcttcccaccaccaccttcggttagacctgtgcaaaactttttttttaatgtgcaaaactatgttttaaatttaaaaactatttttaaaaaatgatttatggaccgggtacagtggcttacacccgtaatcccaacactttgggaggccgaggcaggtggatcacttgaggtcaggagttcgagaccagcctggcctacatggcgtaaccgcgtctctactaaaaatacaaaaaacaaacaaaaacaaattagcccggtgtcgtggtgggcgcctgtaatcccagctactcgggagactgaggcatgagaattgccggaacccgggaggtggaggttgcagtgagccaagatcgtgccactgcactccagcctgggcgatagagtaagagtctcaaaaaaaaaaagagagatttacgaatgccttgcttttccgtaagctgaatttgaagttgcttaccataactcatataatatagaaaaataaagatgagctaatacaatcaggacgaagaaaaagaaaagtcagaataaaatgaaaggccaggaataagaacacagataagcaggccataggggcttacatagttattaaaattgcatcataaatttggctctgagcttcctggtggccaaaactaaaaggaaaacagatgtatgtgctttttctcactgtctttaagaagaaacacagggttcttggagattttcagtgtttccctggttgcagctttcaatttttcaggggctttatatagtgattttgaataataagcaatatccttgtattcgttatctattgttgggtaaaaatcaccccaaatttagcagttaataaacaataaacttttttttccctcacagtttccacgggctaggaatctgggtgaggttagctgtgtcctctggctcaggctctcatgaggatacaatcaagctgtcagccagggctgcagctctctcaaggcttcagaatcctctttcaaactcacttccactgctgctggcaggcctgaggtcctctctggctgttggctggagacatcatttcctgtccacttgcacctcttggtaagaagcggcaggcttaccccagggagagggaggagaaagaggaagagacagaaaaagaaaatgagagtgagatcacagtccttttttgaaacctaatcccagaagtgacatcccatcacttttacgaagtctattgctacttagaaaatagtctctaggtccagccagtcatggtggctcacacctgtaatcccagaattttgggaggccgaggtgggtagagcacctgaggtcaggagttcgagaccagctgaccaacatggtgaaaccccgtctctactaaaaatacaaaaattagccggatgcggtggcacatgcctgtaaacccagctacttgggaagctgaggcatgagaatcacttgaacctgggaggtggaggttgcagt

SEQ ID NO: 587128 - DNA, 4001 bp, Homo sapiens
tatgaaaattgcgcagaaaatggctggaaggaaaacatgacctattttcgtgtctgtatatttttctactttccaattattccacaattagaatgcattaggcttattttcataataaagcaattaaattttagagtcagaggctacactggcttgaaggaatcagggcaggcttcctggagaaggctgtatctaaaatgagaactaagagacacacaggacagcccgagaagagggaagggcatggtgacaggcgaaggggcacatgacagcatgaagacactgagtgctctggttgggttggcaaattatctccctgttatgcagagaaaacaacaaaccatgagccctaccatcccgcagacataacttccctcatcagccatagcattcttccagacttctctacagcaaggcactccaggctgtcgctaccaagaagacaagcaaggcttcatgtgaaataaacctatttgccatgcttgctgctgtttcatcactcctagagtcaatggaagttttcactgacatcaaagcaatgtcctggaatgttagggcgtggagcaccagaaccccacgtgcacaccgtacacctgtgctggcaaatacgtccagcagggctgaaacagcacaaaatgctttcccttcaaaatcgggttctgagtgctccccaaagcatgcctcgaaagtcaattctcccatcagacgcaaataattaaatgcacaaacacttggtgtttctttccctcaggaaatctgtcaataagctctggtctagtttttccatttctagaaatggaaaaggtcaccttgtttttcccccttcccttaggaaaaagggaaagaaactccaagtggggaagggttcaacacggtcagggctgaggtggaggaagagggcctctctttcatcttacacgcagtgggagggaaagcagaaaaaatctgaaggaggaaattatcaaatacaaaatacatgttgaaggctgggcggggtggctcacgcctgtaatcccagcactttgggaggcccaggagcgtggatcacttgagatcagcagtttgagaccagccgggccaacatggtgaatccccgtctctactaaaaatacaaaaattagccacacatggtggcgcatgcctatagttgcagctacttgggggtctgaggcatgagaatcgcttgaacctaggaggcagaggttgcagtgaccctgcagcctgggcaacaagagtgagactgtgtccaaaaaaaaaaaaaaaaaaaaaaaaaaggtgttgacaaggtgtggaggtggagggaaagccctgggagccaggttagccaggtcagggaccagtgaccctgtggaaaaggaagcagtgggcctacaagggttgaggtctgtgcctctgctagttattaacatgcactgcatgggcaaggcagtccactgagggactgggtaagatggacaaatataagcaccttttggatttagaaatagcaatgacagaaagaaggtaatttagctgattttaaaacctccgtacaaaatgcctctcctcccaagaagctcagactatcgcaaaatgctgttctcttcataggaatggggtgggaaatagtttcccatttctgtcttaaatcaaatggctgcctctatcagaaagcagatgacacatattaaggatgccagctaccccttattagacacccattatttttcagacctacacactcacacaggatggatctccatgcttacacatgcccagcaacacaagcatgattttcccagggtgacaaatgaagtctaggaaaacgctaagtgattgatgcctcaaaagaaagtgctggaaccaggtctgtgtggctccaaagttgcccttttcctaccatatgacaccgccttccaacaatggggggcactcaggtcctggagccccagcccctccgaaggcaggagtctggtcgccaggttgccggcacacggagttcacgcagagaggcagcaagtggagcctgttctcctaggaaacctcccatgggctgagtcactcagccatgctcaacccagaaaggtgacggagcactatggcaacacaacaggatttcctcctagactaaactcctgaacccgaagaaaaaattatacgtgctgctagctgcaaattgctgacaaatgctaaggcgctgtaggaaaagacatgcaaccgaaatctgtctgctgcaccattccaatcaaagtcaggtgggagctttttgtctgagtttcagtgttattgctacagcaaaaatgacaaatgcttgacaatataattatgactgtcaatcttcctaaaataaacttggaaacattcaaagagtaacagtataggcagacaagttaattatatctcataatctcatttccaatatatgtgttgccctagcaggaggcattgttggaaaggagctgcagttcctctgttatacaggctatttttatattttagattcatattttagttccaacacctaacaggattttattggggagaaattttcatttctacttttgcagtacttgggaggagtcaccagtaaaaacctctttaaggggactgcttcccagagtgaggaaaataaaaagactagcctggggagcaacgggctgttttcccatgttgcagacccaaaggtcactaggcttggctgtaaactccaattcatttaccataaaataaatattatttagatgatagatctaggcctaacatttctggttttcatttaaatatatcccttaacgaaaccaatgatacaaattaggggtcaaaagtaaatacttttctcaacccttccagaagcccccactccctgacctcaatccctgcaaccccaccccacccctaccacacaaacaccacgactgcttccttccatcacatcccagataaagagctccgtcctcaagacctggttcccctgatatctctgtgctcccttcccctgcactctacacacacacacacacacacacacacacacacacacacacacacacacactcaccctcttcctaggcctagcaacgaggcatcatttcctttcagattgcagccgcacagcagggctgctcccaagtctctcctgttcagctgcacaggcttgcactgcacaactcaggggacaacatttacaaagaccatgctgaggaaggcatgtcctggagggatccatcatggcaaccgtagctgctacctgccctgctcaagacttacgatattagacctctttacttaccatccttcatggttgccaaaatgcaaaagcttatccaaaattgtgattactggtaaagaagagagacagagaggtatgccagtaagagttttatctcttattgagagatagtccctaaaactttccaagtggctggtcaatcctaaaatgaaacaaggttacacatgtgtgatgcctgctgcctccttatctaatacagcacctggttcagggcaagggctgtggagttgccaaggtcaggagagggcaggtctatctcgttccatccaggatctcacagggcactgaagagcactgggaactaacttgagggtggctggaatttttcccataggccaatagggtaccattagtggatttcaagaagaaaagtaacagatcagacaaaggtttcaaaagctcacatgggcagaatggagaagaaacatcccaaggactgtacacgaggaaaatggcctggactgagtcaggaatagagaaaacggggcctgggagaggcacattctagaaactttgagtaaaaaattgcagaacttgggttgccgaggatgtagggatggtgaggtttctggagcactgtcctggatgggaggcagtgccatggactgacacagaaccaatgggcggagctttggggaaagggtgagctctgcttcagatacactgtctgaggcctctgggccaccctggaggaggtctctgttagacaactgggtcgataggggctggagct

SEQ ID NO: 587129 - DNA, 4001 bp, Homo sapiens
gagcacatggcacgtggcaggactgaacaatgacactgatataaaaacaactcgtgttcacaccaaggagcactggcccaggcacggagcgtgaccacaggggcggcgtgctgatcctggctcaggcagcgcatctgccacacggaagggcgcaccgtacccagtctggttgaggtgggcacccagcctcactcaacagggcattcaatgtaagtgcccacaaatgcaagagacagtgaacagaatggcagccagaccgcatgaaacgcagagctcttgaggcaccaccaggggaaggtggggcctccctggccacaaaacctgagacttcaagtcatgtctgagaggctgagaggattaaggaaggggctttggggaggggccagacattttctgacgagaaacgcaatgcagatggtgagtccaagatctctcggcctgacctgtctaattccctgaccctggactgtgcctgcgtggaaggctctgcccctccgtcccggcagcactgaccctgccctgtcccaaccaggcctgcatacccttccttcagctgaacacacatattttgtaccccgaacacccacagcgtgcagcaacatctgggaagccaagcaggaatctcactgacgtctctcacacacctcagctggcactctgcccccactgctggctctggagcaagcagaggccaacaagtcagaccactgatttcgtgctccagccttctggaggtaacacataactgcccaccatgctcttctttcccagaactgaagcccaaactctgggccaggcttcacagcaaactgaaccaccagccgagcaagcacctgagcatgtgagcccgtccttcgcattctgttaggcgcaaggatgcaggcagcgcacctcctcgccagccagtcgcccacggtcctgtcactgctgggtcacacgcagccctccaatacggagcacacataaataaagctctggcgcccgcagaccctgcagtatcctcctctgttgagtggtgagaacatctaccatggaggacgctacaaggattcaagaagccagcgcttgtgacagtgtgaaaagcaggtccggcccccaggcccaggccaccaaggaacatgcacttcccacagcccccacttcccctccaacttccactacttcaaacccatgaaagggggaactgcccacaaaagttcattctcccccaaaccacttactaagtgccaagtggccccaccaggcagagatggaggccagcgtgaatctgggctgtctcctgcccacctgccattcctctccaccagccagcaaggaggccccaggagcccccattcagctcacacacccagatccaaacactgcctccagcctggcccgaccacactaagctgccctctgcctctcccactttagggcttcgagacacctctttcaccagctgaactggtggaaaacttttcctgctgatcccctctagagaccgctctcattgcagaagtgtttctggaacacgaagtattgcaaagtcagtctattttgctacaaaccactctgagtagcgatttgcaaacaccatcccttatgcagtccgcacttaggaactctcttctccaactgagctacactctctggtccttctctaggtccaggtaaagatgtagccagtccttccagtctgcaaagcattatgaagctgcaaagaatatatccaacatcttattcagacttattcttgaaatgaacaatgtttcgttctttgctaacttgatgctcaaataccctctcaaaatctaaacacaagcccttcctgccaggctacacaaaccacacaaaaagaacaaccctatggtccaaagactgaggattccacagtccaactgaggatcactgtaaactgctttacatggtttaataacaaacataataatccatctatacaaacctgcaagagcacagaagacagatacccaagagtttcgctgagcattgtgtgtaatgacaaaaacagctacaaactacttagctgttcatcaagagagggcggattaaaatgagtcatggccattcctataaaggaacgctttctaaggggaatgctgtgggtttgagctgctgatgaggaaacatctccaagcaacatttcttaaaaaaaaaaaaaaaaaggagaaacaagatgcagaacactgtctataatatgatcccatctgtgtacttttaaccaaatatttgggtatacaatcttaaaaaaaaaagttgcacaagaaacttatcagagaggtatgcctctttctctgtagagggtctagggttgagaaggtattggggagggaaaggtttcattcctttttgtttcattcctttaaaaaaaaagggggggggggaggggcggggtgccgggtgtgatggctcacgcctgtaatcccagcactttgggaggccgaggcaagcggatcacctgaggtcaggagttcaagaccagcctgggcaacatggtgaaaccccctcctccactaaaaatacaaaaattagccgggcatggtggcacacgtctgtaatcccagctactcgggaggctgaggcaggagaatcgcttggacccgggaggcggaggttgcagtgagctaagatcacaccattgcactccagcctgggcgacatgagcgaaacttgatccccccaacaataacaaaaaaagtacgtgtatttattgtatttaaaaacttaaaaccaccaaatcaattatctatgagaaaaaggaacaagatcaacacatgaaatccccagatgatttaagaattccattccacttggtactcaccccttcatcccaaagattcaaccaaactgaattcagcttctccccattgctctctccctgcctgtccttaaaacaaaactaatgagctgttaaagggccacatgtgaggctgaaagggaaggaaacaaagcatgtgaataattcacaactggatcatcagccccgctgtgagctcaacagcccctgacacggatggagttgagtccctctggaggtggcatgctgaagggagactgccttcctgcgtggacctgggacagaggtggccacaggcaggctcagtaagtggttgctgaaccaactatatggacaggaaccaggactcaatggagaaacatgttatatatacacacatacacgcatatttgtcatacacacaacataacaaacgggcgcataacataagcgctgcacacacacacacacacacacacacacacacacacacacacagcctcccaaataaggaaacagcaggaacactcatgaattaagacagataatccccaacttagggatggtttaaaatttagggctcattttctcacggaaatgatggtataaatgttggcgaacttccctggctaggtaacacatgtctgtttagctcataaaataaatgaactcccagccaggcgcagtggctcacgcctgtaatcccagcactttgggaggccgaggagggtggatcacgaggtcaagagatcgagaccatcctggccaacacagtgaaaccctgtctccgctaaaaatacaaaaattagctgggcatggtggtgcgtgcctgtagtcccagctacccgggagactgaggcaggagaatcactttaaccctggagatggatgttgcagtgagccgagatcgcgctactgcactccagcctggcgacagagtgagactctgtctcaaaaataaataaataaataaataaataaataaataaataaataaataaaaataaatgaactcccattccgtccttgtgtttgattgccccagactgtctgctgaggagaccccatgtgccctcagggaggctgcctgtttagacctctggccgtcaccaacattgctgtgcttctgttctcagcagcttcaagggctgacctccacctggtgcccagccgagtaaacacgtggagcataagttccatgtgtatggactcagggctcctccag

SEQ ID NO: 587130 - DNA, 4001 bp, Homo sapiens
acttcagcttacaaggaatcttcccttccgtgaacttatttggtcctaatgagaccatgggaaggagtgggctgccctcaaccagcagacatgctcagcactgtgtctgccatcccaggatgcagttggggcactgtccctctgtgcagaggctgggcaggcagacatcaacttaccgcaggtctgagactatctccaaagacagtgttctttccttgatgacgaccgactctttcctacacctgacccacactctgtgccaagcaaggatcatgcactcagggccctggctcctcctgcagggttgggtcttcaggagctcctgaggagtaagggccctgcctcggccaccctgttggccccagtgcctgacccaggccaagcgttcaggaaacctttggtggaaacgctcacatatccacttccttctctgcctgctcaaaagttgtacttggatttgactatacaccctgaagtatggagactggccctgactgccaggatacataggctgattaaaactcaagcaaggccgggcgtggtggctcacgcctgtaatcccagcacttcgggaggccaaggcaggcagatcacctgaggtcaggagtctaagaccaacctggccaacatggtgaaaccccgtctctactaaaaatacaaaaattagcccggtgtggtggcgggcgcctgtagtcccagctactcgggaggttgaggcaggggaattgcttgaaccctggaggcagaggttgcagtgagccgagattgcaccactgctctgcagcctgggtgagagtgacactctgtctcaaacaaaaaaacaaactcaggcaagatttaccaccatgaggatagagaacttaggagcacaatatgctgatggggacaaagagaacttcattgtgtctctcaaaacattttccaagaggaagacgggagagaatgagggcagagcacatggcacgtggcaggactgaacaatgacactgatataaaaacaactcgtgttcacaccaaggagcactggcccaggcacggagcgtgaccacaggggcggcgtgctgatcctggctcaggcagcgcatctgccacacggaagggcgcaccgtacccagtctggttgaggtgggcacccagcctcactcaacagggcattcaatgtaagtgcccacaaatgcaagagacagtgaacagaatggcagccagaccgcatgaaacgcagagctcttgaggcaccaccaggggaaggtggggcctccctggccacaaaacctgagacttcaagtcatgtctgagaggctgagaggattaaggaaggggctttggggaggggccagacattttctgacgagaaacgcaatgcagatggtgagtccaagatctctcggcctgacctgtctaattccctgaccctggactgtgcctgcgtggaaggctctgcccctccgtcccggcagcactgaccctgccctgtcccaaccaggcctgcatacccttccttcagctgaacacacatattttgtaccccgaacacccacagcgtgcagcaacatctgggaagccaagcaggaatctcactgacgtctctcacacacctcagctggcactctgcccccactgctggctctggagcaagcagaggccaacaagtcagaccactgatttcgtgctccagccttctggaggtaacacataactgcccaccatgctcttctttcccagaactgaagcccaaactctgggccaggcttcacagcaaactgaaccaccagccgagcaagcacctgagcatgtgagcccgtccttcgcattctgttaggcgcaaggatgcaggcagcgcacctcctcgccagccagtcgcccacggtcctgtcactgctgggtcacacgcagccctccaatacggagcacacataaataaagctctggcgcccgcagaccctgcagtatcctcctctgttgagtggtgagaacatctaccatggaggacgctacaaggattcaagaagccagcgcttgtgacagtgtgaaaagcaggtccggcccccaggcccaggccaccaaggaacatgcacttcccacagcccccacttcccctccaacttccactacttcaaacccatgaaagggggaactgcccacaaaagttcattctcccccaaaccacttactaagtgccaagtggccccaccaggcagagatggaggccagcgtgaatctgggctgtctcctgcccacctgccattcctctccaccagccagcaaggaggccccaggagcccccattcagctcacacacccagatccaaacactgcctccagcctggcccgaccacactaagctgccctctgcctctcccactttagggcttcgagacacctctttcaccagctgaactggtggaaaacttttcctgctgatcccctctagagaccgctctcattgcagaagtgtttctggaacacgaagtattgcaaagtcagtctattttgctacaaaccactctgagtagcgatttgcaaacaccatcccttatgcagtccgcacttaggaactctcttctccaactgagctacactctctggtccttctctaggtccaggtaaagatgtagccagtccttccagtctgcaaagcattatgaagctgcaaagaatatatccaacatcttattcagacttattcttgaaatgaacaatgtttcgttctttgctaacttgatgctcaaataccctctcaaaatctaaacacaagcccttcctgccaggctacacaaaccacacaaaaagaacaaccctatggtccaaagactgaggattccacagtccaactgaggatcactgtaaactgctttacatggtttaataacaaacataataatccatctatacaaacctgcaagagcacagaagacagatacccaagagtttcgctgagcattgtgtgtaatgacaaaaacagctacaaactacttagctgttcatcaagagagggcggattaaaatgagtcatggccattcctataaaggaacgctttctaaggggaatgctgtgggtttgagctgctgatgaggaaacatctccaagcaacatttcttaaaaaaaaaaaaaaaaaggagaaacaagatgcagaacactgtctataatatgatcccatctgtgtacttttaaccaaatatttgggtatacaatcttaaaaaaaaaagttgcacaagaaacttatcagagaggtatgcctctttctctgtagagggtctagggttgagaaggtattggggagggaaaggtttcattcctttttgtttcattcctttaaaaaaaaagggggggggggaggggcggggtgccgggtgtgatggctcacgcctgtaatcccagcactttgggaggccgaggcaagcggatcacctgaggtcaggagttcaagaccagcctgggcaacatggtgaaaccccctcctccactaaaaatacaaaaattagccgggcatggtggcacacgtctgtaatcccagctactcgggaggctgaggcaggagaatcgcttggacccgggaggcggaggttgcagtgagctaagatcacaccattgcactccagcctgggcgacatgagcgaaacttgatccccccaacaataacaaaaaaagtacgtgtatttattgtatttaaaaacttaaaaccaccaaatcaattatctatgagaaaaaggaacaagatcaacacatgaaatccccagatgatttaagaattccattccacttggtactcaccccttcatcccaaagattcaaccaaactgaattcagcttctccccattgctctctccctgcctgtccttaaaacaaaactaatgagctgttaaagggccacatgtgaggctgaaagggaaggaaacaaagcatgtgaataattcacaactggatcatcagccccgctgtgagctcaacagcccctgacacggatggagttgagtccctctggaggtggcatgctgaagg

SEQ ID NO: 587131 - DNA, 4001 bp, Homo sapiens
tattttggaaagaatggagtcactgaggccgtctaggctacatatagggcacagaaccactcagacagaaggcttgggagacatgggtggcacaaactagaatgaaagaaacgctaaataatttcatcaagtgccgattaaaaaagattgcagggccgggcgcggtggctcaccttgtaatcctagcactttgggaggccgaggcgggcggatcacctgaggtcaggagttcgagaccagcctgaccaacatgacgaaaccccgactctactaaaaatgcaaaaattagccgggcatagtggtgggcgcctgtagtccccgctactggggaggctgaagcaggagaatagcttgaacccaggaggcggagattgcagtgagccaagatcgcgccacagcactcaagcctgggccacagaacgagactccatctcaaaactaaagaaataaataaataaaaataaaaaataaagattgcaagtataggtacacacattaaggtacaagcacatctgttttcatgcgattactggtctctgattcacttctttgttctctatggtgagtcactcagagaatgtgattcctaaggttctaaaattctgaataaatggaaagaatgcaagcagaggcactccacaaaaacattaaataccaagctacggggatatttccgaacagaaacaggaagtctcggctatggcagagcctggagcaaggagaaatttgtccaccagccttcctttcaggaaacacttttcctccaacattttgtaataattactttttaataaagggcgaagacaaactagtaatttccagcaccaatcactaactattaaggaagatagtttcacaacttcctaaaacagaggcatgggattcattacctatttcttttgacttcattaatttaacgcaaatttccttcagaataatgaaactaaggagaaagttgaacaagccctgattcagactggacaccccagaattcctctagttcgcattttaaggaacctgctttagtgagaagtatgtggccccatccgaggatgcaatttcacagccaggagcagccgcggtccccgccagggatgcggtcacgggcgctcgcacccggaagccgctcaacaagttccccgccggcttcggctccgcacccccacccagccaggctctccgcagaatttcctccccgcacctaaaggctgcacttcattttcacacgcgggaacgcctcctcccgctgctcacctccacaactcccggcactcccgcgacacttccccacagtcccctccgcccgctcccctcaccccggctcggcacccatcctttcctaaccccaaactgcccggcgccccgggctctccgcgcctgcgccgcgcccgaggaccacccccgcccaaccccgggtccatccgatcctcggccctctgcggcggggagagggggcggacggtgcacaaaggtcaccccgagctaacggaggcggtcggcgcgggaaacgcgctcacccgcagggtgggggcggggtgcgaaaaccgaaggaacgacggaaggcgcggaccggggcgggagcctccccgtcaccagggtcccgcacctcccagctccgggaggcgcgcagggctgtggctccccgtcgctccaccgtctgcgctcccaggcaaggtcctctggggcgcctcggaactgcgcgcccccagccgccagcatggtgggcgccgcgcctccggcagcacccggtccccggcccctacctccaagagcagcccgagcagcagcgccgccaccttcgcaggctggcgcctcatggctcctcgcgtcctctccagcgcgcccggacgccgggtcgcaggcgcgcttcgcgactcggcccccgcgcggggcgggcgggcagactgcagccgggagccgtcccgccgaccgctggggggcccggctgggagcgggcgggagccggggcgcgccgcgcagccctggctgcgctccgcccccggccgccgcgcgctcccgacacgcccggccgggcgcgcgcctgcgggctcccggaacccgaggcccggcctggggcgcggctgctgggcgctaggcccgcgacgctgaggtgcgcgcgccccgggcgggaggaggggctgcaccgcctggcgaatgggagggggactggcaggctctcccttcccaagggaggtcgtcctgtcgccctagactaaacccaggaaggcttttaaaagaagcagagtctccgcggggggaagcttgttccctgagaggtggccgcagacgaacccactgctcagtctggcatcccgaagccgctccgctcctggctctccccgctgttcctgcgcgcagcgggggcagtgcccccacacccacgcgtgatgggaaggccggcctgggggtgggaaggcccaccgaaatagatggtccccacacctcactgcttccttggatgtggctattttttatgccagtgttctcctgctctgaccctacttgaacttgaccgcaaccggccccgccttgcaggccaccctcccgcagcagaaaactgtgcggagctcgcgctgtcctcgcctccgctgaccccacctccatgtcctcacagacactattttttcacaacacagctcagatcccaccttcttcatgaggttattcaacaaacactattaaacttgtaagatgtaccagatcctgagttggaggctgagaggaggacaagaaaactgctcccgtagcctagagggagggagagtcgcttaaaccacctgatgcagaatgctgagtgcggagaccaggaggtgggtgcatcacagagggtcataaaggacatgagctgcgcagtacaggaggtggaaggagggggtcacacgaacagatgtcacccgaggcaagtccccaactctttcccagctttcaaagcctaatttgattaatatagagcatgcaccacctgactatacctgtcagagccagaacttacaagtaagacagaaacaatgcctatggccttcagtcatgctaaggcacctatctgacaagcctgccaaacgccattgaactctagtagttttactatttacaatgaggacattttacaactctttttaatggaaaagttaacttgtagaaaactaagctgaaagcttattgtgtgttagcaagacaaatgtttttccagtggggatagaagtgatctcgtcctgtaaaaatgcaaatgggccaggcagggtggctcatgcctatcatcccagcagtctgggaagctgaggtgtgagaattgcttgagcccaggagttcaccaaccccaacctgggcaacacagcaagaacctgtctccattaaaacgtgtgtgtgtgtgtgtgtgtgtgtgtgtataagacaaatgacccctgcttaaggtgagaatcataaccagcttcctatctgattgagccacttcattcccagcgtttcctttctcttttctccccgcttttgactgtgtgtgtaggtcacttgcctgcattctcctttgaagcacctttgtcatcccactgtttccatcattaatgggttaaaatggaactttgacttgtgtccacgatgtattcgtgtgcaaattgtggttctgttgcattgtgagcaacctactagtgtctgacataacctcccttctgcatctctctctgcctggaagattgttttgctgagctcgacttcctgtaatttgtgcaagtttttttccaagaataaaattagaactgtgactctgctttcacctcagtctgatacctctcctgtgtgctctctgtttggtcctgaatgatgtggtggttgcttggcatggttggaggatggggtgtaggctaaccagccaggctgtttccttgagcacaaattataagggcatcagataccactgaaaaagttacaagataaagctgcattcactagaacaactgttaaagttggacttggggttagaagaaagttcttgatgagttgtttgg

SEQ ID NO: 587132 - DNA, 4001 bp, Homo sapiens
cctcgtcctagtacaaaagagacaggggaggctttgtccccctcagcatctcagggggaccctgcgtattgggtcccctttctcccacccaaccctccccacttcctctcacttcctcaactctactgcccagcaagccaggagcaggtccgcccaactcccatccatcagagcctggcacttcccaaggccaacccaccggatggccaactgcccccaccagccccagggggttctcccagacgtgccctcacccagtcgctgcagcttgtccgcgcagttctcggccacctcacgaagctcctggtatttgatggccagggcagcccggcccatctccaggcggggccgcagggccaggttctccttggccagcgcgtagttggaggccaggcaggcctcacgctccagctgcaggccctggaactgcgggcagagaggagctaagaggcccgctcaggggatctgccctgtccaccctactgccccgtccaccctactgggcgaccgtgcctgagggccaggccaaaggcacctgtcaggcaccccttcagggtggtgaacccaacaggtgaagggacgatgacaggccgggaccagaactggctctgccctgagctccctctctggcctcagtttcctcttttacaaatcgagttaaaaaacatccaccttatggggttgttgagagacttaagtgaggaaaactataaaggcctctacaaatgttagttaatttttaatttttcaattaatatgtctgctcaggtcccggaggagtgcccctccctcctctgccccattttccatgcatggacagcttccctctcactccaggcctttgtctgtttcctcctcaggtgtttgcaccgaaaacactcccaccccctgctcatcctctccagaggggtgtctgcaccccgtcccctcacagcaccccctcgggtcaccctctcttcccttcccaccccttcctctgcctccagtggaatcctcacaccccaaggaatacacacccccttttcctccctgctccgggcttacagcagccccggccctggagaaggctttttccttgtctctagcagggcccaacctcccctccctgcccctggagaacgcactcccctccatctgtcccttgtgggatgcacaagcccctcctcgcctgcctgctttcaacacacacttgccctttctgccccccacagacaaccagcccgggcctatctcccgtgaaatatacaactttctcttacggtggcctatgcaatacacacggcagcttccagcacccctccccaacgccaggcacaaagccccctcttgcgcccccagaatgcgtgaacccccaacggcccctccaggtgtcagacaggcccctagttctcccagtggaaggcgcctcctctttctggcccttacagaacgtgggtgtgcgagccagggccccccacaacacagccccccggaacacacctccccggagcatccgctgtaggacacgcctcgcggccatcctgggggtgcacaggcgcccccctcgggtccccggcgccccacccgccccaggccagctccaagcgccccctcccccgggggtggctccgcggggcccactcgtacgtgccaggctccgcgcccacgggcggccccgcggcccggcccgcgcggcccttccctcgagcggcaggtcccgcaggccgctgcccgtcccccgcgccccccgctcgagccccccgcgctaccttcctgctgagccgcacgatccggtccagcttgggctcatcctgaagcaggtcccggagctgcccggtgctgaggatcccaaagcgccccgggctgccgggctccggccccgcccgcgccgcccgggcccggtacatgccgcccgcccgcgcccccagctcggctgctggctcggcccgctcggcccgctccgccccggctccgctccgctccgctccgctccggctccaggatccgctccggctccggccgcacgcaccgctccgccgccagggggcgcccctcccgctcttaaaggagccgcggcgccggggctgggggtggggcagggaggaggcgggccgcacccctccccgccccggccgcgccgcgccgcctccagcaccccaggatcgcccagcaacccgatctccccgcccctcccggaatctgagccgccctgctctgcgccccagcaccggccctggctcaccacgcccccaggcacggactctcccaccccgggcggttacaatttgcagagcccgtgcacgttttcccctcggatggcaacaacaaatttctgactttggccgggcgccgagggctcctgccttgcagccctccccaagcctcagttttctcttctgtaaaatggggttggagatggtgagcgctgacttgctggccgggcgcggtggctctctcctgtaattccagcgatttgggagaccgagaagggaggatcgcttgaggccaggagtttgagaccagcctgggcaacataacaagacccccgtctctatttaaaaaaatttaaaaattgtcaaaagggtgaaaagaggccgggcgcggtggctcacgcctgtaatcccagcactttgggaggccgaggcgggcggatcacgaggtcaggagatcgagaccatcctggctaacatggtgaaaccccgtctctactaaaaatacaaaaaaaattagccgggcgtggtggcgggcgcctgtagtcccagctactcgcgaggctgaggcaggagaatggcgtgaacccgggaggcggagcttgcagtgagcggagatcgcgccactgcactccaggctgggtgacagagcgagactccgtctcaaaaaaaaaaaaaaaaagagtgaaaagaacaatttttaaaagtatttaaatgcttttaaaaagtatccggacatggtggcatgcgtctgtagtcctagctactcaggaggcagaggtgggagattgcttgagctcagttttgagaccagcctgggcaacacagcaagaccccatctctataaaagtaaaattaaaatgctgagggatagtgatatggctagcaatgttataatgaatacacatagtaggtcaatacccacttgttattttagacatgcagaagcatcacagaggccgggcacggtagcccatgcctgtaatcccagcactttgggagtccaaggtgggtgaatcatttgaggtcagaagtttgagaccaacctgaccaacaaaaattagccgggcgtggtggtgggcgcctgtaattccagctactcaggtggctgaggcaggagaatcgcttgaacctgggaggcggaggttgtagtgagccgagatagcaccactccactccagcctgggcgacagagactccgtgctccgtctcaaacaaagaaaaaaaagaaaaaaaagagatgatgtcgcctccccaaagtcacattacaggtaaatgatacagtcccgtttcttctcatttgtacagtgtccacagagcatacgatgccgctctgcgctgaacactgggttaggccctgtggggacactgtccctgccctcagggagttcatggattaaggcagagtcccattcccactcaactaattctagtataagacaaatggcaggtgtcacctcatgatggctttgtgattcccatgtgatccccgatatgtcctgtaccttgtctttacaaataggttaagccattgtccccatctcaggaaatagacactcagaaattaagtcagacaatgagtgacccagcctgggcaacacaatgagacccccatctctgccaaacataaaaaataaagtagccggccgtggtggttcgtgcctgtagccccagctgctcaggaggctgaggtgggaggatcacttgagcccaggaggttgaggctgcagtgacctatgattttgccactgtactccagcctgggaaatggagcaagaccccgtctcaaaaaacaacaacgacaactgagct

SEQ ID NO: 587133 - DNA, 4001 bp, Homo sapiens
gacaaagacatgaaggaaatgaggaagcctgtaaatatcagggttcctcaaaaaggaacagcatgagcaaagaggccctgagataggaacctgcctggctttttgaagactaagagagccagtacagctgatgcagagtcacagaagggaaggagagtagtgggaaaaatgaggtcaagaaaaggtggctaagggcagctgggtcaaggtcctgtgggacaaccaggctaccgtaatggctgtggcttttcctctgaataagattagaagcccctggaaagtctagaatatcagaggtgtttcacccatgtatgagagtaaacatttacctcatagaattcttttgggaagaccaaatgcaatatggaagggtttttaaaactagaaaataatgtacaaatgtgaaacattattatatccctaattttgtatgtgtcatttttatatcagacaactttgttaaattcttcttctgcactaaacagtggtaaatatttcataggtttttttcaatggaagaaaaaacaatggtttttctaggagcaactctctccatttctattccactatatctaagaacatatgaaactcagttttttgctttcaaatcaaaccataaaacaaacatttcaacatgaaataaagatgcacaatgtgaaaaacaatctcacccttattcaaaggagcaatggcagtcatgaaatgatatgttcttaatgagtgttttcctttgaactgctagaatggaaataggagtctctagtgttagataagagactttgttatcttgttatcacaaggaccagccaaaccaaatttctacctagtcaaacgtctcaattattggcatatataaaatatatacagaacaaattttcactatgaagtaaaaacaaatgaagtatgttgaaaatagtaaaaattattgaactaggtaaatgactcttatgatactaaacagcccatcatcaagtcactgtttagagacaatgactgcaactgacagccctgttaacttgtgaagaaaaacagtatccaactgaaataacactggaaatggaaacttaagttatctcccccaagttctagcctcttttttggtctgcttctcttttttgtcttttttattttacttcgtcatttcataaaatgtgtgattaccactactgctatatgaaaataattcatattcccatcaccaatttctaccctaaacttcagtgccacgttgccagttgttgactggatactaccagcaacaaataatcccatttaatttttactaagcccaacagttctaagtactctaactttgtgtataaactcctctctccatcttaaaccaccctctgaggacggccttattattacccccatctcacactggaaagttaaataagtagctcaaagtagcacattgggtaagaaaaggaaccagcacttggaccccaggcatttttgctccagaacggatgcatttaatccctgctgcaccgcaacagtgctccagctctgtacctaactccaatagatacaaaacaaaactcatcgtctactctctcctagttcttattgtcctacttcaagtggaaagcaacttaaatttcagtcacccggcctctcttcctcctcccacaggcagtcagtccctgaggtagccgggcctgccttcatgccaaaatttccctgggcaaaggccacagggatggggcccgaggaaaggcagcccgaacgcgggggtgtgtcagagcgctttccctaggtgccctcccggggctggcatcctctctgctccccgaaaccaactttcgccatcccaccccgccctgccgcggacctgccttgcgctattccagcagctccgcacctccacccactccactccaccctccccaaacagcccaccctagtctctatatccctgtgccctcaactaccacctgcaccctttacctgctcctctgcttccgccatggcgccacgggagagtcacctgacagacccggaaataagaggaaaccacacacttggcccagggccttctgggaaatgtagttttagcttcatctgagcctggaaatctcttctaggggacggacctgctagggttcatttctgctgccaattctccaaactcaatggaattctgctttgaaggatgtgaacataaccattgctaatactatagcttattttattgttgttcttgtttctctagttattctagtgtttattaagcacttactatgtcatgccctgggtttatagctttgcataaattatctcatttaatcctcacagcaattcctactatcatccccatttataggggagaataccgtagctcagaggtcatgcagctagtaagaggcagaactagtaatagaattcagccctgcctgatgccaaagtctctgtgattgccaaatgctgcttactctaaaagtgttcttgtccttttttctctctcttttttaagtatattcagtgaatataaagcagtctttgcagtggagagtcagagaaaatttatacgccaacaaataatatcattatttttgcttgctactttgtcttctcctgtcatatgaacattgatttaaaaaaaatctctgttgtttaataaattaattgttaaacttttgttgaggatattcaataggtaaatgttcaagtgaagacacaatatgaagttgtccttggtcaaaatctgcacaaccactgtattacttccagccttcagaatgactgattccttctccatgtttctgaacattatgaattctgtttcttaaccctcaggaatctgcagcaccttgtccaaagacagacattttacaatttccattcactggagtagctggtgaccagcagagggcattgcaaatggcagcatgtggtgattgcctcagtaccttttttgactccctgtgcctcattgactctgacccagtaggaagtcatggactcagtactctgtctgtagcttgctcaacccatgattcctcaatggcccagaagccaaggtgacatcatctctgagacacctgtcttctccccagggcctaaacagccttacctccatcttcttcctccaagccttgctggggttcctcttccagtgggctaatcactcagccgacaggatagaccaccctgaggcatttaaatgtctataagcagccaggtgcagtggctttcacctgtaatcccagcactttgggaggccaaggcagtcagatttcatgagctcaagagtttgagaccatcctggacaacatggcaaaaccctgtctctacaaaaaataccaaaaattagccgggcataatggtgtgcgcctgtagttccagctactcaggaggctgaggtgggggttaaggctgcagtgagcattgatggtgccactgcactccagcctgggcaacagagtgagaccctatctgaaaaaaaagaaaaaagaaaaaagaaatccataagcaagcacccaatgccctaagtataaacctagggcaagtataaacctaacccaagagtttctaaaatctcttgcaaagcagcccagggccaaacattgctcatgatgaactccagatcccagaaaaactttaatacagaccaaagagactgtggaagccctcagtcgagtatccacgggaaagagaaataaaatgagctcttccacttttctgactttcctcacaaactccaattttctcttttctgttatgagtgacagccacccataaacctctaggactacagcctctccaactgggcaatctcctcttctatgctgaatggatgagattgggatgaagaaggaaaataagggattattaccactgtcttaaccacaaggtcatttttgttttatggttccattttattttggtgagaagtcaagcagcccaagcaagcaaagctgaaggccatccactctgggccttcctggcctttctacttttctggaatgagaatgtttattctctttctcaagaag

SEQ ID NO: 587134 - DNA, 4001 bp, Homo sapiens
ttgcagtattccacaacatttactgagagagtcagtgagatacaatttaggcaatctgtcaagttgataaatgaggagagtctcttgcctctaagtttctaaacaatctaccactaactggatgtttcatgtaacagagtagatcatgattatctgtcaaaatgcacattcctgatacatcaaaacggttattagcaacaccagtgaaacacgcctgcagcagtgaaacaagttgcacactttataaactgtatatgtttccttctctccaaattaacctttatttgttcccatcaagtcactgtattttgaattgccatacatcttaagatgtaatgatcacacatccaggcttagttcagattaaatattatttagaagtcactatggagatgtttctcagccttttcattaccaaccttgacactgctagtttgcaagattcatgcaaccctggtgaaactcacaaaaatataatgtttccttcctcctaaaggcatttcttgaacatgcaatgctcttatcttgttaccaacgtggttgttcttatcttatctaaggggcactttgcaaagagctgatggttccctaaaagcagtcctgggaagatttgtatggccagtggaaatgcacaaccacaatgcacacttatggagaagagggccatggggaatgcagaaatgatttggggtggatgcactcctccccccacccctcacctcacccccggtttaaagagagacactgtctcttttcaacattttatgaaatcccaaaaatgatctctagtgaaatgaaactatatttgtacctaaaacagggaagctattaaggagacattctgatcggaaaagggcttttctattctagctggcagaaggagtatggcatttctgcttgcagaagtgatgcagtcttttggcaccagagatgtgatctgttcatggtgctgaaacgaccactgcagcctacgaagtcctgaacaatcgggttcagcaggctgctgctgcttgtcatgcaagttgtggctttttatgggtcctcagaggagtctgtcctttgataaacacacatacaaaaggagtcacacggacctacaaaagggaaactctaagcccagtctgactacacaaggaagagggactggcaatggagagtcccagtatccagccctgtgtttgtttgcgatgattatgtatgcatgagtggctaccctgtgcatgcacacagatagaaagcacacacacacccacacacacacaccacacgaccctgtgtttgtgctcaccgaggagcccacctcattgtcaggcaccagctagattttctctccagcctagctagtctacagtttaataaactttaaaaaaaatcgtcaaacagaacactatttatacagcctaagcccactgttacttgctaggaagcttattctatctgcctgtccattctttttgagtgtaggaaacacacacacacgcaagcaaatgtatatttgccattgagcaagacttaccttgagaagaaagcccttgttgtacatataaaacggaaaagaaaacaaatccaacatacaccaaaaagatccccatcattccaaaaagggaggggggtcacatcagtgtagccaacagccgaaaagccctgaaagaaaggcgtgcgagtggatggcaggctcagtctcagagccctgggcgcgacactgcaaacatcctgctgcttgcttggcgagggctggctgtggggagaagggattgcgattctggaaggttagaaccagctggctgggattcagcgaggcttcctgcggagcccaggctggaatcgctgggaagtgtctcggctgcctggctgcctgctttcagctacctggcagctcgtccaacgtcagcccgccgctccggcttgcgtgatcactgccctccctaaacacggagccggctcgggaagtggggagtgggcaagcggggcgggctgaggacttcgccgggctcgcggcgccgcaacttttccctctaatggctgcgatgatgcctttaactctgtgcgcgctggacagcgccccgcccgggagctcgcgccgggcggccgcggagggcgcagggctcgtcggcgccgctggggtctcccttctggagagcagggacgtcggtttttttccactttgcttctctcccccatcgggtgtctttctggctcggcggatcagatcgctcggtgccgaggaggacaatacagtgacgggattgcggcgctggcggggggctcggagcaaaaggttccgggagggagttggggcattgctgaggaccggggagcaatgggatgggggagagacgggtgggccgaggaaaacagccatttagggaaatgccgcttacccagttattaactgctccaaccaggagcatcacatgctacgatttcacacgaatttcttgctgaacagctttcagtacaagcagctcatgcaggagccatatcgctccagctggcagacggagaagagaaaaagtacaaaaagtcacgcattgagggaattttctggaaagaaaagcccaccatactatgtttactttttaaaaaattacatacctcctgccttcttttccttcatcttccatgtattttggaggggggaggggttttaaataccgttaaggtcttcattacgtgattttgttttgtttatttgcttttcttttgcatagcacaatacttatgtaatgttccctgggactaagtgaataaggaatcttattttagacacaaaaaatcacaataagtttcagaatgtggaacaaatctacttatctgccttggtgaagatttgagatgtacattctatttttaattaagaactgaaacaacaatgtatattatgttaaagactctatctgaccttatgcaatccaactattagtggatttaaattttttttaacaaaattaatagcatttgccatctaagaagagcacacattttttattcccattattatttctatgcaactatgccacaaattttcagtattagtttgaaatatgaattagtcttaataatgctatcaggaagccaatgtagggtatgtattttcattttacagataaagaatttgtagttggctaatgcctttactagccagaaaaaaaattaaccttaacatagcggttgcattttaaatcacttatcttctattgctgaatgcagcaataacttaaagctcagaaaactaaagacacaataacgtcatcacaatattatttattttctgaaagtatatttattttttactgtgagtaggggcagaatatgggatttggagacaatcatgggagatattttatatctgttcatgtttaggccaaccagactctgtatcctccttgtatttagcaaaggattttgaagtttatcgttctaagaaaggaaatcactttatgttcaaacattcatggacaatgagttcagaacatagaaacataatccaagttaatacacctgaaccatactaagcattacgtggaaagtaaacaacaaaaccttgcatatgctttaaatgttaagcctaacaggatgttttcaatgtgctaacatgattttggctttatttcaacctttagcataaacatgggtataatatgtcatggaaatgacctgacttcaaggttatctgctgttaaaacagttctcaatataaagggcatttattttaagtaagaggagttctaaattaatttagcaaagcatttcaactatttaaaagaagtacttgatcactgtaacaataaaagtacaataaaaataagcttaagagtgtgaaaaataaagtgtgagaaagcttttatagtacaaataagccattgaattactttaaaataaagttataagcgtttaagctatgaaggaaacaaagaagaaaggagggaaggaaaaaaaaaaggagaaagatgaaattggaaaagtcttttgttctccttatgaaaagtgcctgatgggta

SEQ ID NO: 587135 - DNA, 4001 bp, Homo sapiens
agtcccggccgctgccgccctcgtccctcgccgggcgcccgagctcgttcacccgccccgggccgtcccgagaggcgtgctcacgcttctcctggcccggctgctctggtgcctgggccagcttctccagcgggatgctcggactgcacagagccaccatcaggcagcaggtgaccaggagggaactggagagcgcgccaactgccatcgcagtggagctgggcatcccctaccacgtcccggcgggcgggcgggcggggagcgcggccgaggggcgagtcgcattcacagcccgggggcgcgccgccgccagccgggagccgccgtccctgcggagagaacagcagcacaactgagccccgcggcccgcgcgcgccccggcccgccgcggcccccacccgggctccggcatagctctagattaacgagctgggcgacgggggcgggggcagcatgcccagcgtcggtgcacggccggggttcttagacatcacaaactgtggagcgatacattggaagcgaaatccaagaacgacaccggccggcgtgtttctgatgtagtcgtgattagtgttggagatggccaagggcggcttgcggagcccagggaacgcagcgagccaggcccgcgcccccctgcaaagctctgccttgaaccacgtaattcaggcacccagggtgtccctccctaggtcctggccacatttcccgaaggttattaaatggagaattcagcagtggagttagagacggacgaatgtacaggaagataagagggaaactcttcctcatttgctttagggggttgtgctgggaaaatgcggggaggttaaacaaagcttctcctaggactccacgattcatttctaacaacttcttaaaagactcccgtctcgggagcagacgccccctccccgctctctaagccccgctgcatgaaaggatgccctcggccccttgccagagggccgggtcggggattcccggggcttcagctcctctgccggcccgcccctccgagccttgggagccaggtcgccggccgcagcgctcagtcttgtagtgtcctggctgcggagcagaagcgcccgggcagcaccaaggtgtgcagtgcgggaggctggggccccagggcgcagagtgggcgcgagaccctcctactcgctggatcccggccagcctttctggattccaaagtttctgccgcccaaaggggctgggagagcccgagacgccgcaggacaccggcaatccagcctctctccgcctcactccccgaacgcccccactctgcgcactccggtgcgtctgtcccctccccctcagccctcctccctgagggctccggacgtgcccggccctgctgaccccctgcccggtccctgccgacctcaacactgggcgaagcgcccatattcacaaacttgggcgggggagggggttcctccggagcagctgagcggctgaacccagctggagcgcgtccggccgcgcggggacacccagcatgcaccctcagccctgaagaccggcgccaaacctacatacatgagcgcagggcgcgggccggacgccgggctcgcagcgggcgcaggggtagcagcggcgggcgcgggcccgggttgccagcgcccatcctgggccggccggcgacccgcgtggggcggaccactaacagcccagccccacctgcgcgctccgcctggcgcgcacaccgggctagggcgtctctggggagtcgctcatcgcgctgtcagctgccggtagtcgcggccccaactcgcgtcagtgcccgcgtcgccctcagtcgctcatcctccggcctcgtccccgcttctccgagaccaagcgcgccccgggggccaccctggcgccgcctcgctcctctccgcggaggggttcggggagctctccagacccggcagccggaatgtctgggcagccgtggcgcgtcggagggaaaagagaagcccggagcgcggccggcgcgcgagtggcaccgaggccagcatgggagctagcgcgcccgcctcccgcctccccctgccgcagccgcctccgcccggctcccgttccgctccctcctctgctgcccccgctctggaggccccgccttggcccgcgctgccccgggggaggccctcgcgctgcccccggagaggccctaccgccgcacccgctccctttgctgcgccggaccaacctgtcactcgtccgcgcggccgcgtccccacctccgcagccggccgcagaccctgccagggctgccattctccagtcgagtcattcactttgcgctggacctttcatcttggcttttctcttttctttaatttcttccttcctaattggccccctctggctttcctctttgtggacagcttgtttcagctactgtgttcagattgggattcgaaggccgtgttagtttagcagactgttgagactttctcgtctttgcattcagaaacccagagaaatagacgtttacgagtaagaaacgtaaaaatctcaagcgcgaactttctgaatctctgccaatctctccccgctcccatcttcctctttctgcctgctctctcttctactacaaatagaaacctgtttcctaactttgctagaatcctcaactgttaagcagaggcccggttgtttttactctttgatcttgtgtaaacgagaaaacgtcaatagtacctgttcaaattaatccccgaaattgaattttcatggaaatggcccatggcagtggttcccactcacggcattttagaatccctgaaagtgctcggacggtaaacagataagcttccctgcaaggtcaggcgctctggctggtgggaactggggaggctggtttgggacacagttatgtctatcttttaatagtatagacaaacaaatcttagctgaggtgctagggagccctccttgaaagcctgagaaggctgcccctccaccccctccaacacatacacaaccaacagggctggatggaggatttctttctctctctctctctcttttttttttttttcagacggagtctcgctctgtggcctagcctggagcgcagtggcgcgatctccacttactgcaagctcgattcccgggttcatgcctttctgccgcctcagcctcctgagtagctgggactacagtcgtccgccatcacccccagctaattttgtttttgtatttttagtgagacggggtttcaccatgttggacatgatggtctcgatctccggacctcgtgatcctcctgcctcggtctcccaaaatgctggtgagccaccgcgcctggcctggatggaggatttctatgtacaggatgatttgagcccttctgctgtttcagttctcactctcatttttccttttttttttttttttaatgttttagagacacgatctcactttgtcacccaggcttcagtgcagtggcatgatcacggcccactgcagcctcaaactcctgcctcagactccggaggagctgggtgtacaggtcaccacacagggctaattttttgtttgtttgttttgttttgtttcgtttaggttttttcttttgttttttttttgttttttttttttggtagagatgggatcttgctttgttgcccaggcttgtcttgaactcctggcctcaaatgatccacccggcctctcaaagtgctgggattacaggtgtgagccaccacactcggccctttcgtttcttgttaccctcagaaaagagacaggccacatttgctgtggctgcagctgcctacccacccacctgcctctcatcacatgctctaatcagttatggcttctgtgtctttatgatgctctaatccaaatatcacacctttcacaacaccaccaaaataaaaacacggctcgaggtgtgatcatatgtaatgtgcaaaatgggccctcggttctataaaatcaagtgcttttatagcattggttaggctacaaattttgttatttgacttattagctaa

SEQ ID NO: 587136 - DNA, 4001 bp, Homo sapiens
tgtggtcatcgctgcatatacctgtaaatatactctgaatatacacatatctgtgaaaatgaaaaaccatagagtcgcacactttgagtgatttgtatggtatatgaacatcttaataaagctatttgaaaaaaagaagtctcaataaatgcattttccatttacctcgtcttctagttttactccattaaacataaagaacttgacaatgttaccaatgttatgaacttaaaacctggtaatgggtaatatttgtcttcagcagagagattacaaagctattatatagaggcaaaaaagggttatgcggtctatagtaaacatgaaatcatcttcctttataaacattggtcatttttttcctggaaatatttatctaactgtaatgaacagatatatgttattacatgtattttttaaagttattcataaagatttagtaacgctgtaagcaaaccaaagaaggaccagaaaaaatatcattgcagaaaataataaatttgattttagtattttatttttaagttttgtataggatagtgtttgtattccccttatacaaagcaaacttacatcagtaaaatgagttaagatcaaaaaatgataagacaaaactataccctggactgctataaatgttgtacataatgttttttcaagctgcagatggttgaacacagatcagactttttctgaaaaacgtaaggaaacttgcaatataagaacaagtcacctttcattaatattcctatctgtatgaacacaaaaaacaagcaaaaagggctaatgaaagtagttttggtttaacttcactgtattttaaactaaatgttctttgtcatggattaaagaagtaggaggggagtattcgctccacagagatctcttttacagtgccaaaactgattctaacatatatatacaaaaaccataatacagtataatacggatatacaaaacttaacttggtgatttattgtagggataaaatgttcaccaatgaattatttctgagggtccggttggaggtggaattcgtgcagtatggaattcaactctgttctgagaattcaggtccacttgcggctagcataccttgcagatccggcgaaagtttcttacagtaaattacaatgacctcaaagagcaggataacagcaggaaacaaccaaaaacagaaccaagggtcgtagagtaagaggaggcaacaaccgcatgtgcgcaaaagaaaagtgtagagttttcaagctggaaattgaccttttcaaagacagcagagggacagagaggaggcgggtgaggaacaaacatcgcttgctgccttaaaacgcacagggacgctccccaagtcgtccaaaaagtctagcctagtccctctaccgcccacgcggcgccactgcgcgcccacccccgcgcgccctacctcgcttaccttccccccaggccaggaacatcagcgcgatcaccagcacgcaggctccgccaggcatcgctgcttccgcaggtggggcgaaaggcgtcgcagagcccgggccgcgggtgccaggaggatggggccacagcagcccctcgggcctcctttcttggattttctcagtctgttgctgcttggaacagggaagctccgcgtcctcgttctggggtgcacccagtcctttcgtgggatagagccttcgcgtaatccgtctgcgactcctcccttcccattttggctgctggctgacctgaaagccacgcccaacctgtccccatagcccagcgtgtaccggcagtggctccgccgccttggatgtcaccgtgcagtcgcacagccaggagtcaagctacagggatgtagctctccgcccgctgcgtcttgctgttctaacagaggctgtatgaaaacttggtaatcctagaaactgctcagatggacctcgcataaaagaagcctcacaaggttccgttggaaggggaagtttcccatgattgtatctgcagacggattcctaactgcgtaatgggcgctactggtttgcaccccaaggcgaaggcgctgaaaatgctcctgtcaccttagatctcagtgatgaacgacaggaggaggagtagacactaacgttgcaacagtagatgccttttcttctgcctctgtgacaggttttcagaagtggaaaggaccgcatttagacactagccaaaccatgaggtttgtcacctgtatttgccagtgattcccagagctcttacagttgtcccaggacgctttagcacatggccacacgactcccaaggttgacctgggagttattagaagatcagagggctctaatgtcttcccccaacctcgtttttgttttgttttgttttgttcgagacaaggtctcactctgtcacccaggctggagtgcagtggcacagtcacagctcgctggagccttgaactcctggcgtcaagcgatcttccccctcagtctcccaaaatgctgggattacaggcgtgagccaccgtgccaggtctaaggtcttcagaagtgtggttgcctctgcagaggaacagggtccttttttcaactgattctacatctttttatgtctgaaaatgaaacctcactgtcctagtttttccctggctgtctcattccttgagtctcccatccatcaccttgcacttggttctcacagagcctttacctgaagaggatagtttgggggtccaagtgggcaccaaggttccacccacaaatttggaggttcaaggttggcctaggcatggtggtggaaacaggaggtgtccaaatgcataaacaagtatttttttaatttcatataattctttatttttaatttgaaaggtaaattaccatttaaaattttaaagcttatcatctccatagtaaaaatattaacccatattggaaataatttctttttggtacacaatacttgtgtgtagccatctttcaaatgcagcaagggcacccaattttctggattaaaaataaaatattactttttggtggacggtagacaggtgatttttatcttaaggcttaagtatggaagggcaatataatgtaggcacaatgaaaacccagagatttcttagtgtacagttaagtcttttgtttccgcttaaaaaattctaataaaacagacaagaaattaaatgtcagttttctcaatctatttgtgaaatcaccaggaacaaagtaatttgatgtgaatcaaatcatagcaggacttttgtgaatttattttctagcagtatctatacaaatgtagtaaacttttatactttcttggaggacaacattacttatctgacttccatcaaaatacaatttcaggtatcgtgggccttatttttttcttcagtttttgattgtttatgagtttatgagtttacaataaacttgtgccaaaacccaacttccctccatgtgactaaagatggaaaaaactaaaagcaacttaagaattttttttcaagtctcagtaacctggcttggatctgcaagaatgtatcaattaaatgctggttatatcacgcctgtaatcccagtgctttgggaggtcgaggcaggcggatcacctgaggtcaggagttcaagaccagcctggccaacatggtgaaaccccatctctactaaaaatacaaaacattagatgggcgtggtggcgttcgcctgtagtcccatctactcgggaggctgaggcaggagaatcgtttgagcccaggaggcagaggttgcagtgagccaagatagctcctctgtactccagcctgggcgacagagcaagattccatctcaaaaaaaaaaaaaaaaaaaaaaaaaattagttatagaactgtatggaaaacaaaaagtaatgaaaatgttttaatctatgtctcgtgaagttaatcaaaaattggtataagattcttttttatatttttgaacattaaaaacaatggatgcatggtaccccgcaatatagagactgacagcacttgtaaaatgcagtaaatatcactg

SEQ ID NO: 587137 - DNA, 4001 bp, Homo sapiens
tggttatttctttaacaccacttttagaaataaatcagtaacaggaaaaaaaaatacccttctaaaacaacatgatgtagtgcaaagtacaatgggataggactaggtgtgaggagtcctggttttctagttctggttacattattaaattgctgtatgacttgggctcactggatcagttttctcatttgttgaaaaaagtgtgtgtgaatggggaggggcttaaagttgttacccaaaattctcgttttgagccactcctcttgtttcatccttctaatcaggaaactcaatgttctctaaggtctaaattccgaaatatgaaacacatctgaaattgaatggaacgattcaatctccaaccggatggcacaagatacaaagggtggactcctatgaagttaacaatgaatccaataactttccagaaattgtctaatcctaacttcttaaagaagcaggtgaaatctggtttggcatacctaatattacttaaaggagttataaaatggtattgctttgttgaaatttccgtgttttctgggttccagtggcacatactctgcaggtgctagcaaagtggagagaaagggatccagccagtatttcaacaaaccacacttcaacccagtcaccgcagtatgatcccgacaaggcctacaccacagagcagaacctccccacccccagaattgccagcagccaatgtaatgaatgcttccgtcaacaacacacattccccttcccacagcagaactgctcgctcccaaccggccatctggggttggaattggccgcacagcaccaaactaagaatcattctcggccccaaaagccaagagctaccagagattgaggtttccctgcgcatggctgcggggagagcagcaccccctcccaccaatggggggaaaaaaaaaatcagtgggaaggagagtagaaaccaggcctaggcaaggttgctagagaaataaatcttgtttctctttaacgaagagcaataacatttcttgcaccctctctaatccgaagagagcccaggctcttgcactcgacttcattccctcctggaatcctaatgggagattaaaaaccaccttccttccccgacctatccactcctcaaacctggcattgttaaggaacgtacccccagatcaagcagtaagaggtgaagcgagagctagaacaagggcccagattctaggaccaagcggctcttgcaagaaaatccccttgtggcctgagaataaagttttaaccagcagcaagggcgcgggccgaggcccggccaggctggaggacaggcctgcggaggtgacactcccttattctccagcagctcgggaaggcggcgcccgaccgccacggcccgcaccctgggagcagggcgagggcgccgacgaggggccggggccggggccggggctggcgggaggcctggcccgcgccgctcccgcctccttccccactcccacttcccggcccccaagcccgggcccgtgaggtaatgtcacgggtggcgacgcgggtctcgtccactgaccacacatttcttgccgaggaaagtgaagagggactcgttctcctgcggggtgagcaacagggaccccacgttggtgaccctccgcggcggcggcggctgctgctggacggagctcatggtttcgccggcggggttgggagtccagggccgtctcctccggcgagtgggcgagagctcgttccccctctcggtgacaggggcggggagaagtggagtcagaggcgccacatctcgcagctcctccggagcggggaggaggacgaggtcgagggaagcaggcgctgacggcgagccaccttcgcgccgcgctgagaaagggaagctcccggcacccgcccggccaggctagggccggatggtcgttgtcctcgcactccggcgactgcgctaaactcccaactcctcccccaaccctcccgcagcggcggcggcggccgcacaatccaacatggcagcgggggcgggcgagaccacaggacggagggcgcgggggagcgcgccggaaacgcgcggctgcggcccgggagaaacccccccactcggcggcgggcctcgcggcgcgggcccgaagccacgcccccttccggccgaggcgcggaccgcgcggagctaagtggaatcccggttggcttggggcgcaggcttccaacttcgtactctggcctctggcgtctcggctcgtcggttgggtacccgaacccagctactgctgcttgaagagaagatggatggggactcctcgccgtcgctgcgccgccggccttccctgggcggacgtacacctttgcgaagcgtcagtgaggacccagggcccctccttggaatagctcttatttctcaagcgctgcagcgtgaagctcgctctgcgggtccgagaggcctgcgatctgaagactgaaaactgggaagagacgctctaccctgtgctcctcgccggcttcgataggagccgcaggtgcctgggattttctcaaactttgtcccaaacttcagctgtgggagtggaggaacaaacaggcctctcccagaattgtgaaagagatcgccctggtggatgaaacaaaaacaaatgcacttgacttccaccgcctgcctggcgtgtcacgcgggtttaatgtatgtgtcacatttaaattcaaagtattttcttctaagggcctggacacatttcttttctccctgtatcgtgaattggaaaataccttaggatattaaaagttatctaagataaccccctttcttctgtaagttaaatactaaacggcttaagacgaaattttggaatatagagatgatgatgcagactgcagtgaattatcaaatatgcatctcactgttctccacattaaacatatttttgttgcgtaaattcatgttaagacgtctataacaattacactttggtaaaattgttggatgttaacatctctgatagctcccaatagaaatctctgatgtactaaccagactggtaaaccattatcatgcactttgaaaatataataaaatattataattaaagctgccattaatgaaataggctgagcaacaataaatttacaaaggaaaataaaagtggatagccttgggagttctcacataaaatatggagatttcaaagttaaacttgattaattatgttagggtaaaaagtgaattaaagcaacaggactatttataaaataattagatttagaaagcagtcgtagaaatataagcctggagttgcctctgaattacatatttaacaaacctagaagctaaatcagtttgtcttttatcaaaactgcaactcctctaagttgaaagcacagtgacaagagaaagcattacaaattcttgagaaataatagaaattaaagctcttttcaaacctgtgaacaagtatagtaccagaagtataagattcagataggcccaagttgtagttcttgttatgagtcttacaaccctatggactttggacaaattacttctctgcgtctgtttcctcatctgtaaaatgaaaataatttctgtttcatacaggtatagtctaaatagggataattacacctacttcaaagttgtaaaatacacaattacaactagataggaggtataagttctagtgttctgtagcactgtaggatgactatagttaacaatattgtatagtttcaaatagctagaagaaggatattgcatgttcccaaaacaaagacataagtttttgagatgatagatatgctaattaccctaatcactatatgttatatgtattgcaacatcactatgtacccccataaatatgtacagttattgtgtattaaaatttttttaaactaaaattataagacattaaaaaaaggtatcacatgtaaagtacctgatacatagtggttactcaagtattagttgtcggccattgacagtccttgcctatggtcttttctgctttccctgagctaaggga

SEQ ID NO: 587138 - DNA, 4001 bp, Homo sapiens
gggaatagtacccatctcaaggtaagagctatattttgagcctaggcaacaaagtgacaacctgtctctatgaaaaaatcaaaatttaagcttggtcccagctacatgggaggctgaagcaggaggatcacttgaatccaggaggtcgaggctgcagtgacccatgatcacgccactgtactccagcctgggcaacagagccagatcaaaaaaaaaaaacaaacctatattttgtactctattttgtattttaaatttatacatatacatatacatatacatatatatatatatatatatatatatatatggagagagagagagacagagagatgagttctcactgtgttacccaggctggtctcaaactcttgaactcaaatgatcctcctgccttggcctcccaaagtgctgaaattacaggcatgagctaccgcacctggcctatattgtatgctttttgttgttgttgtttagtttttgttattgcttttgttattatattttctatttcttattgctgttagcagtagtataaggcagatgagaaagtgtggcttctaaaggttgagtaacttgactgcatgcttttcactgacactacaccgttacgtactcaggctattaccatgaaaaggaaaactcagtactacagctactgtgaatttaacacagtgacaaccccaaggtctttgttgggtgttttaactacactctcatcaatcctcccttcactgacccgatgagaaaaccggggcttccagtgaggttggatatagaccaaagatggtttgattttaaaatcaatcctctttcagccaggcacagtggctcacgcctgtaatcccagcactttgggaggccaaggcgggcggatcgcttgagttcagttcaagaccagtctagcaaacatggcgaaaccccatctctactaaaaatacaaaaatttgccgggctaggtggcaggacgatctcttgagcccaggaggtcgaggctgcagtgagctatgatgacaccactgcactccagcctgagcgacagagcgagaccctgtctctaaaaaataaattaaaacaaaaaaatcccctttctgagttgttcattgaaacacctcagctggtatacattttcaatggacttttgaattttgctttcctaacatcagaactcctgcagtcacgctggcctgagtgagaattccaccgcatataaacagctagcagcggtggggcctcgggcctcaacctctctgggcctccccttccttccctgtaattgggaataactgtcgactcactgggtgctaagcgaatgacacgacccggcacaacatctggcactgccacccaataaatgttgatggccacccctaacgccttcccctcctgggcttgcagccagctcgagggtcgtcctgccggaagtctgtccacccagaggagccaacttcttgaagagagccgaacaggtcgagggaggccgggagcgcggaagagagagaaggagagaaggaggaagccgcggcctgcaccttttggtccagctccaggcgatagggcacgggctggatcctgcggcgcggtcgggcgccggcgcggggcccgggcccggagctgggcaccacaaaggaaggcacgcccagcgcccccgagaagctgaagccccacacgaagacgcgatcggcgcgggcagcgcgctcgcccacgtactggaccacgggcacctccgcctcggcttctgccgcttcgcgccggctccgggagcgcccggccgccgtccagtgccctcgccccagccccggcccgctcagccgccgccccagccgagccccagccaccaacgccaccagcgccatcctccgttccgcgcctcagcagcctctgggcgccgccatcttgcgtgacccttaacaccagtcctcgccggaagaggctacggccacttttactcctggttgaaggcaaaggcgctgacggcagcccaaggctcagggaggcgtggcgtggcgatggtgaggggcggggttaggggcgggattaggattcttgtcccttagcgaaactgcgtgtcctgttttgctcccttgctattgccccgcgacatttcttacctggccttgctgcagccgtctccgctccggtctgctcccacgccgccccaggccgtcctccagcgacagcgagctggagtggacgattccctgctgccttcgcatcccctgcccaggtcccctcaaacctatcgacaggctcactgcaacctccccctcctgggttcaagtgactctcgtgtctcagcctcccgagtagctgggaccacaggcgtacgccaccacgcccggctaatttttgtatttttagtagagacagggtttcacgatgttggccaggttggttttgaactcctgacctccagtgatccacccacctcggcctcccaaagtgctgggattacaggcataagccaccgcccccagcctgtgcaggcctgttttatggaagatgactggggaaaacccactaataaaatgtggtgaccacaagactgctcatggaaagcctcttactacagggagtaaaattcatgaaggcactgaaaccaccagtctcccgggctatgaaatgtattctctgcggcggacccagtcttccagcactttggaagacaaaggtgggagaatcacttgagagttcgagaccagcctgggcaaatagtgggaccctttctctacaaaaaaatttaaaaattagctcggcgtgatggtgtgcacctgtggtgccagctacttaggagactgaggcaggtggatggcttaagcccaggagttcgaggctgcagtgagccatgattgcaccactgcactccagccaggacagcagagtgagaccctgtctctgaaaaaaaaaaaaattaaattaaatgtaaatataaaagtaaaaataaatgtgtctatggacccgcctggtagtaagttccctgccaccatttgggatagataaacttagccattcacatcggtccccttaccctgtctcgacccagccagtattcaatcagaacacacactgtttgccacatggaattgtagatgctagtgccaccttcaaagatgtaaaagattcagaggggtggtgattcctatccaatgggtagctccccattgagttcacctgtttggctcctaaaaaaactgatggattggccaggcatagtggctcacacctgtaatcccagcattttgggagggcaaggcaggcacatcacgaggtcaagagatggagaccatcctggccaacatagtaaaaccccatttctactgaaaatacaaaaattagctgggcgtggtggaacgcactgtagtctcagctacttgggaggctgaggcaggagaatagcttgaacccgggaggcggaggttgcagtgagccgagatcgcaccactgcactccagcctggcgacagagcgaggctccgtctcaaaaaataaaaaaagatggactgtggtaggggacaggggaccaccatacatttaggcaagtgcatggtccaactcatagctgctgtgtcaagcgtgccgtctgtttttttgttcgtttgtttgttttttgagacagagtctcagtctatcacccaggcttgagtacggtgacatgatctcgactcactgcaacctccgcctcctgggttcaagcaattctcctgcctcagcctcccaagtagttgggattacaggcgtgcacaaccacacccggttaattttttgtatttttagtagagacggaatttcaccatggtggccatgactggtccccaactcctgacctcaggtgatctgcccgcctccacctcccaaagtgctgagattacaggcctgagccaccgcgcccagccatggcatctgttttaccagaagagatcaacacaccctctgaaacatgatacaggacactgatctggtgagtgggttcttttcaatccctaacagaaaagaggaccaaaa

SEQ ID NO: 587139 - DNA, 4001 bp, Homo sapiens
tggcttcgagaagaccgcagcgtcctttcacctgctcagagatctgaccacccctctccctccatcccatccctcccccagtacccagcagggacctttggtgagcctgaaaagaaccatttgccatcctccttctccctgccccttgccaccacagtgaagacagttgagatcctccaatgtgagaaggtatatgtctgtatttgcaattccacatatttctgttttcaacaaacctaatactcctttcacttaggggaaaaccatggatagaagtttgagcctaagaggtcaagcgcacaggctctgtggtcaaccagacacagggttctgactccagactctattattattccgattacagaggtttggggcgcagttatatcttatttaacacagggcaacttagttaacctcccctcgcttagtcttctcatttcccctctgtggatgggtggagcctcgctggacagatgtgaacatacagtgagataatgtacttgtaatgtctttgcacgcatctggcacagagcaagaattccatcagttattattatcacgatcttcgtgattatctgcagttcgtttgagaacatgagttacaagctcagaaagggaggaggtagtctgtacctaagtacgtatctgccttggataaccccacgcatcctggaaacctgcctgtactcaggtaggtaacactcactctgacgttggggacagctagtgtccaatgacctggcccaggtgtgacaagagcacataaaaagtctccctcttctcctgaagtactgagcacaacattttagatgggacagattcagacaactgtcactaatgggatgccacatctctctgtgctacattctggaaacttcgcaggcccaccctgagctttaacaatcgcccctccgcagcccccaaggagaaacacaggcggcaggaagggaggagtcctcattcttagctgagcagctcgcctcatagacagatgacatattcctcccatatactacctaagcgcattagctccgcgacctggggccttgactttgtctgcagacatccaagccctccaatctcccaggttccctactggtaccccaccaaacgctgggctctaagactatttcctcctacacgtctgcccgcgcgcctccagtcccatgtggcccctccactagtttctgcgctcgggctggagtcgccagggaatgatttccagtccgcacgcggggaccgggagccaactgtactgacatgtttccaggataaaaccaaatttgcaggtggggcacagaaaagaatcaggcaagttgttctttccagcagccccggccatctgcccgaaacggggcaggaagggtaagaaggagcgcgcgggagccagggtgtgccggctcccaggcacagggcgcagcgcgcaaggaccctggggctcaccctgtgcccggcccgcccgcgtcgagccccggaggcgccggcgtgcgtccttaccattcagctgccggtacacgatgtcctccagcagcgacaggcgcttcaggaccgcatcctggatggggctggcgctgtgcgcgctgaggttggccacctcggcgcgcggccggatctcgtggaaggcgtctccgctgcgcaccgcgatgggccggcacttggccaggaagagcacgaagccggctaccgcgatcaagttcaacaccaacagcactttgactcttctcagtgaagccatcaaacagcccggccggccctcgccccggacctgcgccccctcgggctccggcgaggcgcggggcagccaggggccgtgcaagcctcacacaccagacggccggcagggatccaagcccctgctcgtcccacctcaaggatgctcgggcggcggagacggctgggaggtcggattggtggtggggagaacggaatcgctcacatggaagtcctcgctctgcagaagtgctccccgagacgcctgctcagtccacggcgcacggccccgtccaggcgtctccgcgaaaggccagggatttgagggtttctcttctgcaccagcaagtggttcgcctctggacctctagccgccggcgccgcggactccgaggccggcaggcggggctgcccgggaggcacagagggagcggcgcacaggtgccggactcagggatcgccgcccgcccacggcggagcgcgccgcgcctggggccgcacagcctcccaccttggcccgcaggcggccgtcgcggcgcgccacccgcgctcttcagcggaagacccgctcccccgggcaggcgcctttgttccgctcaccgacccgctccatcgcgccgggcagaggggaagcccgctcggggagcccgcatcctccaggctccgcagtcacgctcaagtctcaattactctcaaagtgggggcagcactagggggcgggcgccgggccgagcgctacgtcctctccgccccccgcgcggagtccaccccaccccgccggcaaactcaccagcgctcacagcgccgccggctcccggacacgttccaagcccccaaaccgcgccgagagccttcggggccttcagggcacaccggcctgtctcggagctggcgcgtcgcgaggctggccggaaggagtcggacctcaaaagtcacagcagttctctaccccctcccaaaacgtcgcgggcagcgcggcggggaggtacgcgtgccgaatcaccctccgctcgccagatccggccgcgcggctcgtcccgcgcccccgggagccaaaacgccgagtctcccaattggcggacgcggtgacaccgccgctgcggcaccgagagccacacagccccggagctgaggagcccggaggggacgcgcaggtggcggcggagggcggggcgcggcccgaggggagcggcggcggcgccagctcctcctccgccgctcttcgccaccctgtccccgagaggctgtcggcggccgccgccgccgcccgcaggctgccgagcgcacagctccccggttcgccgactcgtgcgcgcgcgcacccgggcagggcgggggcttctggagagtggggaccgcgcgggatggaggcagtcaaggcatgctggctgcggccggcgctggagggaccctttagttctcagtactccctgagcgggcgggttcgttccatcccggttggcgatgaagacatccttttctgtgtgctcgcggctccgcgctgcgtggccaggaatggctagagggaaaatctggcctggaggctcggattctgagaccttcggagccaggccgggcgtgagcgggcttgggggggttctctgcgtgcaagaattctaacctccccagtcactgcttctaggcccacccgctgctctgttcaaattttattataagaagcatattcatttggctcctggttttccactacctcttcctcttcccaaaacccaggaactcgaaatactggaattcaacgcccccccaccccggttgatccatttaattccttgggtctaaaatagaaatcaggccgccaactaataaaaatcgggcagcaaagctaaatggagctgatcgttttcccctcatcattttgatctcattaaagtttttgtttttgtttttgcggttgttttggttttttctggggcttggtttcttgttttgtttttgcctgtgtattattttaagttttgatttttaacatagaaatgtatatgcaaaaaaatagtctttttatttcattcccttggaattctctgcctgggtgcaatcgggtcctcagggcgcatgctttgtaaaatctacctgaaagtggacacaaaacagttaaaaaggcccaagggatgatttttagccacacatgttaggcaagagagaggctgtgtgggaagaaacttgggttactgagcatctcatggagtatccagttgagttgggtgttattataaccacactacagatggagctagcacaatcaatggaagcttctgcaaaaataatttttg

SEQ ID NO: 587140 - DNA, 4001 bp, Homo sapiens
tcgggcgcgaggaggcgcgcctgtagttccaactacccgggaggcgaggttgcagccactgcagcacttcggcctgggcgatagaatgagagcctgtctcacacgcacaaaaaattatcaagctatttcagccggtgtggtggcgagtgcctctagttccggctgctggggaggatggcttgaggctgcagtcggcagggatcatgccatggcactccagcctgggcaatagagagaccctgtccctaaaaaaaagaaacagtatccaatagctatttatttatttattgagtcagggtctcactctgtcgccaaggctggagtgcagtggtgcgatcgcagctcactgcaacctctgcctctcaggttcaagtgattctcctgcctcagcctcccgtaggcccggctaatatctgtattttcagtagagacgggatttcaccatgctggccaggttggtctcggaattcctgacctcaggtgatccgtccacctccgcctcccacagggctgggattactggtatgagccatagcgcccggccagtaaccatttactgaaatagggctagtctctcagtgagagagcacggaaaaaccacaaagtatcttttttttttttttttttttttttttttttttttttgaaacaaagtcttgctctgtcgcccaggctggagtgcagtgccgtgatgtcggctcactgcaacctccccctcccgggttcaagctattctcctgcctcagcctcccgagtagctggggttacagaaacccgccatcgcgcccggctaattttttccatttttagtagagctggagtttcgccatgttggccaggctggtctcgaactcctgacctcaggtgatccgtctgcctcagcctcccaaagtgttgcgattacaggcgtgagacaccgcgccagcttccccccgcccccatcccccccccttttttttttttttaacgactcgaggtgcgctggctcacgcctgcaatcccaacagttcgggagacgaaggcgggaggatcgcttgagccctgggcttgggccaccttgggcaacacagcgagaccccatcgcaacaaaaatttacaaaaaaaagccaggcgtagtggcgcgcgcctgtggtcccaactactggagaggcagaggggagccaccacacccggctaatttttttattacttgcggagacgggggctcgctacgttgcccaggctggtctcgaacccctgagctcaagcgatcctcccgcctcagcctcccaaagtgctgcgattgctgagattacacgcgtgagccactcccacctggctacaactcagtagttatacaaactaccctctatgaaattcagacaataatacaccaactgctgtcttggagatttattggcaacaaggcgccacgataagcatcctacggccattacttccttccccccaccaggactgacccctcgcccgtacccaccgcccagcgcctcttttaccacatgtttaggacaaattgtcacattcgactttgaaaaccacccacggaaagcaagcgcgatcacccctacctcaacgctgaggtaccgaggcccagagaggtcggcaacttaaagttgatttaccagagacagaaatcggcacccacccgggtccttcccttcccgcacccccaaattctacggcctttccgggcaacgccagcaacaggggcaacttgccgcttcccgacccccggacgccccgcagtattcaggctcccctcacttgcgaacgtatttccgggcttctgtctcgtcataaaactgcgaaaaagagaaaatggcatgtagaggaataattcagacgcggtggccgcagaagtggggagaggggtgtccgcgggccccgggacttaccagctctgggggtccgccatgctccggacgccggccgcgggacgccattctcacgcctcagcagcacacctgcgactggcgcctgccggcacccggtttttatgtcatcagcccggcgaccgcttagtaatacgcatgttccacccccacgaccgccccgcccccccctttacgtgactggccacagggcgaccaaccgactcctctcattggccggtttctcttgcaccgcctgccgaatcaattcaacatggcagccatgcgctggcgatggtggcagcggctgttaccttggaggttgctgcaggcccgtggctttccacaaaattctgcacccagcctgggcctaggagcgaggacttattcccagggcgactgctcgtattcgcgcacggcgctgtatgatctgctcggcgtcccctccacagccacgcaggcccaaatcaaggcggcttactaccgtcagtgctttctctaccacccggaccgcaactccgggagcgcggaggccgccgagcgcttcacgcgcatctcccaggcctacgtggtgctgggcagtgccaccctccgtcgcaagtatgatcgcggcctactcagcgacgaggacctgcgcggacctggcgtccggccctccaggacgcccgcacccgaccccggctcgccgcgtaccccgccgcccacctctcggacccacgacggttctcgggcctcccccggcgccaaccgcacgatgttcaactttgacgccttctaccaggcccactacggggaacaactggagcgggaacggcgcctgagggcccggcgggaggcccttcgcaaacggcaggagtatcggtccatgaaaggcctccgctgggaggatacccgagacacggctgccattttcctcatcttttcaatcttcatcatcatcggcttttatatttaatcggagagagaagggaaggggagtgtccccagccaaccccccagaaacggccttttttcctgcctctgaacccttggccattgatagtctacctttgctgggatccgaaggaactgtactccccctgccctccccgacccgcccagcttagccgatgacctgcacatcgctccactgtggtccagaaaaggaggcctttcgatgtctgagaaagaggccccacgctgtagagtcccgaaagcccaggagtgaagggggttcctggagtctctagggtgcttcttccagagtctgtcttcttgcttccagatgtggtcaacttctggaacactcgctgtagctttattgtttagccccaagcaagatttatctcctcctgccccgcatgtgtatggtgggcctctgtaaccttgaaatgtgcaatgtgaccaattgttgactaccaaaagaaaaggtctggggttgtacgaaacttgtctttctgtgacttccccaagccgcaggtgagacctggtccagggtaagaatgggatcggtggagagcctgtcgttcctcccgctaaggtcagccccctggggcactcctccttatgttgatagcatgtaggagtgagaaaaagtcattgagcataaggaatgagtgttcctgtgcccatatttaatgtgtgaccttggagaagttactctgtaggcatgacagcagaggagaaaatcatttggcatcttgaggtctgtcatgctttattatccatagtttttggggggttttttgttttgttttgtttttgagatggagtcttgcgctctgttgcccaggctggagtgcagtggtgcgatcttagctcactgcaacctccacctcccgggttcaagcgattctcctgcctcagcctcctgtgtaactgggattacaggctcccaccacacctggctagtgttttgtatttttagtagatacggggtttcaccatgctggccagactgaggtctcgaactgccgacctcaggctgtctgcccgtccagcctcccaaagtgctgggattgcaggcatgagccactgctcccggccctattatccatagttctaatccacagggattacagcataatgctagcagggccaggttcatccttgagacagtgtggctggctgtcacctggtcctccctttacc

SEQ ID NO: 587141 - DNA, 4001 bp, Homo sapiens
ctggaggaagcctggagcccgcagctggggtaggggtgggagactcagtcatggttcacacctgccacttcccggctgggtccctgcaccttggcagggcagtggactctgcactgaatgtggcccatgcatttgctttttttaaatttttgagacaaggtctctctctgtcgcccaaactggagtgcagtggcgtgatcatagctcactgcagccttgaacttccgggctcaagtgatcctcccacctcagcctcccatgtagctgggactacaggcgtgcaccaccctgcctggctaatttttaaatctgtttgtagagacaggggtcttgctatgttgcccaggctgacctcaaactcctggccccaagctgtcctcctgcctcggcctcccatagtgtgagccacagtatgcctggtcctgtctcatgcatttgaaacagtgagtctgaggtgtggggcagggttctggggccaggggcagtaggagatttgaggaagtgcggggctaaggagtaggcaggggatctggaagagcctcacctcggcagccactaggcctgtgccacaggccacgtccaggatcagggcactgtggggcgggcctggaagggcttgtgtgaggcagtccactgcgaggcggggcgcacggtacagcagggtggccacatcctggggaaagagtgccgggcctacaacaccggtgccccagtgtttgggggatctcccttatggggtggtctcagagtctgccaggctaagctgtgtgtgttggggatcaagcctggctggggctagcgtgaggggacgcccaggcatgaggtgcttcccattgctaaagggccaggactggagagttagcccccagcccactgtacagtagactcagccctccagggaccttctctcctggccaagcggctctctctgctgagtccacatgactttttttttttttttttttgagacagagtctccctctgtcactcgggctggagtgcagtgaagagatcttggctcactgcaacctctgtgtcccggattcaggcaattctcctgcatcagcctccagggtagctgggattaccaggcgcctgccaccacgtgggcctggctaatttttgtatttttagtagagtcagggttgcaccatgctggccaggctggtctcgaactcctgacctcaggtgatccgcccgcctcggcctcccaaagggcttaggattacggcttgtgagccaccgcgcccggccccacagtgacttctcaatagcacctcctccaggcagcccccctcaggaggtcatggcccctgatggggctgccaatccagagctgtggggcgggttctggaaggggcaggactgtagggttcttagccaggcctcacttcgtcctcacagccgcccccgggtgcaaggctgattccccactttacaggtagaaaaatggaggctggtctagtggaggcaaggccccaaatgagtttacctggtcgtagtccggagcccagcggtcatagaaatggagcttttgggccaggtcggggatgccatgcgcggccctgacccgcgcccgcacctcgggcaggctcccaccctcctcctgggccatgctcctgtggggacaccgttgccctgtctcgaggtccacctcaatcgcccatcccctcctttcccccttccctcctcccccttcagaggaggctgccaggcctcctgccagcgcgacccctatcccggcccctatcccagatggggacactgagcgcagagagggcgggcttggatatttacactctggggctgcagggctgggggaagggcaaggtgggagaagggggtgccccgcggctggaggaaggacctatcttcctcttttccgccctccgactgagagagggtcggaggtgggcgacatccggagcgaaacggtctcgaaggaggccggagtcagaactcaccgccaatccagcgcgcctcgggcgtgtgggcaacaggactcggggcggggcctgtgttgcgaccctggccacaccctcaccgcctgcccgcaatgattggttttccgctgagagaaaatagccagtcaaaggaaggcgctggcagtctgcccgccccccccccccccgccagccaatgagctcaaggcttgtggccctcctccagccttggtagagcagggactgcggagatgttttcctgctgtgcgggtttaggggcttctcggtggtctggccccggcctccccctccaccgtcaggtagcagcacctccaccatccccctccaactgccctcctgcctcctgaagtcctttatgcttcctgaaagcatgaggtttgtaggcactggggagtctctgaattcttatgggcaggagagggacctaggattagctttcatttttactttgtatttatatttacttattttgttttatttttgttttgttttatgagacagggtctcactctgtcgcccaggctggagtgcagtggcttgaccatagctcactgcagccttgaactcaagctcaagccagcctcctgcctcagccttctgagtagctgagtagctgggactacaggtgcatgccaccttgcccggctttttaaatttttatctatttatttttatcttcgtagtttttgtagagacaaaaaatgttgtccaggctggtcttaaactcctagtctcaagcgattctcccacctctgcctcctggcaaattttattttaataattttattttaaaaaaccgtactggcaaattttattttaataagttaaatagccacatgtggctagtggctactgtattggacagcagagagagtcttgcggctggaagtgtgacctgaagatacgcagcgtcagcctccgtaacatcttggtttcctctaggagatgccctagggaagcttgtgagaaatgcaaaaattaggccggggcgcagtggctcacacctgtaatcccagcactttgggaggctgaggtgggcgggtcacttgaggacaggagtttgagaccagcctggctaacaggacaaaaccccatctctactaaaaatacaaaaattagccgggcgtggtggcgggcatctgtaattccagctactcaggaggctgaggtgggagaatagcttgaacttgggaggcacagattgcagtgagcagagactgcgccactgcacttcagcctgggtgacagagcaagactccatctcaaataaaaaaaaaaagtaaaaattctcagttgacctgggaccttctgaatgagaattagatttctgggactggggcccagagtttctgtgtttctacaaactctgcaggcgatttctaggcagctgaaggttcagaagcgctggtctagaggacctgtgttggaatcaagggtttgggcaggcagaatttggcaggctgttgcaggtgtccaggcaggaggtgatggttgcatgaccttgggtagaggtcatgactgcggagaggagtgggtgatcttcagagatgtttagggggtagaagtgtcgaagtgtcagagatgtttgaaccagagcaactccatcttgaatagcggctgagtaaaataagactgagacctactggactgcattcccagatggtgaaggcattctttttttatgagatggggtctcgctctgtcacccagactggagtgcagtggctcaatctcagctcatgcaacttccacttcctgcctcagcctgctgagtagctgagattacaggggaaaggcttatcagaaactcaaagaataggaccatttgtctttcaccttcctgtgacccggagccccctccctgcttcgagttgtcgccacctttctagacaaaaccaatgtacttcttacatatattgattgatgtctcgtgtctccctaaaatgtataaaaccaagctgtgccccgaccaccttgggcacatgacgtcaggacctcctgaggctgtgtcacaggcgtgcgtcctcaatcttggca

SEQ ID NO: 587142 - DNA, 4001 bp, Homo sapiens
acgggctggatttgcagagcttgggacgtggagggtggagctatgctgagaccaaagggtccagcagggagaagaattagggtagagctaggaaataggacctcccaggttatggtgctgagaccagggaggagggaaacctatgatatcccacatgatcccacaagatcatttctataggagaggaaacgggctcagagtggtgaagtgatttgcccaaattcacacagctagagggtaaaacagccaagatgcaaatctttttttttttttttttttttttttttctgagacagggttttgctcttgttgcccagggttgcccaggctggagtgcaatggtgggatctcggctcaccgcaacctccgcctcccaggttcaagcgattctcctgcctcagcctcttgagtagctgggattacaggcatgcaccaccacgcgtggctaattttgtatttttagtagagacaaggtttcttcatgttagtcaggctggtctggaactcctgacctcaggtgatctgcccgcctcggcctcccaaagtgctgggattacaggtgtgagccacagctcccggtcccaagatgcaaatctaatggtgtctgtctttctcaactgccccctgttatatgatcttggctgactgcagccttggcctcccaggctcaatctatactcccacctcggcctcctaagtgtgactgagttgtgaccccgaccacaagcatgtgtatgtttaaaagagatgaatgggccaggtgcggtggctcacacctgtaatcccagaactttgggaggccgaggtgggtggattacgaggtcaggagtttgagaccagcctggccaatgcggtgaaaccctgtctctactaaagatacaaaaaattagctgggcgtggtggcgcacgcctgtaatcccagctacttggaaggctgaggcaggagaattgcttgaacctggaggtggaagttgcagtgagccgagatcgcaccattacactgcagcctgcgcgacagggcaagactgcatctgaaaaaaaaaaaaagagagagagatgaatgagccaggcgcagtggcttatgtctgtaatcccagcactttggggagctgaggcgggcagatcacaaggtcaggagatcgagaccatcctggctaacagggtctctactaaaaatacaaaaaaaaaaaaaaattagccagggatgatggcacgtgcctgtagtcccagctacttgggaggctgaggcagaagaactgcttgaacccaggaggcagaggttgcagtgagccgagatcgcaccactgcactccagcctgggcaacagagcgagactctgtctcaaaaaaaagaaaaaatgaatgggaaaaacaatgattcacccataggagtgaccctcaatagagaaaatgctgccaggtgcggtggctcacacctataatcccagcacctcaggaagctgaggtaggaggatcatgtgaggccaagagttggagacccgcctgggcaacgtagtgagacaccatctctacaaaatacaaaaattagtcaggcgtggtggtgcacacctatagtcccggctacttggaggctgaggggggaggattgcttgagaccgggagttggaggctgcaacgagctgagccggcaccactgcgctccaggctgggcgacagagcgagaccctgtctctaaataaagaaaagaaaagaaaatgtcagcactgtagtttggagtggggcttctgggagatgtcagattattctggaaggcaggcagccacctcgttccactggatgggacaggcagggcttgggcccggcagctctgaggtggctctgtgaagggcctggtgtgtggtccccaccccacttacccccagcccccactcaccagcactgagagcctcgtaacctgcaacaggatccccaaaaggctggatctgactggaggaagggcctccatgtctggcctcccccacctactccagctgggagaagcagggtgacctcacagatgccacagggtggggaccaagttaccatggggacccggttgccgccagtgacccactgcctttacctggctcctgccgctccactgcttcctctgaaacctcagtccacgtctgagcccaacacggccaaggaggtcttagagcaaagcttccttcgggtcggatttccccagatcttggaacaggaatcaagtgccgcctaggaacggggttcatgcctggattcccaatgctttgggaggccaaggtaggaggatcgcttgaggccaggagtttgagaccagcatgggcaacatagcaagaccctgtcttacaaaaaaacaaaaaaagaaaaaaattaaccagccttggtcatgcacacctgtagtcccaactactcaggagtctaaagtgggagaatcgcttgagcccaggagatagaagttgcagtgagccaggatcactcaagcctgggtgacagagcaagaccctatctctaaacaaagaaaaaaaattgaagggtgatgagtttatttggggagtgggccctgcaagcatccataggaagtcagaaagtgaggcaaggggccaggcacagtggctcacacctgtaatcccagcactttggaaggccgaggcaggcagatcacgaggtcaggagtttgagacctgttgggaacaggcccccaaaatctggccataaactggccccaaaactggccataaacaaaatctctgcagcactgtgacatgttcgtgatggccatgacacccacggtggaaggttgtgggtttaccggaatgagggcaaggaacacctggcccacccagggcggaaaactgcttaaaggcgttcttaaaccacaaacaagagcatgagtgatctgtgccttaaggacatgctcctgctgcagataactagccaaacacatccctttatttgggcccaatccctttgtttcccataagggatacttctatgggaatctaatctaatctatagttaatctaatatctatagaaacaatgctaatgactggcttgctgttaataaatacgtgggtaaatctccgtttgaggctctcagctctgaaggctgtgagaccccctgatttcccacttcacacctctttatttctctgtgtgtgtgtgtgtgtgtgtgtgtgtgtgtgtgtgtgtttaattcctctagtgctgctgggttagggtctccccagccaagctggtctcagcagagaccagcctgaccaacatggtgaaaccccgtctctactaaaaatacaaaaaaaaaaaaaaattggcctggcatggtggcgtgcacctataatctcagctgctcaggaggctgaggcaggagaattgcttgaacccagaaggcagaggttgcagtgagctgagatcatgccactgtactccagcctgggcaagagagtgagactctgtgataaaaagagggaaggggaggggaggggaggggagggggagagagagagagagagaaagaaagaaagaagaaagaaagaaaaagaaagaaagagaaagaaaaagaaggaaagaaagaaagagaaagaaaagaaagaaaaagagagaaagaaaaagaaagaaagaaagaaaaaggaaggaaggaaagaaaagaaagagaaagaaaagaaagagaggcaaggacagatgagttcatgagcagggtttgagttcagacaaccggggctgatccccaaaatcccctggaaaatggtgcagaacgcacctcagagtcaccccacccaaggagcatgaatactggggtatttatcttccatgacctgtctgcttcctgttggacattaactcccgctgaacctccaatcttaccagcacaaacaccagagaaagccctccagcagatggtcgggtgggggtcttgcagcaggcggctcaagcagtgtgcatggaaactaaggcagaggactctggggtagggacagcaaaaaggaatccagaacaaataaacccctagacatgtgat

SEQ ID NO: 587143 - DNA, 4001 bp, Homo sapiens
gacatcataaggtttaaaaatttaaaacagcttatgttcttttttgccaaaactaaaaaaacagggcaaatagggccatttatgaaagacatggtccaaatgataagcaaacttcattgtggtacattaactgaatgtaacaaaagatgacccctttgaccctgacaccagaaacattgttccctgagtagagtgagcttagaatacaggactccattgtatctattggtccaatctgactatttggttctgcaatgaaaacgtatataaccatgatgttatagtgtttattggttttcatttttaaaatcaacctataaacaaatcacggacaatgtaagttacagagtaacttaaagaaatgtaaagagaatagcatagaagatgacagggtcaggaaattagtgggtttagggagaaatggggagtgcagggcagtagcttcttaatcttaactaggggaaagttaaaaaatactatctaaggttggcctagcgcggtggctcacgcctgtaatcccagcactttgggaggccaaggcgggcggatcaccggaggtcaggagttcgagaccagcctgaccaacatggagaaaccccatccctactaaaaatacaaaaattagccaggcatagtggcacctgcctgtaatcccagctactcgggaggctgaggcaggagaatcgctggaacccaggagttggaggttgcggtgagtagagatcgtgccactgtactccagcctgggcgacaaggggaattatctttaaaaaaaaaaaaaaaaaaaggccgggtgcagtggctcacgaagtcaggagatcaagaccatcctggccaacacggtgaaacctcatctctactaaaaatacaaaaatcagctgggcttggtggcggacatctgtaatcccacctactcgggagactgaggcaggagaatctcttgaaccctggagtcggaggttgcagtaagccaagttcgtgccattgcattccagcctggtgacagagtgagactccatctcaaaaaaaaaaaaaaaacaaaaacctaaggtttatataacataaaatacaaattaaggagtattattcaacacataaaggtaagtgatggggaaaaaataataggagtgaaggtagaagaaaatgtatgcaaattaaattcctcatctttcagtggggaatcaatagataagaataatacagtaatatctaacatttattgagtgttaatgaaagcaggcactggtctatgcacttttacacataatatctcacttaaccttcttaaacaccctataatgttgctattattattgtgcccattgaatgaattaggaaacaagacatgttaagtgagtttgccaaggtcatacaagtaaatacaaaatcctgaattcaaactcaagcacccaggctgcactctctcaacctcttaaactgtgacaagtcatatttaaacttaagtcagctaaaatttaataaacttttaaatatgtctcctcagccaccccggccccgcagcaggggccgaggccgcctccaggccgggcgcgaggagacgggccgcggcggcgaccccaggcctgaggctgcacagaccgcctctcccgaccgccgggagcccggcgtcctgccatccctcgcgccgacggccagccgcgcctccgtttcccttcctgcctcggaggcaccgcggctcctccgggaagccccggcccggccgagagaaccgctgcgcaaagggagggcggcggcggcgctgctagcggcgcccgaaggagtccgcgaagctcgaccacccctcgcccagacccagcgccgcaccgaccttcccgggctccatcgcttcccgcaggcccgggcggccgcggtgtcctcggccccggccaggcgcggtccaccccgaagaggccacctgtgccccgcacccttcgggaggcgcgtcccagcgcctagcaaccgacaagcaggagcagcagagggcccagaagcactgcccagcgtgccctgcggcctctcccagtgcgcctgcgcatccccggcatttttagcacctggcaggcaggagcaggggaaggccgagtggtcgctgctcggcgtgcccgcggcccctcccaatgcgcctgcgcttccccggctcctagcaaccgccaggcaggagcagcagaggaccgagcggtcgttggtctccccaaggggtaggtgcagtaccctgacttggggtgcaggggctcttgactcgccccaacccgccccgggttcccacgggaccggactgacagtcggggaagatagaaagggagagcagatattgaaaagagctttacgtttgaggccgagcgcggtggctcacccctgtaatcccagcactttgggaggcggaggcgggtggatcatgaggtcaggagatcgagaccatcctggctaacacggtgaaaccccgtctctactaaaaatacaaaaaaaaaaaatagctgggcgcagtagcaggcgcctgtagtcccagctactcgggaggctgaggcagaaggatggcgtgaacctgggagacggagcttgcagtgagcggagatcacgccactgcactccaacctgggcgacagagcgagactctgtctcaaaaaaaaaaaaaaaaaaaagaaaagagctttacatttgaataaggctttgcacttaacaaattatattcccatatgtcgtcttttgataaaaacaagcagtaaggtaggcaggaatcaacgttgagagactgtttttatacaacacgtaagggaaaatcaaaaactctcaggacctccgaactccttcagccaaagggaaagttagggctgaaagcctgaaaccgccttttcaaaattatgactgaggcagtaaaagaggtgtaacttaacccacagcatcttgcttctgacctccaagctgtgcttgttccttcctggcagtaggctgaactaactttgggagaaacttagtttatattttataatttaaacacagacggtaacagccctttcccaaagcaggccttcttgcctggggacttgattgcctttgtaggactgatgttagccacaagattagaaattacgttttaggagtagtttctaatatgcagctggaggctacaatattctgaccctccctaaactgctcctaagatcagtgcttgagatattttgcagaacctgcacttgatggatcagctggcaccacccagatcaataaactggctcatcagatcttgtggcccctcacccaggaactgataagggcaagaagaccgctttgactccctatgatttcatctctgaccaatcagcactcctggctcactggcttccccccacccaagttatccttgaaaactctgatccctgaatgcttcaatgctcaaggagatggatttgagtaataataaaactctagtctcctgcacagccagctctgtgtaaattactctttctctattgcaattcccccatctcgataggctctgtctaggcagcgggcaaggtgaaccccttgggtggttgcaagccgagtcgcccaacaccctcttccaaatgcacagctgttgctttgcaggctgcaaggctcctgccagccaggcccccgtgaaggcagggccgggcaccttggcccccaccagtctcccaggtgtaaatgttttgccagcctggagacctttcaagatgtgtgtcctcacttaaacaaagacacgccaattgtaactttagatctgcaacttaagtctgaaactacctctgcaagaattagaactgagaaaattatgacagtgaaagagatctaacctgactccatcttgcttctaacctccaagctgtccttgtccattcctggtcgtagaatagtttaactttgaaagaaagataacagccctttcccaaaacaaacccccttctctttttttattattattatactttaagttctggggtacatgtgcagaacgtgcaggtttgttacataggtatacacat

SEQ ID NO: 587144 - DNA, 4001 bp, Homo sapiens
tgcctataagtgtgtgtggctgtttgggggggatgtgtgttagtttgtggccacctctccattatccacaccaactcccaagtaaccggtaatccaaaagtcatccctgttgggtttgaaatatctgccctaactatgtaatatttttttcttttcttttcttttttttttttttttagacagagtctggctctgtcacccaggctggagtgcagtggcacgatcttggctcactgcaacctctgcctcctgggttcaagtgattctcctgcctcagcctcccgagtagttggaattacaggcgcccgccaccacgcccagctaattttttgtatttttattagacacagggtttcatcatgttggccaggctggtctcaaactcctgacctctggtgatccacccaccttggcctcccaaagtgttgggattacaagtgtgagccaccgagcctggtcaactgttcttatttaaaaccagcagtatcaggattagccaatattggggctaatatcctacctaagttggaaggcctgggcgaggccacagagagttcactgatgatggtggaaaagcccgcggtgataaagaactacccacagcagaaagcctcgcggctcatccaggggactacgtgtgctacctgggcagtaggagggccagagctgaaagggacctcacagtgcatgggacaggcccaggggaaggtgcacccgaggcacactgacctcctgagtgagtacagggcacaaatagaaaccaacaggcatgcaggcagggtttacagcaatgagagggctcagactgccatctacccctcactggctgtgcgacctgggcgaattacttaactcccagcctgtttccacgtctgtatgtggggtaacatagtgtgacgacggcacacttctccgcaccgctggcccttaacaagcgtctactgttgctgtgagagtcgtcaacaggaaatgccagcagaagagcacaattggccacaaagaggccacaaggcacctagagacaagggaaggtttgcttagaaggagtataggtgcaactttttgtttgttaacattgttgtcaagggagatttcctgccgctggttgacaaatgatcttcgcctttgtagcggacgcccctcgacccacccacccgatcccggccgcaccctgctctgcacccgcaccccacccccagacctcaccctgccctgccgtgcgctcaacagccagatgctgggcccagacaagcgctcttccgctagtgtgccgggatgagcgggggctggacttctagaaaggggtctgcgggcgcaggagctggggtccgcggtctggggccggtgagctgcggcgaagaggtcagggagggagtgggagggtctaccttgcaggagcgcgcagcactggccgtccgcggtgctccagagccgggccgtgccgtcctcgctgcccgtcagcaggcgctgcccgtcggggctcaggctcagccagttgatgcccccgcggtggtcggcgcagaccctcagggccgacccgccgccccccatcccgctggcagggcggggaacaagaaggagctgcgccccgctagggaggggcgccccggggtccgcgcggcggctccgtacgactgcggcccgcggccatcgcggggaacggggagcccgactcctgcggaggcacgcggcgaggggagggtgaaggaccctagctccccgctgcctccagcctctgggcccgcgaacccagggcgctgcggggggcggcccactcgggacctccgccctgggtagagtcctgggcgcgcgggcagagagaacccccttcccagcaccgctcggaggatccacaccccaccgggcgaacaaggcagctgcgtctctggtgcacaaggagccccccgcctcctctcgcgcccacggggctggggcggggagaggaacacgggaagccgagcgccccgcgccctccccggccgagcgcggaacaatacggtccagcctggctcctcctcagagaccacccctcacccgatcccctcccacttctcgggctgcgccccagcccccaccccgcgcgcctgcagcctccccccttcgtcgctgtgcgggtccgggggacggctccacgtgcgaccctcctagctgcccgggctgcgcctctgggctctggcctctgccacctccgccgccgccgcctgggtcccctgagccaagggccgggacgagggagggggaggcggacaaagggtcggggtcggggagaatcgcgcgccgggaactcatttggggcgcagctccaccgacccctcggctactcgcctccaccaggcaagccaggtcctcccatgctctgagccctaaggactctgcccgaggggctctcggggacttgggggcggtcccccaatggagggtgcgacagggaaagccccgagtccgccctccctgggaaatcacgcgcacacccaggattctactttggtctggccggagtggggatgaggtgcgagccgctgcggggtcggtggagccgggatgtcaagttcaccttccagccgccgcgggctccctcggcctggggcgcctctaatggaccccggggtcggcctgagccctcccggagcgcccggcggctggtttccattagggcagttccggcgccgacttcgctggggacggggaaggtgacccccctactcggatcccccaggtcctaaaggtagcaggatttccagaacgctccagggctctctcaggagcctagggagaagggcaaggaaggggcgtctttggcgagctagcccgcaatgggacgaccagtactgcacgctctgctctatccagactccaaaagaaaaccccatcgtggggtgtcccaggccgttgggtcgtttatacccagagtggcctaaccagagaaatccgttcttttccctcaaaacttgtaaagcagctggcgcctcagcttaaggagcgtggcccttccttagcaggtggtggagagaggggcagtggaggagcgttaggacgagatttggggtcatccagccggagagagggaggccgaaaggagagacgttttcaggaggtggaggcttcagcatttggatgcctgcgaggcgggagaggccggggagcctgtcttgtgctgagaggctgggtagactgttttgtcccctacaggctgatcaccagttcctcttaggaaccggtgaacctcagggggcccattgcacatccaggtgtgaaactgcggtgtggcctccaggtgaggacagactcggtatagtggggatcttgggcaggccctgcggctgcagcccttggggaaggtgaatgtgaggaccatggaggctgggagggtttatccggagaagtgccagaggaaacccaaactttctgggcagaggggccaaggagaaccaggcatcgactcttttggaaactaagaggggaggggtttgaaagcagtttgggagctggggacagatcgtaggttgggcgagcttgcctggtcgtgggccagaggaaagaaccaccaggagaaaagcttaactttcaaggaggtcacccaggattcctgagcaaggtggcacccatgcactctggttcctctcctctgcagccaacacaagccatcagccccatgctcagctcccagcaggcagagcgttcagaagcgccagcgccatcatcttgggagcctgcagtccacacaccgctgaccttacctacttcctctttccaggttgatagattttttgttcttggcttctccacctcccccacccctccttctccggtttggcacaaagtggccccctggtggggatgagccagccatctctgggggttgagtctggactgtagagctgtgggtgcagatgtcctcagccagcctgtcttcccttttctcttgcaggtcgtagattacagactctcctctgggaaattgcccccagatctaacaggagtacaagaagctgggtagattg

SEQ ID NO: 587145 - DNA, 4001 bp, Homo sapiens
tgaaagggacctcacagtgcatgggacaggcccaggggaaggtgcacccgaggcacactgacctcctgagtgagtacagggcacaaatagaaaccaacaggcatgcaggcagggtttacagcaatgagagggctcagactgccatctacccctcactggctgtgcgacctgggcgaattacttaactcccagcctgtttccacgtctgtatgtggggtaacatagtgtgacgacggcacacttctccgcaccgctggcccttaacaagcgtctactgttgctgtgagagtcgtcaacaggaaatgccagcagaagagcacaattggccacaaagaggccacaaggcacctagagacaagggaaggtttgcttagaaggagtataggtgcaactttttgtttgttaacattgttgtcaagggagatttcctgccgctggttgacaaatgatcttcgcctttgtagcggacgcccctcgacccacccacccgatcccggccgcaccctgctctgcacccgcaccccacccccagacctcaccctgccctgccgtgcgctcaacagccagatgctgggcccagacaagcgctcttccgctagtgtgccgggatgagcgggggctggacttctagaaaggggtctgcgggcgcaggagctggggtccgcggtctggggccggtgagctgcggcgaagaggtcagggagggagtgggagggtctaccttgcaggagcgcgcagcactggccgtccgcggtgctccagagccgggccgtgccgtcctcgctgcccgtcagcaggcgctgcccgtcggggctcaggctcagccagttgatgcccccgcggtggtcggcgcagaccctcagggccgacccgccgccccccatcccgctggcagggcggggaacaagaaggagctgcgccccgctagggaggggcgccccggggtccgcgcggcggctccgtacgactgcggcccgcggccatcgcggggaacggggagcccgactcctgcggaggcacgcggcgaggggagggtgaaggaccctagctccccgctgcctccagcctctgggcccgcgaacccagggcgctgcggggggcggcccactcgggacctccgccctgggtagagtcctgggcgcgcgggcagagagaacccccttcccagcaccgctcggaggatccacaccccaccgggcgaacaaggcagctgcgtctctggtgcacaaggagccccccgcctcctctcgcgcccacggggctggggcggggagaggaacacgggaagccgagcgccccgcgccctccccggccgagcgcggaacaatacggtccagcctggctcctcctcagagaccacccctcacccgatcccctcccacttctcgggctgcgccccagcccccaccccgcgcgcctgcagcctccccccttcgtcgctgtgcgggtccgggggacggctccacgtgcgaccctcctagctgcccgggctgcgcctctgggctctggcctctgccacctccgccgccgccgcctgggtcccctgagccaagggccgggacgagggagggggaggcggacaaagggtcggggtcggggagaatcgcgcgccgggaactcatttggggcgcagctccaccgacccctcggctactcgcctccaccaggcaagccaggtcctcccatgctctgagccctaaggactctgcccgaggggctctcggggacttgggggcggtcccccaatggagggtgcgacagggaaagccccgagtccgccctccctgggaaatcacgcgcacacccaggattctactttggtctggccggagtggggatgaggtgcgagccgctgcggggtcggtggagccgggatgtcaagttcaccttccagccgccgcgggctccctcggcctggggcgcctctaatggaccccggggtcggcctgagccctcccggagcgcccggcggctggtttccattagggcagttccggcgccgacttcgctggggacggggaaggtgacccccctactcggatcccccaggtcctaaaggtagcaggatttccagaacgctccagggctctctcaggagcctagggagaagggcaaggaaggggcgtctttggcgagctagcccgcaatgggacgaccagtactgcacgctctgctctatccagactccaaaagaaaaccccatcgtggggtgtcccaggccgttgggtcgtttatacccagagtggcctaaccagagaaatccgttcttttccctcaaaacttgtaaagcagctggcgcctcagcttaaggagcgtggcccttccttagcaggtggtggagagaggggcagtggaggagcgttaggacgagatttggggtcatccagccggagagagggaggccgaaaggagagacgttttcaggaggtggaggcttcagcatttggatgcctgcgaggcgggagaggccggggagcctgtcttgtgctgagaggctgggtagactgttttgtcccctacaggctgatcaccagttcctcttaggaaccggtgaacctcagggggcccattgcacatccaggtgtgaaactgcggtgtggcctccaggtgaggacagactcggtatagtggggatcttgggcaggccctgcggctgcagcccttggggaaggtgaatgtgaggaccatggaggctgggagggtttatccggagaagtgccagaggaaacccaaactttctgggcagaggggccaaggagaaccaggcatcgactcttttggaaactaagaggggaggggtttgaaagcagtttgggagctggggacagatcgtaggttgggcgagcttgcctggtcgtgggccagaggaaagaaccaccaggagaaaagcttaactttcaaggaggtcacccaggattcctgagcaaggtggcacccatgcactctggttcctctcctctgcagccaacacaagccatcagccccatgctcagctcccagcaggcagagcgttcagaagcgccagcgccatcatcttgggagcctgcagtccacacaccgctgaccttacctacttcctctttccaggttgatagattttttgttcttggcttctccacctcccccacccctccttctccggtttggcacaaagtggccccctggtggggatgagccagccatctctgggggttgagtctggactgtagagctgtgggtgcagatgtcctcagccagcctgtcttcccttttctcttgcaggtcgtagattacagactctcctctgggaaattgcccccagatctaacaggagtacaagaagctgggtagattggaaaacagcaccgaattcccctggaactgaggtctcccctaattcccctgaaactggggtctcccccaacctccaccttaagatagcaaagctatagagacccaggagtcaggctgggtccccagcagaacctgggctcccttcccctttcacacctttaactcttctggagcctccaagagggcctggagtcccgtggtgcccaggccctcctggacctaatcactttataaatggaaggcaccttgggaagggaacctggtagggtgtaggaggaaatggttaagctttaagaagcaagaaatgggcagtgtttaacaagtgaagggttggggggcgggtgcattttgtgccagggagtgctcattccccgtgccacagggactgccacaatttaccctgctggaaagagtgaccctctggggcctctctgagaagcatggtgaaagctggatattcctgagttgtgtgtgtgtgtgtgtgtgtaggtggtgacagagggaggcaccttgaggggcgcccacagggaacgtcatagccagagctttgtcagaattgctttttcccttctggcacaacctgcaatgctggtggtgagggtgcctgtggtcatcatcttcatagtttgggtacttactgtgtgtcaggtactgtgctaagtgctagt

SEQ ID NO: 587146 - DNA, 4001 bp, Homo sapiens
tcaacaggcacctggattgtgtagacaagataaaatcgaaacaggctggttttcagcttgtggattgtgggtctgtatatatcctccaagcggctgaagagccgacgctccaagtagctccaataatcccgaagggcagccaagtcatacacctgcattaactgctgcagctggtccacaatcttatccacctggcgagaaacatggatggagaaggtggtaagggacagaagggaattctcccctccatggaataaagctttttcctcttgtcatggcttctgggtgtaaaaaaaaatttgtaagttagcaatctataaaattttcaaaacatactaatgcaacggtttttcagtaattttctgatgttagagaagtggtttgaccctctagcaagcacggaaatttcaggtgtaaaagggctctggcccagaacctaagagatctggctccagatcttggatctgcctctgacttacttgatcaatttggcagtgtcatcaggccaggcaccgtggctcacgcctgtaatcccagcattttgggaggctgaggtggatggatcacctgaggtcaggagttcgagaccagccttgccaacatggtgaaaccccgactctactaaaaatacaaaaattagctggacgtggtggcacgcgcctgtaatcccagctactcgggaggctgaggcaggagaatcgcttgaacccagaaggcagaggttgcagtgagctgagatcgtgccactgcactccagcctaagcgacagagtgagactttctgtcaaaaaagaaaaaaaaatggcagtgttgcttaactgtagtttcagttacctcacatttttaaaaaagggggtggggtgaagaagagctatgagacaatctccacaattcccagatcccaaggatcatgaggaggtgcatggactgactccttcaagtcatcaaagttccacgaagccgtggtagctgctcagagtgtcagccaaggaagtcaccttcttgtgaggagcaattacagcagagtacagaatctggaaaagggtttggatatcaataccaatccaatgcccctagtttatagatcaggccactgaagcccagaggggtgaaatgatttgcttttgccactaagtagccactaactttggccaggcaggaaaccagatctcctaactcccctccagtgctcttgctgttagctcactgcctctcattgaagtcagtacacacaaacatacaaatcacacacatatacattccaagaacctcgcaatggaaaatcattttagagcaggggaagtttgggtttctctaatgtgccatgaggtcttccacaactgcagaagcaaaattgccgatgagtccctgacgaggccattttaaacaaacaccgcagatacttgaacgcagctaacgttttggactgcagacttctttgcttccactgccactggaagccaacacgaatatctgttgccaaaacgcaaccatctacctaacctcggctcctaaaacctcatcgccatcctggccaaggaggctggagtggagacagaaccctagaccaggagccggggcatcggggctccagcctcggcgatgctcctgactcggggggcggcttcaggcaggtcctgtccgtctgagggtctcagttcctcatccgtcaagctggggtcggacgcgctgaggtctccggcgccccggcgcgagtgacagcgccgctctcgccccggaggcagtgctggggggaagcccgctccccggctccctcgggccgcctctgcccgcgccgctcccgccggcctctcacccggaaccccttctccttgtccgccttgatctcggcgtccagctgccgcagtgtgtgcgtgaacccgcggaagagcaggtactcccggaccagctcgtcagtgcgctccacggcctccgccatcgcagcgctagcgtctttaggggtggtgcggtgagggacggaggggcggggcctgggagaaatggggcggggccggacgcgggcgccgagcacgtcacgccgcgacaggcctaccagcccgcacgcactgggcgaccagcctgaggccccgcccctcggccggctccccgcccgaggccccgcccctgagccagccccagcccgcctggccgctcgagtcacccttacccctcccgaggagtggcgaggggaggtcctggcggcgccggcggcggctttgtctgaattactgaaagtggcggctgccacccacgtcaaacaagactggatcttaagaacatcccaggtagtcccgaggcgggcagggggtgcggcgccctgttggttggcgttacatcgcagagctcccggtcccctgccctcctcctacacggaggaagctggagccctaagagcagagtgacctgcgtgaagccacaacacgcgtgtcctcagagagcgctaactcccccaaatctctgctttcattagtaagacgaattggctacacagcaagataaccaagatgcactgctaggataggcaaatttcatagcagtgtatgtacgctatagtcctggtttcttgtgaaaaaaaaattaggtatgtatgtgtgtacattttttaaattcaggaagattatacaccaagttcctatgcagtcgggtctctgcatcctcgggttccgcattcacggattcaaccaacgaggattgaaaatattttttccaaagttttaaaaataaaaaatagccgggcgcagtggctcacacttgtaatcctaacattttgggaggccagggtaggcggatctcttggccccaggagttggagaccagcctggacaacatgacgaaaccacatctccacaaaaaaaaaaaaaaaaaaaaaatgcggagcgcagtggctcacgcctgcaatcccagcactttgggaggccgaggtgggcggatcacctgaggtcgggagtttgagaccagcctgaccaacatggagaaaccccgtctctactaaaaatacaagattagccgggcgttgtggcgcatgcctgtaatcccagctactcgggaggctgaagcaggagaatcgcttgaacccagaaggtggaggttgcagtgagccgaaatcgcgccattgcataccagcctgggcaacaagagcgaaactctgtctcaaaaaaaaaaaaaaaaaaaaattagccgggcgtggtggtgctgcctgtggtcccagctacttgggaggctgaggcaggaggatcacttgagcccaggaggtcgaggctgcagtgagctgtgattgtaccactgcactccagcctgggtgacagagcaggacaccgtctcagtttaaaaaagaatacaatttttaaaaacacaaattaaatatagcataacaacaatttacataacatgtacaatgtattcagtattataagcaatgtagagattatttaaagtatacaggaggaagtgtataggttagatgcaaatactaggcctttttacatcagggcatccatggattttggtcttctagggagggtcctaaaaccaaccccctgcagataccaagtgacaattggagtggttttatctgagaggtgagactatgaaggacttcttgttttttactttctttttattgttgaagtttttacaaggtgcacgtatttttgtaagtaggaaaatagccaatatctttgagacttgcttctgcagaatggtgacaataggccgggcgcggtggctcacgcctgtaatcccagcactttgggaggcggaggcaggcggatcacaaggtcaggagatcgagaccatcctggctaacacggtgaaatcccgtctctactaaaaatacaaaaaattagccgggcgtggtggcgggcgcctgtagtcccagctactcgggggggctgaggcaggagaatggcgtaagcccgggaggcggagcttgcagtgagccgagatcgcgccacttcactccagcctggtcgacagagcgagactccgtctcaaaaaaaaaaa

SEQ ID NO: 587147 - DNA, 4001 bp, Homo sapiens
atatatcaaaactggaccaactttcattgcccttcctatacctttctttctttcctgatcaccacactgagaatctgtccagcgggttctgaccacacttatcacatagtgccttttggcataactactctctctctgctagactgtaagctctttgagggcagagactgtattatatgctccttacctatagggaattctcaaagaataaatgggtgattaattggctggtgctgtgaccactgaaaaacccagagatagacatcggagcatattagtttttctacaattcaaacaagcagcttagaatttcctggtatacatggtacccacacccagcaggtactaaagagacctgctgatagcaactgtgtcgcagtcaggatcacagatgttattatgatgatcttaagtgcctcaggctgaaccagcaggaagccgagctaataccaatcctaggactcacacaccatggcaccagagttgattagaggcaaccctgccccaactatggctttaataacatgaacgatgcaacaggacaccaatcacaacaagaataaaggaatatgctactagggactcttgcttatttgccatcctcagcttatgaagaagtatcaacaagtttcctctttgctgacatatactagaagaacctggaggttcttctattagaccaaggaggggagaggagttgtttctgggaggagcagcagcaaagagatatgactatgttcaaacagtgagtgtggacgttcttatattagaaagtattagtaaataatcacacaaaaatagagccagttggcgtaatggaaagaacaatagactaggccaaaaagatcaggtttctagtcctgtctgtaacattggctgagctgtgagacagtttctgtcttgggcccttcattttctcatatgtaaactgcacagctggagctctaaatctcaatattccttccagttccaatattctttaactagggacttttttctacccaagatttgtttgtggccaatagccaacagttactggcaccagtggttttgagaagacaactggcaaaccatttaattctgtccattttctggtaattttaatttcttcattttcatcaataaatgtgtaattgaggatatacacagcctggaggtgactgtcatacacacatgaatccactctatcagctaaactacaggaaagcagagcttggcgacctgcgtccctttttcccccaccccttacttactttgggagtagaggggctgtcactgggcagcagcttgctcctgctgtctggttgggctggtgtctcaggacatttgagagggtgtgacactggagtcctcaaaatctgatctggactttctttgtctttttccgaagatgtgtcgagctcatgcacgttgctaaggggagtccaaggtggtgtaccctttgcctctgaatcctgcacttcacccttctctggggtttggctcgaagcctccctgctttcttctactttcttctgcccttcaatctcagtctcctcacaataggaaaagtttaatttctgccttagttctttgtcaatatctttgtcatccatctcagccaaagagctttacaacacagacaaaaagctctatcagaagggaacgctgtgaacctacagaagcagggaggagaaaataacttaacctgcaggtttcgcgacggtagcctgaatttccctctaccaactaacagctacaaaacacggtgttaattttctgccttaagtaccaccaatctataagacctcagcttatcctgatttccattctgattaaagaaagctccagtgactctcggagcaattaaatgcagttcatgtacagaactcttctggatatgacacatagtctcccatgtgttaccaaatactagtgagaaaattgaattcctttaatttagcatggctttaaaaatacccattagccaatttgggaataagctaatattgaaaagaaattattttcactccttacacctgccatttataaatatcaccctctcctcccttctcctccccacccacccaatagctaacagcaggtaattacaatttagcatcacctggctatcataatgatccttaaacagcctctaacatatcttgactggagtttgtatccctgacagagacacagcttagctctgtgccaaacacacctgccctaattcaggcatctccctcctgcagctgttagctgttagcagttaaagcttctagggaattgaacaaaaatttaaactgacaaaagaaaggctagaaagatcaacaaaccatagaaacagatattgatcactggaaaacagcaatggcttctgccaaaaatgccttatattgtaaaatgctttttaatatctttagtacacattatttaatttctttctcagagaagcccctatgagaaggatggaaaactctttgaagaaaaaaacaactattatacaatcaagctgtccctcttctcttccagttatatagccaaaggaaataaaatcactatctcaaaaaaataccaacacacccatattcattgcagcattatcctcaacagccaagatatggaaaccacctaaatagccatggacagatgaataaagaaaatgtggtgaatacacacacacacacacacacacacacacacacacacacaatagaatattactcagtcataaaaaaggaaaggctgccatttgtgataacatggatgaaccagggggatattaagtgaaataagccaggcacagaaagacagatactacatgatcttacttatatgtggaatcaaaaacagttgatctcctagagggagggagtagaatggtggttaccaggatctggaaaggcaggggaaatggggagatgctgatcaaagggtacacactttcaggtataagatgaacaattctggggacctgatgtacagcatgggtgcatatgggtgtggtaaatttttggtaatcattacacaatgtataggtatatcaaaggaaaaaggcctcactgatatcacattatagaagaaaactatgtgagaggcagtccatgaaaaaggaaaatgatacactcatgcccctcaaggaggcttcagagggactgcaaatagggaattatttacatgataaacatgggcccaaagagagacaggaaccaaggccagcttgatgagtttgaaacaaatgttatttcccttctctttatagtctttgctacctgtcacccctcttccatttccctcttttcacagatctctccaccactttctcctaattccttccccattcccagccagaactcctgaggagggtaatccaaatgaaaactaactggggagacttcaaagtgttttttcagctcaaagccttctcatgctccagccctttgtaggtgggcacaccaattcatccttccttggcccttccctacagcctcccacccacacaaactatcccagataattcaacagggggtaaaatattgctcacaaaatgcagtaactcactgcccacctttgtcagagattcagtatcctacaggggccagtaaaaacagaatcatcaaagaaaaaggagaactcataggttaccagtaatgcaattattatcaactgggattctcagcctaggagtgtcttgtttacaaatcagcaagccagatgatagatttcttttctatagccttggtgttgatgaatttcccctcacatgccatggcttgtcattcctgcctctccaggcagctagaggctggctttgctctcagtaaaacaggactgactcaaaacactggctatattattgtcctgtagacagggcacaggggctggtttattaggtattacccaagtagaccaggttttctttttttttttctatcacctgctgctttttctctctcccttgctataattcttgattacccttatttatgactacattgtttgcctagggaggcagctatgcc

SEQ ID NO: 587148 - DNA, 4001 bp, Homo sapiens
gcccctccttcccaccttgtctttctcccttctggtataaaaagcacaatggatttcttaaactgtcaccaaaatactcagctgacacaacaagatacatttgtcacttctgagcacgtcaccgctagcacggacaccatcatcagctttggggtgactaattcgtggggctgactgccctctctcttcacggtttgtgccttaccactattattttaaccatggggacgacgcgaaccagcccactgaccgcacactgggcacttgtggcttattggggtgtggctgcctagaaaactcgccctcaagtgactgaggaatgaaatatctcccagctccagggaacatgaccctgtgtttatccctcagagcaagagcactaggtcagtccagagcaaacccttaggtaaaaccggaacccagtggggttttccctgcaagagaactgttttcccaacaggtcaagtcacagcctcacagtctatacctttaaggagctccacctccgcctgtccccccagtccaggcctggtgtggcacctgaccttctgtctgcaggagaaattgtaggatttgccgaaccctggcttcctggctcaaggtggggctggaatcgtctttccagggagggtccggggaagaccccagactgaactgcaggggcctccagggtggctccacatcacattgtccaaaagtggagtcccacgttctccagccgcgggtatctgccctcttgtgcgaggcagggcggcttgagcccagggaaggggtctggggaggacaggatgtagtcgatgctgaacttgaggtcccgggggtgctccttccccgggggagcggggctggcggggggctcacggcccggggcgccctcgccagcgctgtccggggccaggcgcccctgagcggcgggcggctcggacggacccgacggcccctgggcgccccccgcgcgcggacccctcggcccctcgcgcttggggccgcgccgccgccgccgccgccggtagttgccgttctcgaagaggtccagcagcgactcgcagccgcccgcgaacgtccagtagttgcctttgcccttctcgtggccctcggaccgcggcacctgcgcgcgcggagggaggggctgggagcggctccgctgcacggtgcgcccgcccgccttgtcccctcggggcgccctggaccggggcgagggtggcgcactgcgcaggtggaggcggccccgtgggctgaggacggacctccctgaagccgccgcggtgccctcccttccccgccaccgaggccctggcgcaggtgtcgccacgctgggacacccggggcccgtcgggggcggcgctcaccttgacgaagcagctgttgagggacaggttgtggcggatggagttctgccaggcgcgctggttggcgcggtaataggggaatttgcgcatgatgaagtcgtagatgccggacagggtcaccctccccgcggggctctgctgaatggccatggcgatcaaggcgatgtagctgcggagcccgggggtcaggcggggtctccaccgggcagccccccgtccttccccccatcccgcaggacgccgtggggcgcagaggcggaggagcgaggcggtgttggggaaagtgtccccgcagctcgcggtccccggcgccacccagaccccagaagctctttcccgacctgcggaggcccctccccgcgaggccaagaaccctccctggctctccccaaagtagggacaaatgcgtcctttctctgagctccgccgccggagagaagaaagctcccccgcccttccttcgtcccaggcaggtcccggctacctgggacccttgcagggggtgtcactgtcccccaaagccccagcaccgcccccgcagtcacctgtacgcgggccgcgtgagcctcttgtcttcgtcggagctgccggcggggtagtcgtcggcgtcgtaattgaagcagttgtagggatactgcgagctgtcaaacatcctggcgcgctcggcgcttgctgggggtcccggctgcaattgccgcctcctccgcgccgcccgccggcttcgcgcagagccctctctacgcggcccagcaacgactgcactgcgggcttctctccgccggagcgggaacctgggctcctggggtcccccgcctgcccccaccccgtcctctcgcatccaatcccggcgcgggggaggccccagccaccggtaaagcggccgaggggagcggtgtggggcgtctgggtgaccctctgaccgccgcggggggagggaggaggaggcggcgcgctgggtggtccgacgggcggggcggccccccctacccggctcccttcctggggcgctcagggcagggctcgctccgtccccgtccctggaggcagcttggggtgtcctcgcaggctccctgcactggcggaagtctcctcggagcgccccggtgccgtgagccccggtcccgtgcgccctgggcgcgcctgagactcggtggtgctttccgggcgccgggatccccgggaggacccttgggtctcagcagagagcacagcccggagccggcgtcgaagaccaggactgtggccccctccgccacctgcactgtccgccgctctccaccccagagcggccggggggtccaggccaaatccgtggggcccggcgggcgtctcccggccttggtcagggggtcagctgagccagagacccaggtcccagcgctttctgcagcgccctgtgctcccgtccagcggcctctcagtgcctggaagtgagtccccgccagggcccggagggagggggacttcccatccgcagagtcgccgcttcacgggtcccctctgggtcgaagctccgttttaggcgcacgcagagggaagagaagagaagccatccgggttaggaaattctggagaaaagtagagaggcgggatcttacgggagtagggggttttgtttcacagtagacatgagactgaatagtatttccaggaataatctgcagaattctgaccgacagccgtgtctgtgagtcggcctgaggccagaaagcccgggatagatacagccttcaccaggaaatgtcatcttcacagcagcaccttcagctctgaaacgacccagacagcggggcctgggggctcatacttgaaaccgcagcgctttgggagcccgatgtgggaggatcacttgaaaccaggagttagagaccagcctcagcagcagagtgagacccctgtctctataaaaaataaatgaatgaatgaagttgttaaaatacgaggtgactcatgctgcttgcacccagctggccccaggggtgcctggagctgtcgctgcccttggtaaaaccgcatctgcaggcgggctcagcgcccctggggtcccccttggaggagaagcctggcacgtgggggtgggcacatgcaactcctccttctgcagtgggcactgtggctgcctggcctcgctcgggatccgagtcacactcaagctgaaacacacttcagtgactccgtattgtccccttaatcggatgtcaaaactaaaaacgcggccagcacggtgactcacgcctgtaatcccagcactttgggaggccgaagcaggtggatcacgaggtcaggagatcgagaccatcttggctaacacggtgaaaccccatctctactaaaaatacaaaaaaaaaatagccaggcgtggtggtgggcgcctgtagtcccagctactcaggaggctgaggcaggagaatcacttgattcccacacgcgcaagggaaacagagagccggcgatcagccagtcgggagctgcagcctgttttggggacgttctcaaagaccagcagtgaatctcacaaatccagcggctctcagacacatccagcgaaatgtgtgagttctagacaacacgagcaataagacgccattaatcaaccccgaaaatagaacagtgacttaggttgtttctgatgcatatctacgtggcaaaaat

SEQ ID NO: 587149 - DNA, 4001 bp, Homo sapiens
ctgaccgctctgccccgattcaggtggccacaaattgcctgttgaaggttgcctgtctagaatttgaagtctgtgtgcccaggctgttaccctgagtaagtaatttaacctctgtgaccttttattttctcatctgtaaaaaaggcacaataacaatatctctgttaaagaattgctgcgaatcacaggaggtgatgcacataaaggcatctgcagtgtatgtttcatttccagttacttcttaactttcttttgcccctcctcgccacttcttttctgatttggtttttgtggtttttaaatgtatctttgaaatgcattagctggaaaactgcagcaatctgtgtgttaccacaatgagtggactttagcatcacatttttatttactttttcactgaggtagaatttacgttaagtgcacaagtctcaagggtataacttcagtaattcttaggtcaaggtgagaagcatttctagcatcccagaagcctccctcatgtcctgtccaggtattgacctggagtttatctccttgcaaggcccaaaaacaacctctcctctgacctctttcgtaatgataaagttaaaaaaaattgaagggaggcaggagtcccagtgataactattaatgctgggcacaagaagtgcactcccagtcctccctgtgaagtgagaaaagattctggaaaggaggaggcggaggggcacaaaccttctaaatcacactggtcatgccaaacaaggccctcatttacagccaaggaccccaggcacagaggcgaagagacagcctaacttcctgctacagagtaactttcctccccaatacagccagttacaaagcgccctgagtgtcagggattggccacactgtcccagggcgcatggaaccgctctcctggcctttccctgcagaaacttctttccagagggaggcgcacacacggtccccacgccgccccggcgcccgccacgggcacacccacgcggctggcacgccaccctccaaaggcgctgttcctgagagccggtgcctgcctgcccacggggcccgggcggcgctcctccaggtccagggcggccgggtgcccgccctccccgccaccttcagagagtgcgtgtcaggggctgggggaaatctgctctgccacctacctacccaccacctaatcctccaaaggaccctaaacccatttgtggccaaatgtacattgctggagcacagtctgactactgaccccaggggcttggagatgagcacgggaggggtgtccagagacctgcgctctgtccccatgagctgtgtgaccttggacaagtcacttcacatctctggagttggcttcctcactagggggctccttctgtattccccaagccacctccggctctgcaatttcctagctctcttttactccgccccagcccttcccgcgacagccccctccccagcgagaccccagccttttgttccgggggcgaagcggagaagagagagcgtcgcgaaggaccaggccgaggcggcctcggtgccaggggctgctcaccggggagtccagtccggagaagtcaccaagcaaccccgtggtgacctcgctccccaccccgcggtttgtttccgcccggcccggcccggcccggccggggcggcgtggcagggtgcgggtggggggcgtgagcgccgcgcggcacgtcgacaacctcctgggcccggggctgcagcccggcgggggttccccggccctcccacgccctcaggatctctgtcccgggccgggccactctgctccgggaccgaccagggcggcggccgccacaccgcccgttccttccaccctcgggcaccgacccgcacccgcgcgggaagccgctacctgcaggtggcggagccgggggctggactggactcgagctccggccgacgtctccgccgccgccgcctccggctccgggctccgtcccgcagcgcccgtgctccaagcggcgccgctaccgccgagctgcgctcggtgcgcccggctcgctccccggccaccggctctggtgctgccgggacgcggaggcggggccgccgcccccacctgctcgcaggctcctgcctgggagccgccgccgccccgcggcagggacacggccccggcgggcggggtcgctctgggaccctggaggcgggtcccaagtcggcgggcgcgcctcccgggtacagagtcccaagtctcagctgcggagagactgaggcctaaggctggaattccccaaataggagctgttgcgcgggcggcacacggcccagcacagctactctggggacacgccactccttgaatttattccaaaatgttgagcccttactaagctccaggcggtgtcataagcgatggggacgagagaacaagattacctcttgccctcgtggagttcacagtctagaaaaggaaagcgaccaatgggcgattacagcacaaccaagaggaggcagaggcctcctgagccggctcccagagggagcacctgatctaaacttggggtggggagtaggtcagggagggcttcttgaggagctgacgtcgacgagaaaaactgaagactgagtgtgaattagccaggtgatgagagaattatccgggtagcctggggaggtagattgatgtcccaggtagagtcgaagggaggagaaagcagactgaaaactgaaatagggccgggcgcggtggctcaagcctggaatccaaggactttgggaggccgaggtggacggatcacttgaggtcaggagttactagcctggccaacatggtgaagccctgtctctaccaaaaaatacaaaagttagccgggtgtggtggcgctctctagtcctagctactcgggaggctgaggtggaaggatctcttgaacccaggaggcaaaagttgcaatgaaccactgcactccagcctgggcgatagagtgagaccctgtctcaaaaaaccaaaccaaaccaaacaaagaaacaaacaaaaacaaacctgaaataagcttgaagaacggaaaaccttgcttctgtcacatttcttgttcaggcccttggaggatgcagaaagtttgtgtccgaggctgaatgcattgctgtaggtgctgagatcattgggtgaggattctgtattgcccatgtcctgggcattcctgctagtggaggagctaagcgggtactcgtggactgttcactcagcctcggtgtttgagtatctgccatgagccagacactctgcagggcctcagggcaaggtgtctaactctaaagttgctgctggtctggaatagaggagaaacctggcgctcagcgctgtgctgaggcttgtgtgaaatgttggggacccaggtgagggagcagccaatgccagcagggaagatctcacacgtggattgcagcctgtattcaggttcaagttctgtagtggctgctgtcaaagtatgttccccaagcagcccttagctgatctcttaattactcatgtttgtagctgggcaatgtgtcgaaagcaaggattaataatacacttttgatgtctttcactccagtgtcgtcaagaacatggttttctcttttgatttaggtgacgaaaggtctatgtgtagtgagtggaagctgatgaggcacttgctttccacctgtttgtcctgagttcctcttgccctttcctcctttagaatcataatagatgaccacaggtatggaacctgaagaacagttctccaacataaaattcataagccctcttacatgggtgattgttactaaaacaaaaacaaaacccaaaaccccaaaacatgacccagccactctccttctctggacctccagtgctaaagctcactaaatacataaccactagtattctaattcaaaaaggaagaaaagtcaaactattagagaagacattgccatgggcctagagagttcccatcagatctcctgagcagcccaagcatgagccagttggatggaaagcctgttat

SEQ ID NO: 587150 - DNA, 4001 bp, Homo sapiens
ctgcaacaggttgtccgaattgtttgttgttctggcttttggtcacacagaacgctacagtacttgggagttttcatctttacacgttgttatgctattatttctaaattcactgtcttcagaattctactctgtaaacagaaaaaaaaacagcatggcagagcagaaagaacattggaagagagctcaggaggcgagattccactcctgcccccgctccactattaaccaattccaaaacccagaccagcttggagcctttcggaaggatttcctcatctgtagttggatgaggtgatttgccccttccgactctcaatacagtcccactgtgcgactgtcttcacagctttggggaggtgctattgagtgcctgctgtacaccacccactgagtgttgtccattctacaattcacttttaatttcctaaagaatcttaccttctgctatgttaattccactcagccagtaacaactcaaccaatgacttagtaagatgccaaatgccccactccttctctttcctcacttcctcttactcacttccaagatggctctcctccctgccaaccccataactcacccttctctctccagaaagctcgctcatctattaaccatccccacaagtcctcctcccaggcagcatccaacccgtatcagtggggacaaacagcgttccgaatgcacgggctggcattaaggccttctcttgccctgaggatgacccacccgctggagctctgagactcctggggcactggtccgtaacgcctctcttggctcagtttctccctagctaggtcagatgccaaggttattgctaagtttgttacttgctggagaagacatcaaagttgatgtcccaaaaagaacagggagggccgcgcacggtggctcacacctgtaatcccagcactttgggaggctgaggtgggcggatcacttgaggtcaggaatttgagaccagcctgaccaacatggtgaaaccctgtctctactacaaatacaaaaaagttagctgggcacagtggcgcgtgcctgtagtctcagctactcgggaggctgaggcaggagaatcgcttgaacccaggaggcggaggttgcagtgagctgagatggcaccactgcactccagcctgggcaacagagcaagactctgtctcaaaacaaaacaaaccccaaaaaacaaaaacaaacaaaaaaacagtgagaaacgaagaaaagaaaatcaagagagagagaagggtcttaagacgatgaaaagacaaggagaagggcctgattcaaaggagagtgagtgggagacgctgagcaagcagcgggaagaggagacgagaggagaggaagcgacccacacccagcgctccacaggcggccaagacaagtcaagccccaaagttcggccccaactttgcgagaagtagttaagtctgaagccagggggcctccccgcaagagggtgaaagcagccccctctccaccacctctcccgctccgggaccgcagctccaggccagcacccgagggtctccctggagggcgcccctccctgcacgccccgggcccgcccctggggacgcctctgcgcgccttggcccgcggggaggccgagcctgcgacgccgccgagcttggcagcgaggccctccccctagcccgggtccgaccctggcctcaccccgactccgacccccgaccccggccttacgtgttgtcctggttgaagttggcgaagagcagctggccggcgccggcctccccgctctggctcgccaggttcatggctgggcgcgcggcgagtgggcccggccggggagggcgcgcgcgcgagggcgggtcaggctgcactcagggtcggcgccgggccccgctcgccgcctcggtcgccgccactcgccaccctgggatcaaccgccgcctcatcccgtccccgctcttgtttatgctccagagccggggcacccggtacgcctgcgcggccccgcccccgcgacgcacggcctcgagcggcgcagtcgcactgcggaggccccgccctctcaccgcctgcctgggcttgggttccggtggatcacgcaggcgtggggacgcgtcggggcgcgctgggcctggctgagggcgagcggcggccgctcatgcgcatggggcagagctggcgggagtctgttttctgcgtaccctcctcttaataacactcaatggccaggcacggtggcctgtaatcccagcattttgggaggccaaggcgggcggatcacctaagatcagaagttcgagaccagcctggccaacatggtgaaaccccgtctctactaaaaatacaagaaaaattagccgggcttggtggtgtacgcctgtaatcccagctactcgggaggctgaggcaagataatcgcttgaacccaggaggcggagattgcagtgagccgagatcatgccactgcaatccatccagcctgggccatagagcgagactctgtctcaaacaacaacaaaaacaaaaacaaaaacaccccaatgggccctccatgtgccaatcactgtgctgaatgcttctgcgcattaccttatcattttattattttgaaagacaaggtctcgctctgttgcctaggctggagtgcagaggctcaatcacagctcactgcagcctcaaactcaggctcaagcgatcctcccaccttagcctcccaagtagctgggaccacaaatgcatgccaccacaccctgctaacttttaagttttttgtagagatggggtgggggcggggggggtcttactctgttgcctaggctggtctcgcactcctggcctcaagtgatgctcccacctcggcctcccaaagtactgggattacagatgtgagccactgtgcccagccacattatcttatttgatgcccattacaatcctaagtagagaatagtatatcttaattttacagatttgaaaatcgaggctcagaaataattattagccaagtgctagatctgagactggaaacgtcctgtttctccaaggtccatactgtctgggttcctgggacagaatcgtcccttaaatttattcattcattcaacagtatttaggacgcacctctcatgtgaactaaataggcctcctcctttccctcagagaagttataatggggagatatttaaatataaatagaaggccaggtgtggtggctcttacctgtaatcccagcactttgggaggctgaggcgggtggatcacctgaggtcgggagttccagaccagcctggctaacatggtgaaaccccgtctctactaaaagtacaaaagttagctgggtatggtggtgggcacctgtaatctcagctactagggaggctgaggtgggagaattgcttgagccccacaggtggaggttgcagtgagccgagattgcacctctgcactccagcctggacggacgacagagtgagactccatctaaaaagtaaaataaaataggctgggcatggtgactcacgcctgtaaccccagcactttgggaggctgaggcaggtggatcacctgaggtcatgagtttgagactagcctgcccaacatggtgaaaccctgtctctaggaaaaatgtaaaatattagccagttgtggtggcacggccctgtaatcccagctactcaggagactgagatgggagaattgcttgaacccaggaggtgaaggctgcagtgagccgagatcatgccactgcactccagcctgggcgacacagtgagactccatctcaaaaaataaaataaataaatataattagaaactcgggggtacaatgagcgaatatatatatatatatatatatatatatattttttttttttttttttttttttttgagacggaatttcaccttcttgaccaggctggagtgcgatggcgcaatctcggctcactgcaacgtccaccttccgggttcaagtgattctcctgcctcagcctcccgagtagctgggattacaggtgtgca

SEQ ID NO: 587151 - DNA, 4001 bp, Homo sapiens
agtagagatggggtttcaccatgttggccaggctggtcttggactcctgacctcaggtgatccacccctgcgttggcttcacaatcttagttccttctagaacaccatgcagaccaatgttagaagcgccaaggatacagctgctttccatcaacaatcaagaaggagccaggccggatgcacctctccctcatactcaccccatctctactgggaattctaaccaggccatttagtttagtgttaggcaaatgctaacctacagctaagacaagtgtgctgtgaatagatttggaaagatttgctttttaaaactgatgctgagtgcagcacaggtaaaatgaaaataagggggttttaaaaggtctaacattttattgtgcactcagattactttgcaagttcctgctccatttggaagaaaatgaatgtagacatgcagacgatgcatcgctgagacaacttatgcaagaaagatgaccagctctacattagttggacgtgaacacaatttttaaatgctcaagatatgatgtcttataatttcccattctaaccaactatgtcagttaacagaccacttcctagtttcaactgcgtaaggcaagaacgtctctactgtgacttcacctagtcactgtatctcagggtgcagctactggctgtcatcatgtccactctacagccagcagcctaatcagctttccctgcagggagtgcgggcagaatcagattgccaggggtctcccgggtggtgctgttaccctgggcgtgagcacaagctgggagacacacacacgtgcgtgaaacacgcacacatgccacccaccacgtccttcctctgtgccagacagtcttattagtttagggggagataaagtaataaatccttcatcttgaattcaaagttaaactaacaatttacaaaaggaaaaaaaagtctgtaagttttttttttgagacgaagtctcactcttgttgcccaagctggagtgcaatgacatgaccttggctcactgcaacttccgactcccgggttcaagcgattttcctgcctcagcctcccgagtagccgggattacaggtgcctgccaccatgcccggctaatttttgtatttttagtagagacggggtttcatcatgttggccaggctgatctcaaattcctgacctcaggcaatctgcccgcctcggcctcccaaagtgtggggattacaggcgtgagccactgtgctcggccaaatatattttttttaagtaacatttataaaagcaaaaccaggtaataggtgaaagagactgccatccaccctctgggtggggccggggacgcctgtatgggagcagtgtggcagaggcccgggcatttgtcgtgaatggaatgggctgagcaaagctggtgggtgaggaaacagagctggtctctgtaggcaaggatctgtgcccggcaacgtggggccaggcagcaagggaatgacggaggggcatgccggtggggtgggcttgtcccagagtgctggagggagcaacagacaagcccacacccagctggggcagcgctcacctgcctgttgagcttcacagccagaatcgtgttggagtagctgtagttgcagatctcagttcccttcttaaagtggcaaacctttagcttccttggtgctttaaggctgacgatggccactaggctgctggagaacaatctctctacaatgcacacatcttccgtatcggctgaaatcacaaagggaagtacatgcgtgaacatctccacatggctatggccacaggcagaatctgcgctcaaaaacaaacacctgcctgggcgacacgcagggcacagcgctgagggtgcctgcggaacatgtggtcatggggtggggacagcccgggggtctgagggtcttgattcgctggagcctcaggagcatttccactctaaggatggcccctcacgagcattcacacgaaagacaaaggttcctttcagtcagttctgttgctggatttgaatggtgagtttaggaaccaaactcctaggtaaagtgaaagagtaaggtctaggggctcccttaattaagacacaaactactacgaaactgcaattgcttcccctgggttccatagactcatgtgctgagcgctagcctacgtgctcgcatactgaggctggccaaagaatcacacatgtccaaagtggcatgacacatatttattaaaaagatgtcgctattacactcatgtcacaaaacgctgacatacgttctaagaaatgccctgaaggggccgggcgcggtggctcacgcctgtaatcccagcactttgggaggccgaggtgggtggatcacaaggtcgggagattaagaccatcctggctaacatggtgaaaccccatctctactaaaaatacaaaaaatcagccaggcgtggtggcgggcgcctgtagtcccagctactcaggagcctgaggcaggagaacggtgtgaacccgggggacggagcttgaagtgagccaaaatcgcgccactgcactccagcctgggccacagagcgagactccatctcaaaaacaacaacaacaacaacaacaacaacaacaacaaaacaaagaaaagccccgtaggcaattgtgtcgtgcaaacacaaatctagatggtaggcctactatgcccctaggctgtatgctgtggcctgtggctcctggctacagacctgcgctgcgtgtgactaactggatactgtggccagctgcagcacagtgacaagtacttgtgtgtgtgaatgaaacatgggaaagctgcagcaaaaacacggcctgctcctctcacaggaccaccctcgcacccgcggcccctcgctgacctacgcgccatcctgcagtgcgacaccacttcaaatggaacgggccataaacacaagtacatcatcctaagctcttcacagcatccattcagtgtcttttcagttgcttttaccagaaagctgtcataaaccttctttctgacaacagcaagcgaccttcattcaaaaggaacagatgcaagcgtctgccacaaatggggagatggtggcagggtcggggggccagggaggacaggctctgtctgcagcttctctgctcagcagcatctcagactagcggccaccgtcttccaggatctgtcaacgaaaggcacgatcaggagggatcatgccagtgcgtggacacaggaatctttgtcagcggatacacctctagcacctggcatgcagcaccactcagacacgaggccaacccaactcagaagagatggtgcataacccagaatgtcaattatttgcagtaaaaataatttctctaaagatcagaccctggttctctgaccagtcccctctttccctcaggagattgacatggatactaagtcacggcagccctgcttgctaggcggtgggcgagaaagagggctggggccagatgcggtgcttcgcacctgtaatccccgcactttgggaggccaaggtgggaggattgcttgagggcaggaattcgagaccagcctgggcaacatagtgaggtcctatctctacaaaaaatacaaaaattagctgggcgtggtggtgcatgcctgtgtagctgaggtaggaagagtgcctgatcccaggaggttgaggctgcaatgagcggtgatcacgttcctgcatgccagcctgggcaaaagagcgagaccctgtctgtaataccagtcctgccccaaaaaggagggtaggactgaatgatgatcatggctggtgtcctgaggctgccaccctcacttctcaaatccggcagccagatgtgcaaatccaggggcacaaggcccttccccggccactgtctagcctctcactctccaggcaccccattctcaggtagtacttggtagtattaggggctgcacgcactggcccggttgcatcctgtacctgttgcctctagtagtcaccgcgcttaccactgagaatctaggcaatggctgag

SEQ ID NO: 587152 - DNA, 4001 bp, Homo sapiens
aaaaaaaaaaaaaaaaaaggattagatagcattagctgcttatctcctatatcaatcagtgagcaataaaagctcactgaaattttcatcctatcccattcactcccttatccaacaaatgtttattgagtgtacactatgtaccaggttctaaagccacattttaaagagtcgaggagtcaagttgatgataggatgtagatactgatccagaaatattttggctaacggctagtggcctctctgaaagtcagagccttcatccaagctcactttattctgtgagcttctccaagagggacaatggcggattcattgctgtacccctgccattgggcctagtacataagatcctgtttttgaacaaaatttattgagtgaattaacaatgaggaacatcctgagtggatatgtaagaggcctaaatgctggaactacagtttttacttcatttcaaggggaattggaagtggggaggcaatctccgggttgggggtgctggacaatatccataccttaggctgattttagggccaacggtggtagatgttttaaagaggtgtttgattttttaaaaaatcaaaaacatatattgagtctctgttatgggttagaaagtggggatagcacttactcaaatgatcatggaattcacagtctacttggcaagacagacaagggagcatgcagctataatacgtgcaataaatgtacaaagtagagtgtgctgtgaacacacaaaggaagattacttatttcagtcttggggatcagagtggggaggagacacttgaatgttaccttcattattattctgggaatctagcaccatctacgcatccagataaagcctttggggtgcactcagagggtattctgtcctgagagtcagagaccactgtgtcaaacattttcaaacacaagacacaattttagggcgtgagtggtcttgcatctcttttgtatgggctagagccttaggggtcattctgtccatatctccaaaacaaaggagacatatttctaggagctgacccagctgaggaagcagatttttcattcagtgaacagatatttgaatgataattttgttccaggcattgtgaactttcatgttctgagagctgccatacactcccaaatccctcttactgtctttatttgtctctctgtctctgtctcattctccatctttctctatacaaaattgatactcactttacagatgaggaaattaatttggggagattaagaaacttgctcgaggttactcaaaaacaatcaacctttagaggcccctcctttttttttttttttttttttttttttgagatgaggtatcattctattgcccaggttggagtgtagtggctctatcatgactcactgcagcctcaactcccaggcacaagcgatcctcaccctcagcctcctgagtagctgggactacaagtgtgcaccgttatattcagctgtattttttattttgtgtagagacaggggtctcactatgttgcccagactggtctcaaattcctggctcaaacaatcctcctgcctcagcctcccaaactgctgggattataggcatgatccatggcacctggccaagaccctgtttttttcactacaacatacttctgcatgcctaattcaaaacatatatatagtgtgtgtgtatagagagagatatgttaggtgttatatatatatatatgtaaaattttttttccctgatcaaatccccaaatcttaaaactcagattaccgtgtctttgggtcaaaattttttactggtgtctatggttccttacgtcacaattcacagatctctccattgaaacattgaaaaagttgttttgttctccaaaaataaacaaaacccaccatagggaggtcttttgagaagcccctgtgaagagggtctccctgaggcaagtggtgagctgcatgggtgcctttccatctttctggctttgccctctgtggtttttgcaggctgagaggggcagtggaaagagcactgggttgggttgggtaaccggggctcctgtcagcaggtgatgatcgtggactactcatttcaactttgagtctcagttttttcatttgcaaaattatcaaaatttctttttcagatctgaatctcttactggagctaccatagggctggagggaggagagtggtacgtgtgtgtgtgtgtgtgtgtgtgtgtgtgtgtgtgtgtgtgtgtgcgcgcgcgcacatggtggggagggggaaactgcatttgctgggggactgcaggaggaggaaaccttagccattgacaggaacttgtctacctgaaagatggttcagtccccaaggtggcataagccagggttttttggcgcccatcttgtcttaatatctccagcttcacttttgcttctggatttcaaggaaaatgaatctattttaattgcagaagtcatttaaaatggttgaattttaaaatataatcttgtcagatcacatgaaattttatttggagaatataagaagttacagatattttatcctgacatatgaagttgaggagctctttcataatcgaatttatgtctattaatataaagcattcaactctactctcatcggaggggattatgctatttagacttgatgaatgaagtaaaagatcaattccaaacatgtatacaactgcacattttaaattattgatttctttctcagcaagcaggagcttaatttcctatttattatattttgattgaagagacgacaaaatattcactgaccagtagaatgtgagacctaaagtttactgtactgtataaactttttaagcttctagtgtccatatgcataaaatgttgtaaagatcatatcattaatcatttaataaacacataaatgagagctaatattatgtcatttcatgatctgagcccagctgcctagattttgactagtgatgttaagaaaatcaccatatgactgcaagtttgcattggttactcaagcacctgtagtctctggagtccacatagagggcatacacttaaactctttttcctagctggaggtaaggtgctctgagctgtattctgggaaaaggaattagggaggggagagccagatttcaagcatactcatttcactcaaaagagctctctcaagatgctgaatctgtgactgttatcatctccaatccgctgagccaactgaaccagataagtagctagacagcaataaatcccatcttccgcccaagacagttgtagatttctagttgtagaatacaggggagcctcttccttctgatagttttctctcagtccctgggaaactcagcaaaaaaagtctgcctgcagagatatgccttggactctgcctctggcagcccatcagaggacgagacttctaagggccctgttgtaagaatttctgctgcagatcacagagacttatgtgctggaaactgataccagaagcaccccagctggtcttaactcccatgatagaacagaagaccagaggtgactttttacataactgggtccccatccattctattttaaattccacctggatgctacaagtgtggaacagagcacaggcttgtgaccactggctcttaggagggggtggagaatggcattctggatagcctgctgtcctttagtggccagaaaaacccgcaggaatgacagacttggaggaacagaggagacaccagcgatagtcccaggagaaagagcaggagttggaaagggatgatgctttgctttttaaatttccacaaccacagaagttaaaagttttttgtttactcatcctagcaattaaggttgaagaaggcttgtaaagtgtcagtagaaagtgacttatctcttaccagcatttccccagcaatccttaaaaaacttaaaataaaaaacagggtacctcaagatttttttaagtggtattttgtaggaattatgcaatttttttggaataagggaataaaagt

SEQ ID NO: 587153 - DNA, 4001 bp, Homo sapiens
ggtaagataattaaaatgtcactagcaaaaacataattctattaaaaatattgaatattgaaaattatgcatttagcacacctgcagtagagtttgagctaaaatctttgaaaattaaagtccattaaaacattaataacatggactagaagggaatcagcaggcgactttttttttttctttccagatgtttagtttggagtagaaacagtttcatgcccgctgtccaataaaccttttcaacagctgatgcatttcagcaactgtgaaaaacacatctattttttttctttctgtctcttttttttttttttttttttttctctctacggggaccagggctccttcggaagggcgtgccggccagaacgccgcgggggaggtgcgcggctcggcgggggtgcgcgcagggactgcgtggacaagggtcaaaggcggagggggaacggaaatgaacatgaaaaacgacagcgcatccttcagcgccccagtcctaacattctttggatctgttgatattccaggaacaatcctggctccctgtacctttatccttaccaagtcactacgcacgtggaagtggaactttgttttcctgcagcttcccgcgccgcgggagtgcgccgaggagggaaagatagaaaagccaaagaaacgagaagcgcacaagtggtcctgctcaggttagccgcacgttgggtggtcgcggacagtcgctttaaaagtcaccattattctgtcaactcggtgctcctaggagccaataaaggtggggcttcgctgcaattagccacttgtccggggtttggtgcgcagcggagttggttaaatcaaagcagatgcggcagccgcattccccgctgccgacatcatgtttctccagctggtcacccacgtaggggggcgctacggggtccgagggggtcggcggggtaggagaattagagttttttttccaactctggcggggcaccgcaggaaagaggaagagctccagcccctagagctccgctctggaactggggagtcacctccctccaggctcgcacctgctccccaggtctggcctttgtagctctcaatccccgtgcactaaagggcttcttctggaacttagagagctacaggaccacgtagcactatttactttatttgcaggaaccggtggaggagttgtcgccttccgtcccccaccaacccctaaggacccaggactcaccgctgctcagctcgtagccaaagagggggctggcgcccatcggggcggtagtggcggcggcggtgatcatgcagttccatctctcgtgtctgaactggctcccgcactcctgaatgcccagccgggcgccctctcggatgctcggcagcaggtacggtttcctcttgcacagctccttctggcggctgttcagcggcaaattggcgcagcccagcttctctggaaccccgaaggaggcaatgcccaaccacctgtaagacacggccgcccgtagcgttaagccgctccccaattccagatgttttccgaaaaattaggtcactcgtctaagggtccccgcccttctcccccagcctcagttgaaagttccctaggattgggcaccccttttgccacctacccgatgcttccctgccacctccatactcacatccagtttccttgggctccgtaggggaacagcacgagcagggctgcccacagcgcgcacaagcgggccagtcccaggagcgccgccctgtccatcgcccccgcatggagtcccccagcccagccgctcctcttttgcaccccctccccagaggcccttcgggccgcaggtcagttgtccagcaccaagttatccctcgccctcttcctccttgcatacaacattaaaaggccagcagtgatagggactctcagcagcttccccctcgtttgcagggagctgtaggagagatggagagagcagcctggggatctcctcctgcgcaggggtggagatgtgcaggagatgcgggagcgcccctcgcattcctaggtgagaaacttctgttgatgtatccgcgtctccatcgcccccggcctctcctcccatctcctccccctggccgcgcctggagcctgattggctgagcagcggccccgcatctcatcatctcgggacctcaggctcttattggtggagagcggctccgcggggggcgctccgggcactggcctcagggacagcgtgtccagacctgggtgtgtcatgacctttcctgctgtcacagtctccttagaacgggtcgttgtggggttgattcaacccgaagactaacaggacgctctgtcttagcaaccttgggggaaagcgtgggtttgatgagtcccacccatcccaccaacatctgggttaccctctgggtgtagtggctggaaaatgtcactgacctttttttcttctccttcacctcacaggagaataatctttttgagtcagagttggtaccgaacaaattaaccttccagtcccctgcttgaggtcccactgtcaggagactttagagagtgggtgaagtgctgtcaggcttacaatcactgtcatttatgtatgcatttattttgagcgaaagagaagattccagtctagcatctcatctgccatatttcaatcgtgctctgtgatttccttttccctatttgtcttatttcctgcagtccctgagaacgctgtaagtcccctgcagaagatggggacaaagaaagtgagaggtttctggagagttctagagtacatgagagatgtgctctgatctttttctccagtcctaccttacgattctcatggtgggagggtccctgcccttctcccccaacctcagttgaaagttcgctaggattgggcacccctttgccacctacccgatgcgtccctgcaggacagggctacacatggaagacacatttttaaaaacgtacttattaaatacctgctgtgtgcctagtcctgtgggaatttataaagacaagctctcttcccacaactgtacaaataaaccatacacaagtgtaaaagaaaatacgtttagatgatcagtaagagagattaaagaatctagcagggtactccctggagccgaagatagttcagaagcaggaagtgttccagttactggcagatttggaaggttagttaatcagtgttttgtaggatggaaggtctccgagagttatctgaaggcaagtgcaacgtgtttagctgtggtattgggaaagcctgcctcacctaattagacacaagaaatgtttctaagaagcattatctgtccttagagatcttttgaagtgttaatacattcccatggtggacgtatcagctcagtgggtacccaaagccaaaattacttaaataaaggatttggggccaggtgcagtggctcacacctgtaatcccagcacttttggaggccaagatgggcggatcaccagaggtcaggagttcaagaccagcatggccaacatggtgaaaccctgtccctgctaaaaatacaaaattatttgggtgtggtggtgcatgcctgtaatcccagctactcgggaggctaagacaggagaattgcttgaacctaggaggtggaggttgcagtgagttgagatagcgccactgcactccagcctatggcacacagtgagactccgactcaaaaaaaaaaaaaaaaaaaggattagatagcattagctgcttatctcctatatcaatcagtgagcaataaaagctcactgaaattttcatcctatcccattcactcccttatccaacaaatgtttattgagtgtacactatgtaccaggttctaaagccacattttaaagagtcgaggagtcaagttgatgataggatgtagatactgatccagaaatattttggctaacggctagtggcctctctgaaagtcagagccttcatccaagctcactttattctgtgagcttctccaagagggacaatggcggattcattgctgtacccctgcca

SEQ ID NO: 587154 - DNA, 4001 bp, Homo sapiens
gctggtatctgatgttacactctcctcacagacaggctgttctttccttactgaagagccttttaaatatttccattttgtagctctttttggcttttataaagatcctttggaaaaaattctttctattgttattaaggacactaaatgtttggaagaatcaaacagtgctataactccataaagtactttttgaaaagaaactttaacaaaaaattacatcatcatctctacccagatgttctctattagtcgtgaaatgtttagaaaggtaccttttatataacccaagctgccataggtgtcttttgaagcgatcaaacaaggagaatgtctttttcttgtattttcattattttatatgatcataaaatcgttacagctgtgacttccaaaaaatatatttaagtgacagctgagagacaatgtgacaaaaagcctgagcaataaataatgtttatacacccatggaaacagaaatagtcattttattgaaaaatggtcagtctgataaatcaatctttgatcctgtgtcagcaatgtcaaggctaaacgcctccctgttcaaagccggcttaggaaggaattgaacccctcttcccatcagcgcattgccttgctcctttgaagagctccagtgtcttcctaaaaatttccctgctctagtctgtaatttagctgagaccccttaccagattctttaaaaattagcccacgataacgggtgtctctgaatcaatattttaatatctgttctgaaacttttaggtgcaaggaaattacagggctatcaactctatctctttccaagaccagaaagtcggcagatggagaacggtttctagatggggagggaatctgcctttggaacttttagcgacctggtatggttcaacattccatcactatgcaaaaataaataaataaattgcagaccaacgtacaaaggaaagcagcaaagttactcttcgcggggacggttgtgaacaaggtaacatcttagagacagaccccggggtctgtagctttgcattaaagccatagtctctaactggaggcagcaaaatgttcttccgccccactggggtgaacctggaatgtggaaggacgggaaataatacaaagtcacacgctttaggttctacaactcctgactggctgaattggcccgtcgatttaccttgaggcagttttggcggggtgggggctgggatgggggaggcggttgtagttttcaaggtgaatttacacacacacacacacacacacacacacacacacacgtctgtgctagagctggagaccaggctagcacgtctctcaacaggataagaaattggctgattttgctgtcgctcagctggatccaaataaaccaaacatcggagctctcatttgagggggaatgtggttttatggagttgtcaaagctgaaatgatcttctgggaaaagagaaggggctcaccatggggcgataagagggcagtagccagggttcgggccagaatccgagactgctgcggccgcgggggaacgcagccaggaagggtctatgtggccaatgcggtccccattccgatctccaaaatcccccgcgcccgtgcgcgtggacttaccaccatgaagagttgacctcgggggtgagccaggtcaagagcagagggagccagagccagattccaccgagaggggcgttcatattaacccccttgcgtctgcatcaggtcagactccgtgtgcgggcgccatgcgtgcccagagcagaagcgctcagctccgggagcgcctcgtcacggccgccggcgcctcgccgcgcccccgccccccgctcgcgtctgcgacgagtggcgagactcgctgataaagtttcaaacgatgggcccagcgagcgataaaggccagcccggaccgcctcgcccacagcccaattccccaggcgcagcgagcgcctgcagcccgaaagctctgcgcgcctcccgcgcgccccgtccgctctgctcccctccgggcgcagccgagggagggggtgctgcgcctggcgggggtggggagaaacgcggggttttagacacgggtgcatgaaatgatggcaagagatgtctggggatgaggtgaggcggggaagggggaacatcgctgcatggttacgagcacacgcgaatacaggaacctttagggaagctccaggccaaagagcatccgtgggctctcggagcgtgcgttccggattgccgaggccatccgctggcaaacaagtccctgagcgtgcaatgtgaggaaacgaggaagggggccaggggataaggagattactatgcatgggatacaagaatccagagatgattctcaactcattgcttcgcttctctccctgaagctgggatgaagagctagcacttgtaaatttggagctgccgcgtctatgcagggcaaggttagggaggggccaggcctctgcgaaatgacctgttggctttgattccttggtgctgggcttaaatacagagcccatagggaggggaacttggagggtccatgaccctcgggacctaacccagcagtatctgccaaagcacccaggaaagatgcagtttttacgcacacccagctcctctccggagctgcggagcgcaaaagatcacatagagaggaaccgaggcagccaggcgttcgccgggggtgtgcgcccttgcacctcctgccgcctgggcgctcagcctgtgcgccttgtggaggttaagggaccctcggtcctggacctgggcccccgcccagccaagagagaggggcttgggcccgcgggtggagcattttgagcagtagctggcttgtagccgcgccgtttatcaccggaaaggaaggaagaccaggaactcgtggcggccgtgaactgttccattgctcttttcctggggcggagggactcactgcccgcccgaggagcgtgctctggggaatagagtatgcgcctgtgtgtatgtgtgggaggcgaattgttcgcagggcgtgggggagggggtgccgcccagatcggaaggacgggctctccctctctccagcccaccctcgggcctggactggccagagcgtcagccctcgccggcagcgagcgcggtgagaggctggacgaggcgaagctcagagacgccaaaaacctgaaagatgctgtcatcgccacccccttcccccacgctggtccctggcaggtccggcccctcccaggctgacccagatacatccccgtttgggtccggaaagggaggggagggaaacaagcaccgcgccacccacgactcgggaagagcagggctcctcgccagggccgctccgtatcgctgggccgcgacccagggaagttctgcttggtctgcgtcggtcgggcgggaggtgcagggagggcgcgtggggcggcaggcagcggggcgggggagcgtttctgctcgccgtgtgtgcacgccggccatggggagggtatgataggcaccaaagagcaacacgcctctcatgtacttacatgcttatgctcacaaacctccttcccccgtgaagcaggggaataaacgaaagcttacctccacccttctttgtcccgcattttcttgaagtaaatccagacacttaggaaagaaaaggtggttggctccgaggaaccagaaacattgccaaaatttcacttctaccgtgaataaagtaggagtgtggatgtgtatgttgggaaaggtagacagttgtatgattctctcatggagattatgatttgaaaccacctaaaaaactccaactcaagttccacccatctcagcacatcgtgtcctcacagctaaggggtgttagaagtacatggaatgtgaccatcagcttacaggcccttgctctccgcccagggaattagtgagtggccaggagacctgcccttcagttgatggtgaggccaatggaatgacctaaacctgaaacagacctcctggaaaagaaatggaccatccccaaaagctaatta

SEQ ID NO: 587155 - DNA, 4001 bp, Homo sapiens
cttaggattgccacacagacaaggcaggcaaaggatatgatgttaaattctttgttccatgacttaactgtgctagactctcattttttggatacaaggcttgttctgattgcaaaaatcatcggaccttaacctgggtttcaaataatcatttaaatataaggttttggccgggcgcagtggctcacacctgtaatcccagcactctgggaggctgaggcggatcacctgaggtcaggagttcgaaactagcctcgccaacacggcgaaaccctgtctctactaaaaatacaaaagttagctgggtgtggtggcgtgtgcctgtaatcccagctacttgggaggctgaggcaggacaatcgcttgaacccgggaggcggaagttgcagtgagctgagatggcaccattgcactccagcctgggcaacagagcgagagttcatctcaaaaaaatatatatttatatataaaaaatatgtttatatgtattatatactttctatataatctatattataaatatatttttaaatatatatttatataatatatttttaaatatatattatatataaatatatttttaaatatatattatatataaatatatttttaaatatatatatatctatggtttataactgtagccgttcttatactaagcagtggttctactctttaggaacagggattatcaaactatggccagcaggctaaatccaaaaaacaaagctttattggaacgctgccatgtgcctttatttatctatgactgccttcccattagaacagcagagttgagtggctgtgacagaaacggcatggcctgcaaagcctaaatatttaccacatggccctccacaaaaatgtttgctgactcttttgagattgcttcctctctcatctgcataaaagatccttcataccctgcccactgctcagcgcttacttcccaacctattgtccctcactccctttgttccaattttacagaaatacttgcagttatctaaattagccatgctcttgcttaattcagaatccatgtactcccgactgtctccgctctgaatgtcatcctctccttgccaaaccatttcaaatggtccttgaaacttcagtcatctcctcctgcatcttccatgatgcccgcccctctaatggacaacaaacttttgtgcaatactgtaattcttacagcagcctcccttactagttctttaatggcagaagttatgtcttttgttgcttactcctatcccttaacacgtagttgacacacagtaagtgctggacacttggttcaattcttgaggggcatccaccggcttgtgtggctctggagctacctgggctggaaacgaatactagggggtggcgagggccagctgccctaagcagagacacgtgggctacagggaggtgaggcaacctccgcaaacaccacctgttccagaaaagctccaaatgctccaacgggcgacccctccccttttctagcttttcttgcatagcttgacatttccaacggtagttaatttgtgaggggtttttagaccataactcttgggaggagagacctcgtatgttatatcgatctgggcaggcagcaagtcttccaaagaaagacttcctccacctccgcccggtcctcccacctcggaggactccaggctgcccaggggcggacccctggggcccaggtgagaggtggcagagggtgccagcatcgcgggcgtctaggccgagaggccggtcccagcccggccaggccgcgccgccccaagcctcccaatcccccgggttccctcggctcccctcgcccaccggcggccttgttcccatctccctcactcccaacccggcggctctcacctcggtcccagactcagccctatggaaggcactacacatcgccccgaaggctcggcgcaggagagactcaactttcccgccaccaacgccattcaccaactgcgcagactctacggccagtcaaacccgcccacccgcgcgcgtgcgcactgcgccaggccgcggccggggaggcgggagcatgcgcaatagggtgtgcgggcctccccgccccgcccccagttcctgtgacgtcagacttccgcgtcccccgcggcgctctcccgcgtccccttggagatcgctccggggtggcggggacagctggtgcttttcttgtctgttgtaaactttggttcgttattattatattaggtaaagctggtcttatgtattaatttgtttaaccattaaaaataattgtattgcacaagcaggcccctttgtccgttctcgggttaaaagcctctggctgtgtgtgcgattcatggttaattctggaaaaaaagagaaaagtatactgtatttaaaagaatttttaaaatataccgagcctgtggatttatcaagttgctttttgaggtaggcaggaggatcactggaagtcgggagttcgagaccagcctggccaaaatggtgaaaccccgtctacagtaaaaatacaaaaattagccaggtgtggtggcgcatgcctgtaatcccagctactcagggaggctgaggcaggagaatcgcttgaaccagggaggcagaggttgcagtgagccgagatcgcgccatcacacctgagcggcagagcgagactctgtctcaaaaaaaaaaaaagacaaaaatttggatatagtagcattggccattattatcaagatgacaaaatgttttctggaatgaaaaagtttcatgcaaagatatacttttcacccacctagtttagttttcaaaaacgctaggaaagagcatataccaatgaagtatttctcatgggtaatattaaagttgctcattttgtaaattggaatggttttggttccaagtcacagaaaacccaactcttacgtcctgaaacaaatgggctttaccgggtgacatcactagaagtccaaaggtaagacaggcttcaaggttagtttaattgagaggcttgatgaggcaaacaagtacctcatttctttttacctcagattcatgttttctaccttggcctcttctctacgtagggctgcgggcccgtatctgaaacattaacaaccatcaggaatgaggttggtctggttagcttaggcctgaatcgtgtgccccacttacttttctttttttctttttttttttttttttggagacggagtctcattgcactctcgcccaggctggagtgcagtggtaccatctcggctcactgcaacctctgcctcccgggttcaagtgattcttctgcctcagcctcccaagtatctgggactacaggcacgtgccaccacgccaggctaatttttgtatttttagtagagatggggtttcaccatattggccaggctgatctcgaactcctgaccttgtgatctgcctgcctcggcctcccaaagtgctgggattacaggcgtgagccaccgcgcctggccctgtgtgccccacttctatccggagtagagacatattttttcaaagcacacaggccttgtggaaaggtgtggagaacagtaaatgacaacaataacaacaaattgtgaatcattaacaagaggagtgggagtggatgcttgggaggccacctctaccgtcttttttttttcttttttccctttcctatggtgctgaaccacctatatcttcattacaccctctgtaatgaggatatgtgtataccaaaccacatgtgtaggtcaaccccctcgtccaattccacacacttctatacaaagtaaatatttcctcacatagtaaatcaatatttgagaaaggagactttacaattaaatagctgctctaggctaaattagtttttcagtctccacactgttcctaatgaagaagacatgtcagctgaactagtttagtccattaagtgcacacctgttcgtgtgagtgcaacatggttttgaaatcacttcagttttaatgctccggaaacatcacttctcgtttaaaag

SEQ ID NO: 587156 - DNA, 4001 bp, Homo sapiens
agcatcttcttgtatatgttttaaatgtatctttggcatcatatacagaaagttcttaattaattttacagtctgtaatgcttgatgtttcaaaatcattaactatatatatatatatttattattatcattattttttgagatggagtcgcgctctgtcacccaggctggagtgcagtggcatgacctcagctcactgcaacctctgcctcccggattcaagtgattcttctgcctcagcctcccaagtagctgggactataggtgcacgccactatacccggctaatttttgtatttttagtagagatggggtttcgccacacatttttatattttaagatacaaacttcatattttcctgttctttcctaactgctaatattgtgtggtatcttacaggtagaaatcaacaggatggtacacttagtgtatttttactccttaaagagcatactccttaaagggcatacatagttttcaccttacaagaagggggaaaaccataaatacaatgaatcaactgaccattatgtagtagacaatttctgtaatgtccccttctttctaggctctgcggataggagaatccactagacttatagtagcataatgtacaagttttctttaaaggtctctcctttagaatataaaatattataccattgaagagtttggatgtgtaacctgtgatgccttagaaaaatatcctaagcacaaaataaacttttctaatcacttcaaaagattaaaaaaaccaaaaaacaaaaaacaaaacccagcattagcaatgtcttcacaaaaaggatatatggaaaattacacatctgggctcttgccaactgattggaatggtgtgggtgggtgaggagacagggcaaagcagagagaggaaattgtttaaaaaaaaaaggatgatgagaagtctggtttcagaaattttgcataatacctaaattcaactaacctgcaaaagctctgtgggtagtgatttcgttctgcatctctcacggtgccacagcatttaaaagatgctcaatacttattagtgtggccccagtctcacataaagcatttttgtaattgacaacatggtttttgggctaagcaaataccactctactgaaatattaaacagggcagattcccaactgcagctttagcggcaatttaatggttggcaaatatattaagtggatgtggacctcactatttggtcctcacccagaaatactgtaggctgcacacagaaattaagcttagtttcaatgaatagtgagacaaattagagatgaaaaagttacatctaacaaataaaaaagaaaccaactttaatattcccttacctagacaccagtattccacattagctttcccttattgtcctctgacagcatgctttagttcatcttttcaatatgtcttgattaacactactccttaactttaggctccctacccattcaagccacccatataaactgcgtacacgtcctttgacagccataataagtatagtgtatgtttctctccagctcctttccctgtgatcctcaacaaactgcaaactgttcaaagtctacacatagttaattttggtcggtcctcagtttctaacgcatcccgtaggcgctcaaagaatgcgtcttgttgttttacacgctttcaagtaaccatcgagaaatcctagcaagacgcgggtcggaccgggtccctagggataaagagagcagcgccgggccaggctggggccactctggacccagcttcttcacaactccgcgcctcttcccacaacccagcaccccgcgccgtccacaccacgtttactttgactcgtctttgcatgttactctgccattcccgctgcgccaggagcgactcgtctgcttcttcgtcaaacacgtcccctttgtctccagggccctggatcaaggaggctgcttgaacccacgacatcaccgaggcaattacggggtcgcaggccaccggaagcgccaacaactccttccggtccgaaggcggggcgaagacggcgagtggaggctcgggaggggctgcgtgtgcgcggaggcgggctgtggcccgtggccgccgccggagcctttcgcttgcggtgattttgggctccctcggttggcagtgttgatgtgtgcctgtgagttgtgagcgaggcagatttcctcgcgtggccggcacgaccttcacctttgcagaaggcaaccgggaccctcagtgagacaccttccatttccaccgtagtcttaccatggtctgggttttacattcgcgcgctttggtaaactattaaaggtagtaaagtcgatgggcgattaccacccaaatactttgtctcttttggaatctcctctgcatttaaaggatttgacaagccgacattttaaactgttaggattgtggagtaaaggaaaataggatcgaaaagcgaggtactgtagccaatttgagattagtaagaaatatagagtacatttgtaaagccaatatattttttcattgattcacgatatccttctgcctcccattcctgttcatatgccctaaagtaaacagttggtttggtaagggtggggacttgtgtcaacaccaggacagttctgacacatagtaaatgctgaactctattttggtgaatgaatgaatacctgtagtattcctgttttgccctttgcctgggtaaaatgagtcatgtgattatgatttatttatctaacaatttattgaacacctaccttgtgtcaggtaccattccaggctttgggatacatcaatgaacagacggaagttcccaacccttgtcgactttatagtcatgtaaaattgacaggataaacaataagcaatatataagtagcataaggtttgttagaagatcataaataaatgctatgaaaaaaatttttaaataagcacagtaagaaccataagtgtgtgggagtgggtggttggttcatgttacaattttaaatctccagagagaatttggcatcccacaaataaaaaatatataaactacaaatatgtatattttattaatgtaaatatattaagatatatgtatatatctttattaggaacaaaatggtagtaagcaataaagataacaataaaatagaaaacctcaaaacttgaataagtaagtccaattcttttttgtattatttgaaaacaccaataagatagataatcctgtcatgacccagatttttaaagagaacaaaattatacaagaatgagaaatgagataaccactgatgcagaaggagattaaaatattaattaccaactaaaactcaaaagcaacacattcgaaaacctgagagatatgaatgactttctaagaaaattgacccaagaagtagggtcatgaagagactaattaccatagaaaaattggacattaaatatctactattaaaaatgtcatggagacttgggagtttcacattaagtcctttgcaatctttaaggaatgatggagtcttaaactatttttaccattttaggggagagaaaaagaagaaactccttaaatcatttcatgaagccagccttactgtaacttcataaagatagtaccagaaaaaccccaaagttcaagttagcttgtgaatatatatccaaaagagaatctagtaggttggtgcaaaattaattggggtttacttttgcaccaacctggtagtactttatcaaaagaataatttaagaggttttgtaccaggaaagcaaacttttgcaatattaggacatcaataatatttcattgcattgactattttttttttttttaaaacagcgtcttgctctgtcacccaggctggagtgcagtggtgagatcacaactcactgcatccttgatctcctgggcttgagctatcctcctgcctcaacctcttgagtagctaggactacaggcatgtaccactgcacctggctaattttttgatttttttgtagagacaggagtctcactatgtt

SEQ ID NO: 587157 - DNA, 4001 bp, Homo sapiens
aagtcctacaagtgaaatctctgagaatcttaagtactaatgggaaggaaaaaggaaaaagaatcagagccaagttggcaccaaaagttccatctgagaaaagcaacaacacagagcagtgaatgtaggccatggtaaagactgcaaagaccaagaaccccaagaaggagctaaaagataatgcagcaattccgcttctgggtaaataccaaaaaaatgcgagcagggtcttgaagagatatttgtacatccatgttcatagcagtatcattcacaatggctgaaatgtggaagcaacccaggtgtccactgacagatgaacagataagcaaaatgtggtgaataatacaatggattattcagccttaaaaaggaaagaaattctgatatatgcaacaagatgcatgagccttgaggacattatgctacatgaaataagccagacacacaaaaactatatgattccatttatctaaggtcgccagaaaagtcaaaatcacagagacaaattagaatggcagttgccatgggctgggggagaagggaatgtgtttaatagacacgaatttgataaaaaggagttctggagacgattgacagtgatggctgcacaacactatcaatctatttcatatcaatgcactcactacacgcttaaagatagtgaagataaattttgtgtaccattttaccacaattaaaaatatttttttaaaagaactcaaagaagcagaaagtttcaacaaaataacatttttttttttttacatccagcaagtccttggcaaagaactctcatcaagaaccagctgcactgaagcagggaaaacagaatccaaacggcagattccatcagattttgagacaagatgaccatagataccgaccatgtagggtcctccttctttcgtgcctgagtcaccccaatccctcccacgaatggtctggaagtgtctgtgttacttctaacacgttccagcaattaaagcgccccagaaacaagtaaaagcctgtaagccctacagatcccatgcttcatttgcatcttccgtgtggaatccttttgtaccactagtgtccaactaaaaagcgttaaacctggctttcagttctagctggttgtgatataacctcttggtacctcagtgacttcacccattaaaaacaaacaaaaaaaagtatatcactatctctcatacagaattgttgggaagccccgcaagaaaatcaaaatatggctctcaagatgcggcacccaagctcccagagtcagaatcactgggtgggaagtgttggtctaaaatataaataccgaggcctcaatctactaattcagaacatcttggcatgaagcttggaaatctgcactacttcacagtctccttaaaatttttacacgacagaaatttgaaaaacactgagtagagaactatattctagaatggtataagctcttaaagagctaatgttggttcctcaaaggtagagtccacggccagattccattataggagaccaagcccggacagcagaccccgggccctccccaccccgccccgcctctgactcggacaccagccttctcagaccccgggcactcggccaccccgccctgcccctacccttggcctcctccaccctcccctcatccctccgccgaccccaggcccactccgactcggacccccaccccagtcctctccgcccgaccgccacggcccaccagcctgtgccgctcacctggatctctggaaaaagctgaaggaagacacatcgtatgcggctttgagcagcaccaccttggcctcgcctttgtagaggacgctgaggctgtacagcttcatggctccgcgccctcaggccgcccgcctgcccagctgcgggacccgttctcagggagcagcgcggccgccgcccctcgggaccgccgccgcctaccggcctctcagcagccggctgctgacggggccaccgccggcttcctcctcctggctcgcaatccacttccggatccggtcagcctggttgagggttctcatactccggatgcagaaatgtgagcccggaagtacaatgcagcgaggggcgggatgccacgcctcgcgtaagcttggcccctccctgctcgccaggtggagtcgggcgcgcggcgggataccgtactgtcttgtgctgggtggtgctgggcctcccacagcggcctgaacccttcttttttttttttttcttttctttctttttttaaagtaagcattttttttattattatactttaagttttagggtacatgtgcacaacgtgcaggtttgttacatatgtatacatgtgccatgttggtgtgctgcacccattaactcgtcatttagcattaagtatatctcctaatgctatccctcccccctccccccaccccacaacagtccccggtgtgtgatgttcgccttcctgtgtccatgtgttcttattgttcaattcccacctatgagtgagaacatgcggtgtttggttttttgtccttgcaatagtttgctgagaatgatggtttccagcttcatccatgtccctacaaaggacatgaactcatcattttttatggctgcatagtattccatggtgtatatgtgccacattttaggaggagcttgtaccattccttctgaaactattccaatcaaaagaaaaagagagaatcctccctaactcattttatgaggccagcatcatcctgataccaaagggtggcagagagagacacaacaaaaaaagaattttagaccaatatccttgatgaacattgaagcaaaaatcctcagtaaaatactggcaaaccgaatccagcaacacatcaaaaagcttatccaccatgatcaagtgggcttcatccctgggatgcaaggctggttcaacatacgaaaatcagtaaacgtaatccagcatataaacagaaccaaagacaaaaaccacatgattatctcaatagatgcagaaaaggcctttgacaaaattcaacaaccctcatgctaaaaactctcaataaattaggtattgatgggacgtatctcaaaataataagagctatctatgacaaacccacagccaatatcatactgaatggacaaaaactggaagcattccctttgaaaactggcacaagactgggatgccctctctcaccactccttttcaacatagtgttggaagttctggccagggcaatcaggtaggagaaggaaataaagggtattcaattaagaaaagaggaagtcaaattgtccctgtttgcagatgacatgattgtatatctagaaaaccccatcgtctcagcccaaaatctccttaagctgataagcaacttcagcaaagtctcaggatacaaaatcaatgtgcaaaaatcacaagcagtcttatacaccaataacagacagagagccaaatcatgagtgaactcccattcacaattgcttcaaagagaataaaatacctaggaatccaacttacaagggatgtgaaggacctcttcaaggagaactacaaacgactgctcaatgaaataaaagaggatacaaacaaatggaagaacattccatgctcatgggtaggaagaatcagtatcgtgaaaatggccatactgcccaaggtaatttatagattcaatgccatccctatcaagctaccaatgactttcttcacagaattggaaaaaactaaagttcatatggaaccaaaaaagagcccgcattgccaagtcaatcctaagccaaaagaacaaagctggaggcatcacactacctgacttctaactatactacaaggctacagtaaccaaaacagcatgctactggtaccaaaacagagatatagagcaatggaacagaacagagccctcagaaataatgccgcatatctacaagcatctgatctttgacaaacctgacaaaaacaagcaatggggaaaggattccctatttaataaatggtgctgggaaaactggctagccat

SEQ ID NO: 587158 - DNA, 4001 bp, Homo sapiens
tggaactagaaatatggaaaagaaatatggaaaaattataagagtctaaataacacgaactgaagatatttccaatactgatacctattagaagtgcaacttacatcatttaagcattaaaaccttgtaagacagcaactgtggccacagcagtattccgaatttcagaatcagttctcttcaataagacaaaaacctttctttgttaacatagctgctttaaatataaaggtatcagcattgtcctcttttgagaaccagtaaatttattcaagaattgatctgtaatatcaataatgcttcatttaaaagatgtaacacgcaaggtacactccagcatccacttcacaatggagatgaatttgaaaatctttgttacataaggcaggaaattaaatattaagatagtgggggcccgaaatcattagattaattttctacctttcatttcataatgctcaatacttccccctcctctaatatcaaactggttgacagcccattagataaatgtggtgttactgacaaaatggtgcaatacagggatgaatctgcaacccagacaaaatgcgacaactggcgatcggtattctcttttcatcagcatgaagatgtactcgcttaaacaaaaaaaagcctcagatgcatctaacaaccaaaaatttttaaaaagactttttcccctttaaaataactcctcccagcctccacccagtctaggctctctgcaatatgacaaatgcagaatcttctggaatgacttgatactgcctctcaccacggctttgtttgcactatcagatcagacagaatattttttcccccaacttataggaatttcaacagacgcgtgcctgtattcaaaaaagaaacggcatatgtcacacgaatcgaaccagtcagctacattcaccaccttttaattttacaggcaatacctacccttttcaatacaaaaacattagggaataaaatggagatgacatgttgagaatgatcaatgaaaacgctagcgagacaaacgttctcccttcctaaaagccggaggacttgctttgggcgaatggagaaagaagagccttttgttaagaaaaacgtgagcaaggtggtttcgattttgcaccacggagctcaggttttcaagagaccctatacaatgtttctgggaagattctcagggatgtgtcgggacagacagtggggaagattctgggggggctggggaggtggaaaaccgggagacctgctgagtgaatgggaaaggcgccgcccagacaccagggagagaaagaggaaccgcatccatgcggtcccccgcccccacgcccaggctaggaggaggggggaagtggggcacaaaggatgcgcacgcctccccgctcgggtcccctgcacccctagagccgcgggggccggagaccccgctcccaagtccagccccgcgggacctcgccccggcccgcgcccgcgccgggcctgaatggcagcgccgcggggccacggggactccgaaaagaggccgcgtcacagcccgggttcccgtcgcctctcgggaccctccccagcccccctcagtgagcgagacggggcggtcaacccgccatcgcgacagggcgacgaagccccgggccttccacgccaaggaccgcgtcttcggaggggcagggagcggcgggggaggggaggagacactcacgttcttcatggccgcggccatgtcgtcgtagcgctccgcctgctcggccagccgggctttctgcaccagttgctcgcggtccaccatcttcgcggggctgggtctggccggagaaggaggaggacactggggcggcctgaagggcttggagggcgcgactggagcccaagtgccggagaggaccgacccacagagcgagcagctgaggcggcggctgcgcggaggaggcggctggagctgcgaccgcgggaccgggcgcgaggcggctgcggctgctgtgcgtgccactgacggacaaccccctgcggccccgcccacgccgcatgacgaaggcaggccccgcccacccgtccgcaagccccgcccatgccccgcccgagcccggccgcggctagaactccccgctccccagctgggctcactgcgcgtcttccgggcaccccgtcctttcccactgcgcccccactctccccttttttcacttcactccccagttccctcaccccagcttctccagtcgcccccttacgcctcccccttgagcctcccgccccgccagccctcggacgcatgggcccctgggagttgtagtgtaacctgcagtgcactgaggcgctgaggagaccaaggacaaaggggcggtcaagactacaactcccagcggacatagcgcgcaggcgcaggaggacgggggggggtgcttcgaatcccgaggccgctggggacccctggcggggatcagggctgcatcagtccctgcgagtgctgattcaccgccccgccccatattctccgggaaattacgagaggagggggcaggggcctcagtcctagaccctgtttccgagatcacgtagcaggtcgtggtgggggaaggacaggaggcgcgtccattgtagatccagactctcagtgtggtgcctgcccgcgggatggccgaattaaggggccagaccctggggactgtcacctccaccccctacgagcttccattaaaccccccaccccaccttgaggctcttgggcctgaataggtgaaaacatggacgaacgacaaataccggctggccacagtggttgatttccagaaaggatgcagctgtctgctggctgaccctggagaaccccttcttcctctccagggtggagtgctaaagattgagttcagctaccaggagcctactccacatctaactgggctgcgtctagggcttggttgtccagcccttctctcccctcctaagacatacatacctactgaggtcacgctgatatattctcgttcatattattccacatagcttgcagatagcatgggtttttttgctttgttttgcttttttgtagagacgggggtctagctttgttgcccatgctggtctcgaactcctgggctcaagcgatcctcacgcctcggcctcccaaggtgctgggattacagatgtgagccaccatgcctgcaggcctgatagttttgactgcacattttatttactttatgtattcaacaattatctatgagaagctactgtgttccaagccctattctaagccacgaggtacagtagtgaacaaaacagacaaaaatccctgcccaagaaaataggtgagatatgtacagtatgctagaagtcagtaaggagtgagttttgaggttgcagtgagctgagattgcgccactgcactccagtctggcgacagagcaagactccgtttcaaaaacaaataataaaataaaaagttttttaaaggctgggcacggtgactcacacctgtaatcccagcactttgggagaccgaggcgggcggatgacaaggtcaggagatcgagaccatcctggccaacatggtgaaaccctgtctctacaaaaaatacaaaagaactagctgggcgtggtggtgcccacctgttatcccagctactcgggaggctgaggcaggagaatcacttgaacccgggagtcggaggttgcagtgagctgagatccctctactgcactccagcatgggtgacagagcgagactccgtctcgaaaaaaaaaaagaagtgagctttggcctggcacggtgactcacacctgtaatcccaacactttgggaggccgaagcgggtggatcatctgaggtcaggagttcgagaccagcctggctaacgtagcaaaaccccatctcaactaaaaatacaaaaattagctgggtgtggtggtgggcacctgtaatcccagctacttgggaggctgaggcaggagaattgcttgaacctgggaggtggaggttgcagtgagccgagatcgtttcattgcac

SEQ ID NO: 587159 - DNA, 4001 bp, Homo sapiens
aaggatgatcagtgtttatgcagtgaatgtgtctgacttgactttttttctttttttcttttctttttttttttttccggcacccaggctagagtgcagtgatacaatcacagctcactgcagcctcaaacctctgggctccagcaatcctcccacctcaacctccccagtagctgggactacaggagcatgccaccacgcccagctaatttatttttattttttatagagatggggtctttctatgttgcacaggctggtcatgacctcctggccttatgcaatcctcccactttggcctcccaaagtgctgggattaccggtgggagccactgtgctcagccctctgttttttgttgttgttgaagttctacttgttcaaattctcccaaacacactgcaggacaccaagacatccatcatttctttttttttttcttttgagatggagttttgctcttgttgcccaggctggagtgcaatggtgcaatttccgctcactgcagtctccgcctcccgggttcaagtgactctcctgcctcagcctcccaagtagctgggattacaggcatgcaccaccatgcctggctaattttatatttttagtagagacagggtttcaccatgttggtcaggctggtctcaacacctgacctcaggtgatccgcccgcctcggcctcccaaagtgctgggattacaggggtgagccgccgcgcttggcctgtcatccgtcatttctttgctgcctcgtacttaagtctctctcatcagctgggtccaccctgggtcttgtccgtttcctgagggcctgacccctcaatccttctctcctaggcttagatctgtcttccagctctgcacctcctccgtcccttctcacattgtagccctgtcccgctcccagaacccgccccttaattcctgttcagcagtcaaggtcaacccatttccatcccaccgggtttcccccttcctctcaaggtctttttttttgtttttttttttttgagacggagtctcgctctgtcatccaggctggagtgcaatggcatgatctcagctcactgcaaactccgcctcccaggttcaagcgattctcctgcctcagcctcctgggtagctgggactacaggtgcacaccaccacgcctggctaattttttgtatttttagtagagacgaggtttcaccatgttggccaggatggtctcgatctcctgacctcgtgatctgcccacctcagcctcccaaagtgctgggattacaggcgtgagccaccgtgcctggcctctctccagatcttttgtagttagcctgctcgccccctccagctctgtccttccatattccttacagccaccctcagctgaccctggtttatcattaccccctgggcccagcttacctgaaaagggcagcccccaccagaagcagcagagtccagactggaggaaccatgaggaccctaagtggttgctcccaggggagaggggaagggcacagttgggagcctggactccttttattcccccctggcctccttagcttggcatccttccaaggatgccatgaagaatgaacagagaaacacagaaaagctctgggaaattaaaattatgagagttgaaagttaccatccagtagaagcatcgtagattgaaatcgagggaaataaactagagagaagagaaaaaaaaagagaaagaaacaaaaaggaaacaggtttggaggatcaatccaggaagtctaacctcaaacgaaaggagttcaaaaagagagaacaaaggaaaagaaattattattttaaaaagaaaaacgcacaagaaaatatccagaactgaaatatacaagtctctagattaaaaaggtgtccagggtgatgaaagcatagagacccatggaagcactggacttcagactatcaggggtgaagagaagatctgaaacactttcagatagaaaataacaagtcatataccaaggatcagaaatcaacatggcatccagcttttcaatagcaaccatggagtctaagagccagtggaacattgtctgcagaattccaacagaaaaccatttcaaacctaaaattctataactggcaacagtggcaactggagagttaggtgaaggaaggactgcaaacggctggacgtggtggctcacacctgtaatcccagcatttgggaggccaaggcgggtggatcacttgaggtcaggagttcgagaccagcctggccaacatggcaaaaccccatctctactaaaaatacaaaaaattagctaggggtggtggcacatgctcataatcccagctactcaggaggctgaggcgcaagaatcacttgaacttggtaggcggaggttgtagtgagccgagatcgcgagactccaagtcaaaaaaaaaagaaaaaaaggactgcaaatgcctactggcaaatcacggagaaagataagtcacagaggaagagatacaaacaggcagcaaacatttgaaaagctgttctgcttcactagtaataagggaaatgctaatcaaaactatgactcttatattgaccaaaaaaaaatttttttttcttttttttgagacagggcctcgttctgtcacccaggctggagcgcagcagcatgacttggctcattacagcctcaaacccccggggtcaggtgatcttcccatcttagcctctggagtagctgggactaccagtgcatgccaccaagcccagctaatttttgtatattttgcagaaatggggttttgccatgtctcccgggctggtcttaaactcctgggctcaagcagtctgcctgccttggccttccaaagtgctggaattacaggcatgagccactgtgcccagccgacaaaaatttgaaagattggtagtacggagtattggacaggatgcaggtagatacgaactcagtgatgataagactgtaggttggtggccaggtgcagtggctcatgctggtaatcccaagtgctttttggaggccgagatggtaggaccgcttgaggctagagaccagcctgggcaaaacagtgagaccctgtctctacaaaaaatttaaaaattaaccaagcatggcagtatgtgcctgtaggtcccagctggttgtgaggttgaggcgggaggacttacgcgttcaaggctgcagtgagctatgatcaagccactgtactccagccagagcaacagagcgagaccctgtctcaaaacaaaacaaaaaaagaatgttggtgaaaactttttttttttttttgagacagcgtctcactctgttgcccaggctggagtgcagtggtgccgtcacagcttactgcagtctcaacctcccaggctcaagcagttctcccacctcagcctcccggggtgtctgggattacaggcacaagccaccatgcctagctaatttctgtttgttttttttgcttgcttgtattgtagagatagggtctcactatgttgcccaggctggtctcaaactcctgggctccagtgatccgcttgcctcagcctcccaaagtgctgagattacaaacatgagccactgtgcccagccggtgaaaacttcttagaaggcatttgttttttggtttgtttgtttgttttgggggaggagtcaacccagcctagagagcaatggcacaatctcagctcactgcaaacctccacctcccgagttcaagcaattctcttgcctcagcctcccaagtagctgggattaacaggcatgtgccatcacacccggctaattttgtatttttagtggagatggggttccatcatgttggtcaggctggtctcgaacttctgacctcaggtgatccacccaccttggcctcccatagtgttgggattacaggtgtgagccacagtgcctggccagaaaacttcttagaaggcatttgacaatgactgttgaactttcaaatgtgcatatctttgacctaacatttctaggaaacttgctacagaaatacatgcact

SEQ ID NO: 587160 - DNA, 4001 bp, Homo sapiens
agcacaccaccgggaaccctaggaggaaacaccactagggtggcgggctgcgggctcccacccctgggcactggttcccagaggagttggggcagccttgcgcccccgggggaccaagggaggtacctgcatctgggggcgcctgctgtccattccagtgccctgtggcaggggccacgggcctgagacccctgcccgaggctgcttcatacagcggccagaatgaggggtgacacagcgtccggcctgagaacgaggctcctgagctacagttggccccctagggtgaggaggacagagcactggagcctcaggccaccgcacagctccctgagcaccccagccagtcccacaggtttgcccccaactcacccacaccggccgaggtcctgctttggcttcatacttggggtcccagggcgctagtggagtcatcctcgagggggccacctcccaggccacctggggggaacggggatctggggggacgcttggggattataacaggctcacagtcagtgagaggctcttaggggtagtagaggcagcagggcctgtcctacctggggctccggggggctgctcagtggccgggcctggcaggtggtggggcagcagcagctgctctctccagatccaggaagggctacgggatgggggctgtgggctggaggggcagggactgaggctgcagccacaccgcccccacgcaccctcccctggagcccaagggtgcctggtgcaagggagaccgagggacccaatctccagcagggacaatggagaagcctccgtagagcgcgtggtgaaggcatggaggcccccagtcgctgtccccccacggctccgtccgagcccctcacctgtcccatgggggtgtccccagctccctgggggcgtccgctccggcgctccagggctcgccctggtccttgcccgccggaaggcctggtccctcgggcgcctcctccgggcccgcgccccaccgcggcggcgaccagggcaacattccgcgttcccgagcgcaggacggtaccgccgtgtccccgccgcccggcccggccctctcagcctccctccgcggcgcggcgcgaacgtgccctcctggcgaacccaccccagaggcctcgcggcgacgctggcgccctgtgcgtctcccggccacgtggcgcgtgcccccgccgggctcccgcgggcgccccctggcgactgggcggtgaattccggaaacagaggcccccccaacaaccccgcgacgcacgtgctctcagacacagttacacctgagggccacccagagggcttctggcttctgtttattgcggctgacacgacacctgcgacacccgcggtccttccacccagaccctcgaccccagaggcagccaggccggcaggccaagggtgcccaggcccaggccaccctcaccacgtgcttctctgagagcgcggagcccaggcgcgtcttctgctcccggggtcccgggcggggtgggccctgtgcccccaccttcacccctaaggccggtccagcagggcgtggacgacagcagcgatgtaggggaggccccttcccggggccccctcctcttccaggatgtggtggggctggcacagtgactcctgggggaaggggccgggttagcttccccacggtgccccctgcggcttccggcctgtggcagggggtcgggggcagacccgagcatcaccgtgcgctcggggctcggcgacaaatgagacgcaagaaagctgtcagcgataacagaagggaggtgacacggggggttggcggacgctccgggagcatgagaggccggcatctcaggagggagatgctggtgggcacagagccatggccacagccaccaacacgcggagcagacgcgcgcgcgcgcgcacacacacacacacaggcagggcggccacggtctgtacagtttatacacagagatagggacccggcctgggccccgaacccctacaaatatagatcctctctacaaaatagagataatttagcccccccatagcagctgttggggggggaaggggagggcacaggaggaagggggagactccagctcctgccacccctcacggggtacagagggcaggggcagggccggcggggacatgaaggcaccgtcagcactgagaggtggggactcgtggggctactggagggaggccagaggctgggggcccagggtctgggggcaccagagtggggcctctgaggtcagtgtctgtgaagggggtgcactagtgtctttggttggggctgaaggcaccgcaggtggggtcgggtggagcagggaccttataaatagagaggaagggaaaggggtgagggagggccgattttggggcctaggaacccaggagccgagtgtaggtgacatagagcagcagcatgaggaccacgtagaagacgacgaagccgcccagaccagaggggggccagaggggcggtagggccttgccccccacccgcttcacggcctccagcgcggtccgcagcccccgggcagtgccctggaggagatccgagggcgagcacaggtcagcctgggggagaggagagcaggtggacaaggacaagggacagacgtcagcagcagcagcaggacagtccctcccacccctgccctcacgtgctggggccagaaccacgcccacatgctgacgtgctgggcagggggagtgcagtgcaggaggagtgcagggcagggcatgtgcaggacaggtgacatgcaggacaagatggggcctgcagggcaggggatgtgtaggacaggtgacatgcagggcagggggcatgcagggcagggggcatgctgggcagggcaggggcagcctgtgccttcatctgagagcagacatccgctgcaaatggaagcccaccatccatgccacatgctcggctgagtccggcatgccaccactctttagaaagcagcccccatacctcaggcacccccatttttcgacaggcttctagaaaactctccacattcttccgagccttgagggcactgagttttggctggggtgggtgaaagaagaaaatgtggtaagggagaggccacaggcgccccggcccatcccccacctcttccccagccccaactgaccacagcaggggagggcacatggatgaagggcacggagcgcggccgtagctggttggccagctggcacaggatgaccccactggccagagcctcggccaggtcctcaggcaggggccgctgcagccgggactcaaggacctggcagtgtagaccacatagagcaggggtcagggaaggagaggcgtctgggaggcagggagagtggggggctcagggctagcagggaacttgtgcctgtcccttcctgtcctcaggggaggtgccagagtgggcacagaggatgtggagggaggctggtcccaaggacagcaacacaaggaggtgcccggcccaggcccctgcccacgcagctcccgcctctgctcacctggcgcagctgagtcattaagtccttctcatctggaacctgggggtaccgccgaggtctcaggacagagtctggtgaggaagggcctaggagaaaaaggggggcatggggctgcctccactgctcaccactgactctgtagctgggtcccagtggcctggcacctacacctcctgcctctctgcttgtgggatttttttttatttcatggagatggggtctcgctatgttgcccaggctggtcttgaattcctgggctcaagcgatcctcccacctgggcctcctaaagtgctgcgattacaggtgtgagccaccacacccggcttgcttgtgggattttcaacgcaaaggtacaaaaggtacaacagacccagagggctcccagggcagaagggtgatgtagccgttggtgctggcaagcactgggtcagcactggggagggcaggacacccacctgagccactctgagaggaggaacggaagaggaagctgttt

SEQ ID NO: 587161 - DNA, 4001 bp, Homo sapiens
tattctacccttggggtttccttctccctacagtgaaagcctcagaaagtgctgcaatagcttatccaggcccccaaaggctgaggacatatcccacctgccagcacatgcccactccacatccttggccactttttgagaaagcaagcctcttaagggcatgtgtccacttatccacacagacaaggtgtatgcaaggaccttcatacccacttatgttttaacagagcatcacatgtacaaagccacgtagtacaaaattcacagtcacctacgaagagagtaagcctcttctcggcacatactgctagacgtaaaggaagtaatcgggagatggaaaatgacatctcccagaaaaaaaaatatggcaatctgtcaagtgagaaactgaccctttcctaccaaataggtttaagattctggccatgagcatgtggcgcccaggatgcaacacccagctctctgctttgacctattacaggcaggggctctctaggagttcacgggcagggtgagcaccggcacctgccatgtctgccatcccaccctgagcggactgcagggtctgtatccccttggccaggtcaccactagagcagatgaggggaggcggggtgtagttggggaactgctccaggttggccttcaagaagaggagatgctcaatggcttccaccttgagagaagagttttgctctacaagggtggggctgttcagggaggcaaagatgctttcagagaaggctcctgtggggggtaagacagatagatggtggccaggcttctcgcttcttctcccagtaagccagggggtcatcctgggctccaacggtctcattctcccacagatacttcttgacaatgatgctggcccagtggctcttggtggacagcgagcccccgcttctctcagaggccagcagccccatgctctccagcaagcccttctccctctgggccagcaggaaggccccagagtggctgctgctctgcagaggctccccctggcttctcccctccaccccggagctcttggctaccctggtggggtccacgcacagacccctggggctttgcaggggacttggggagttcaaagagtattcagacactctaatctccttcaccttgtacacgaggacttgcttccagtggtcaatgtcggtcggcccccatggcaggatggcctcaatcttccccttgaagcaagggtccagcaaggtggccagcacaaactcctcgcggtagaagagcttgttgagctgacagtcggtgcagagctgccgggccaacccctcagccagctggatggctgcgcccctctccccgacactctgctcctgaaagtgtgtgtgaacctgctccaggaagatgtgcaggtagcgcagctggggcagcacctggctcagagaggcctgtgccgcactcgcctcgcggaccaccatctggaagggctacaggagcttgctgaggctgtctgccgggctccagaatgtggccgacaaggcaacaccagccttccccagctggtgcctgcccttgtactcttgaaggggctgctgctgctccaccagccactccagcaggtggtaggccgagacccagtggtccaagagctcctcaaagggctggtgggctaggaggctgcgctggcgctggagctgggtgaggagtccctgggcctccacagagccttagaaatggctgcaggtggccctggcagtgcccaggatgatctggacactgtgagggtgacacagaaagtttctcaccagggagtcgaggcagtgggcgaaacaagggatgggggaacagccctcacccttggccgcctgctccaggctggggcagctgctcgataccaggaagcctgccagcaggaagctacggcccagccacaggctggcctgctccagcatctgcagctgccagtcctccgcggctccctccaggggcaggcctcgcatccagagcaaggttcccagcatcagcccttggaactccaaccaagctctatccaaatgcaaacgagggcagctgggggaaatcactcaggagcctacatgctttgtctgaggcactacccctagaatctccagctttcaaaagtggcctggacagggaagttgttttcctttttaagaaggacaggtaatcataatatttcccatgctggagtgaaatgattaagcatgaggccagatgacggacccaacccacagccactaccttctgagggaggaaattcctcatgggcaggccaggctttactcacatcttgtttcctcacagcccactcttgggacagggtgctgggaagtgtcccaagcaatgggtggcggagacaggcagagagtgtggctgggggaccgctgcagacctgcggctcccacactcaccccacccagctccaggccagtgcgatgggactgattcgctcccttggataccgtacctcggtcccccgtctcccgggtgcccacagcactagctgtgtcaccgatacgtccgtgcatcttagcttttattccccttaatgttgtttgtgctgttgtctactttaatctcggtccctcactctttactcttctcaggtactgagcaacctcagggataagtcggcagaagctccaggcctgcatagcaggaatacttctggttgtttttctaaccacgaagagcaactatatggaggacccagcctattgaactacctcatgtttgccagagacttggcttttctgccacagtgtcctcctgaaaccccccgaccttgaaaatgtttcacgggagactaggtttcaactggatagcatcaagacttgatctctggctagtggaagattgaaaattagactaaggtgcagagacaccaagggacaccacggttaggtgagggtttcctaatcctagggcatgggacttgcttcacacaccaggtccgtccttcactggactgtgctaggcctaccatccacaacagagggtatgcgtgtgtattcgtaaaagacgtgacttgggaacgctaaattttaagaccagtgcccctgtacccatcctgtgctgtccagggaaggatatatgaagcaagaactaaaattcttaacgtttccaaattcttgggttcaagggagccccgtaagagagggcctcttcatgtggtgtgcacagccagcgtcctgccctgctgcagcgctgattcagcatcacggtaactaaggagaaaagggggcttcatttacacgctataggatcaccacaaacctcccttgctgggctagaatgggacaagcacgatagaacgtgttcaggggtgcacatctgatcctgggtttgtttccccctgacgctgccccctctagttcctgtatctgtctggactttgtagcagttggtgactgctaggtggcctagtttgtgtaactatactgtgttggtctttctccatgtttttttggggttttattgtttacaaacttttttgtattgagagaaaaatggccaaagcatctttacagaaagttctgaaccaggcaaaaaggatgtaaaacatgagtttgggggacccccatattgaagtagggattttgaactatcctttctttgtgttccccttcctctatttcctattttggaccagatcttctgccctaaaaacttgacttctaccgtaccttcttctccattcacctaccccaaaagaaaacctacatacccacacacgcatatattgaattctcaggctgtctctgcaactcttaaatgatgtatgagaacagcctgaagaagtcaggaaccctccatctcttgttccaaacctgagtcaatgtggttcaccccaaacacttaagacactgctttattgggatggatcaaacctacttaatctgtaatctcaaagaagggagaagcaaccgggggccttccacgtagaagtggggtcaggagaccaggcaaaggaatatgagtatatatctaagtcacttaggaacttttacgca

SEQ ID NO: 587162 - DNA, 4001 bp, Homo sapiens
ttgaacctgggaggtggaggttgcagtgaaccgaggtggagccactgcactccagcctaaaaagtttgctgacaaccattttaaaccctgggacacaagtcaaagtgtttaagaatgggccaagtgtaaaaagtactgtatcgagaaaagtaattgagcagagcacatagtgacagaaagggtgggaggaaagactggccattcattaattcaacaaggcgttcattcagttcattcagaaattagatgggaaggcagaatccgccaagaagggaaagagacttcacaaaaaggacttggtgatgacagattgtgaggaggattaaaaccctgcctgggggaaaagatgagtttgactccatggacaggacacacgcgggagaggaagggcttgggatcaagggaaaggcctgggcagcgaatgtggacctggaagccatctttttagatgtgcagctgtcctcgagggagcaagctctcttagggagaaactgggaagaaaatcactcaagagtcttaacccaaaccttgcagcgcatctgcatttagacgaaaaaaaaaaaaggcaaacggaaacaacagaagcagtggcccgagacgtgagccacactgcttcaaagggatttaagagagttgtcccaaggcaggcggtcaactgcgcgcgccaccgtagagagaccacccggagggaaggcccgcggctgctacaacttcaggaacctggaaaagggccacccctgctacgcgccaggcatcagaaaagcggtgatgaggggcatgggggtgaccgggaagggagggacaagcagagagacctgcggctcgctccggcggagacggaccgggggcccagggcggctgggttactggctccgccacgtctagggaaggaggtagtagggagggaaagactcaagataccaaagacgggaggctctttccttccttcccaaacctgcctaccgcttctctaggccctggctggctccagagcactttattcttctgattcgtgcgggcgggcggggaaaggggtggaggttgagcctggtctcctccaggcactagcattttagccattctcgagaaaatgtctggaggtgccggaaggaagggaactgcaaaggtagaagcgcgggccctgcagaggctcccagaggggagcagagaagggagtggctggaggcggaggctgtcaggtgcggggtcccggcgaagccgtgcccctcccagaacattgcccgcctggacagtccaccccgaccacggctgcggacagcgcccctccctccgggtgcactcaccgctcggactgcgaatagttgcaccggcccagcaagttgagtttgcagagatgcaggttatcgcagggtctctggcagtacttgcgacggcagacccgggctcgagtggtggccaccaccgatcgggtgatcccggcctcgccgccggtctccaacaccacaaagcggtcgggcccggccacctgcagcacctcacagagctgcggctcagacagcgcgatctcctggagcagcgcgtccagggccatgcggcccccgtgggcgcacaggattttggtgatgaagcagcacacctccgggtccgccatggcgcgctggctgtgctggctctgccgcggcgcgggactcggttccgcggaaatcggaaatcgaaacttacaagtgtccaggggcgggcgcgggcggtgctactgctgggcgcgcccggagtcagcgagggcgcgctctccgtcgccgttagcccagcccagcgatccactctcggctctcaggtcaagaggctagatctcaccgaccgggtcctagtggcaggtttacagccggccgcaagggcaactgggtggaaagaaagagaacgcgcgggcaaatctgctggtgaccgcctggggtggccccctctcggttctaggctcggcgagggtgaggttctccagccgggctccgcgagccttctttagaaagaagagaaactaaaagcgatcttggggctctggccggtgttttataagccagccgactgaggcgtgtgacgcaagtcctgagagccctgttgaggagtgcgcaccccacccattcccggaaagagcagaccctagcgagcgcttcctgcgagccgtgcgctctgcctctgttggtagtgaatcttcccagcaactccacatggtagatattattatcctcaccctgaacttgaggaagtaacttgcacgaacacgcactggcatcaagcggagcccagatgccaccgagtttccccaaatcgcgtccccaggccccagatcgtggtaccccaggccccgatgtgcaagtttctcctccaccaccgtgccctcttaaagaacaacgattgccactctccctcgtttctgccttctcacgaacttttggacaaaccacttcttgacatggtcttgcttacctagaatcgctaactcggtgccctgaaccactgcttgtacctcaatcacggtggacatgctaagacatatcccaagatttcagatcggttcctccccgtagagattgggacaagaacttttccaccgtggggacgtactttgacccccagagttgacataaagattgtttttaagtgaaaacattgagctacagaagatgtagaaagaaatcttaatgaaacttcccttatctgactaaagcaaaacctcccgaaaacatggtgccattaaaagcctctcggagtattcagctgccaggaagacagactgtcccattaccattagcaccaaaaaacccaatgggctgggtgctgtggctcagcccgtaatcccagcgctttaggaagccgaggcagtgggaggattgcttgaacccaggagttcaagactagcctgggcaacatagtgagctctcttcaataataataataataataataataataataataataataataataaaaacaacccgggcatggtggtgtgcagccgcagtcccagctactcgggagcctgaggtgggaggattgcttgagcacgggaggaggctgcaacgagccgggattgtgccactgcactccagcctgggggatagcgctgagactttgtctcaaaaacacaaaacaacccaatcaaaacttccaaactctcctactgaagccctaaaactttcctttttgttaagttgaggtatataaacctttacttttgagttttctgttactggaagctcctgcatgcatgtgtaaataaactttgtcttttctcctatttatctgtctagtgccagttaatttttaggcccccaaagacaggacacaagttgaagagaaaaaaggtttttttttccaacatcttcaaataaaatagatgggtcatttgatcagataagaaatacatctttttaaaaaataatagattctggttgctaacttagaaattcttcaaaatgattaatgagaattctcctcagttttgtcattcatggtatataaaccctctttcaggaatagagtactttgttatgaaaaccagccaaacatgggggccacataggatcatcttaggatgtctaagagggacatcttgttccctctagttgctgcttctatagttgtcttttaatccacttggccttatttgtggtctgacaggttcccagggaccttttattatcaaatcaactaagttctagatgtttattgactatcttctatgtggtatttacattagttagtaatgtaaggacatgcagaagtttaaaaaacagtccctgcactcaaggagcatgtatgcgaagacatgaaaaaatgcatggaaatataagcaaattcatgggtaaatgccacaatgggaatatagaagatgagagactgaagagtctagtttggctacagtggttgggagtacagacatagaatctcctccaatttgaagccatgaaaaatgatttaagggccaggtgcagtggcttgtgcctgtaatcccaacactttgggaggccaaggcgggagga

SEQ ID NO: 587163 - DNA, 4001 bp, Homo sapiens
actgccttctgggtacagattctgctgccttgagagcagcctctgccacctgcaccaaaggctccagctcctacctctagtcttgtggctatcttcctttctagacgctgaaatgcattagagttaaaatcaggccacaattatgaactatcctctgttttctcaacatctccccttcttcccatccctcttctggccaagtggaggtgtctatgatagcatcactgtgctagattagaaaatcttgcttttaattggtggtcttaattgatgttccaattttctcttgggatttgtactattttgtttttaaaacttctttgtgtatggctaaactgaaacaaacgtactatttcgccatgatagcaattataaagggtacctttaaagcatttgaaactgaatcatgttgcttcgaaggcaattaaaattaatatgtaaagccaaaagaaaaataaatggggaaagtacttgtagcaaatgtgacatgagggtgactccttggtgactcacctctggtaaaagacaggggtcattctgcaaaagcaggatccgaagctggttttcattgagaccaaaaagtccatggcttttcaggacctgcatgttgacaggtgtgtggatatcatgggaaagggtacaggtagacctaaaagaacaaagccctcggtcagatgcccaggtgaagaaggaccagtctgtccaattccttgccttgagcagctttcaatgtatttaatacatgtgaagttgagtaattttcatgaaaccggggatagtatggcctaataagcactgatggaaaataagaaaattgggttgaaggaactcctctcccagggtcatttgaattttcagtagggatgctttgaagccaagggtcgcccacctcgcctgaggatgcacatctgttccgtaggcgactgcacctggccttctccccggcaacagctgccacagtccaccaacgttaaaaagaaagcgcccctatccccagcaccgctttggcggggtgtgtggctagagacaaccaaggaaaattcggggctgtgaagcacagcctggggtcaggaggcagccccgaaccccagctctggcagtcaggaaccacagggcctcacccaagccatccagccctgtttcctggggtgagactggctcagcgctgttaaacctagagggcgcagacccgcttctgcacaagtgtgtggatatgggggagcagcgatttccggctaaagggtccagggatctcatgggatcctcagacgccccacgccccccacctcccgccaaatatcaccagaataagtgagctccgaagtcccagtccggatttaacccggccgcgtcgcgcaggatccgggggggcgggcgggggcagcaacttttctggcgtgggcggttgagacgtctccatggagaggaccttcgcgcctttccgcccagctgctggaagcgcgggggaggacgcccaggaaaggcctgcgggagggggtcgtccagccccgcgtccccggcccggggcaggacgaagccccccttcccgtcgctcccgcttccagcaggacggccaggcccgcggccagcgcccacagtccccgcccgccgccgccttctcaccagcagtcccggttggggcacttgcccagcatgtgccggcggcagaagtgcagctggtcgcaggcctggcactcgccgcgctggtagcgggcgcagaggcgcacagaggacacggccaccaccctccaggcggaggtgccgccaccgcccaccgcgccggccgccgcctcggcctccgcgtccccgaggccctcctgcgtctccacctcctgcagcaggaaacgctcgggcccggcgcgctgcagcacgtcccggagcctggcctccgacagctccacgtggccgcgcaggtccttcaggaacatgcggccgccgtgggcgcacagcaccttggtgaggaaggagcacactgtgggctccgccatggtcgctggcgcgggccctgtgcgcgcggcgcagcgagccggggcgggcaggctcctcccagtcacgtccacgatttccagcgaacagcccggggatgggcctgggcctggcgaggggtgggcctgcgggaggccgggcgaggggcggccccggcgcgtggaagcagggtacggcgcctgcggatcccctggacgtggactcaggcggggacagcgttgatggagcgtctgctccgcccaggcaccgttcagggcgaagcctggccttgaggggcttgtatagtgggagtcacaaaggactcgccaacaagacaactggtagtgctagggaggcctgcggagaaggagaaataggtaaaaggtggtaggaggtgagtggccgggctgcttcgcgggaggtggccactagccacatgtggctgctgagcacttctgggattttttgttgttgttgtatttttatttttggagacaaggcctcacgttatcgcccaggctggagtgcagtggcgctatcgtagttcgctgcagcctggaactcctgggctcaagcgatcctcccacctcagcctcctgagtagctgagaccgaaggttcgcatcactaatttttttggtttttgttttgctttgtagaaacggggtctcctcatgttgcccaggctggtctcgaactcctcaagcgatccacctgcctcagcctcccagagcactggaattacaggcgtgagccaccccgcggggcctgctgagctttattggaaagtggctagtccgaattgagatgtgatataagtgtgaaatacacacactagattttgaggactgagaatgagaaaaagaatgtaaaatatctcactaactttatatgaatcacatgttaaacataatattttggatatatttggataaataaaatgttatgacaacttcatgtgttgcttctactttcctaatgtagctatgaggaaattttacattgcaaatgtggattaccttatttttgttgagcagcaccagtctagacctgccttaagcatccatgctttttgtccaacaccttgcttgtttcatgaacgtttgttgagccaactactaacgcagtgacagtacaaagatgaatcagaccatcagagaactcagccagcctagctgctattttgcaaggtgctcgtgaggattaaatgcattaatgtcatgtaatgtaaagaagctagagaggaagacaactggccagatgccagaagaccttctctgccatgctgtgaaatttggacttatatcccgagaactttgggaagtcactaaaggattttcatctgggaagtgtggatgtctcctgagtgccactcaaggtgtgtcattcagctctgagctttaatgtcttctcttcagcaaaacctttcctgacctctcaaatctaaagtagctccccagtctgcatggaacttaccactgatatttttcttctttattgtgtatttatatatttagctatagaattcaggctcatgaaagcaggaaccttgttttgttcattgctgtatccctaccacctaaaatagtacctggccatattgtaggataggtgttttagaaagacccctggcagcaatgagaagaatggatttctagaaaagcaagacgaggtggggaataacagaaaataaacaggatttgagggactataaccccagtgttatttatgttgagagtttgcagtggacaacccaaggtaagacgctcaacaggcaggtgtattctgtatacaggtctagaccttgagggacatgagaagggaagggatgtagatttgcgtgacatcagagcattaggtaactgagagttgataagatcacctggcaaaaatgaagagtgtgaaaaggtgggggacggggggaaagaagcttggcgaatacccacattaaataagcaagtgggggaagagaaaaataggcagtagcctacgtccccttggcactcagcatttgttcctgaactctctgcctaagct

SEQ ID NO: 587164 - DNA, 4001 bp, Homo sapiens
gttctccacaagtatttggcataactttagtagacagaaaataagactcaagacttcaagtatgcattatacaatttgaatctcttcagaaattcgactttttttttttttgagatggagtctcgctctgttgcccaggctggagtgcaacggtgcgatctcggctcactgcaacctccacctcccaggttcaagcaattctcctgcctcggcctccccagtagctgggattacaggcgcgtaccaccaggcgtgggcccggctaattttttgtatctttaggacagacggggtttcaccatgttggtcaggctggtctgtaactcctgactttgtgattggcccacctcagcctcccaaagtgctgggattacaggcgtgagccacagcgcctggcagaaattcgactcttaacagcagaaaaaacaattttgatatttctacctggagggacctttcatacccactccttccaaaaaaaaaagaaccaattagaaaattcgaatcaaagatcttcgggagatttcatgaaaaaaaaatcagggagaaaaaaactcagcaaagcaattctctcattttcagtggaaggcatttcaacagtgcctggggaattgctgaaagacaagcatttatttatttatttagagacggagtctcactctgtcactcaggctggagtgcagtgacgcgatctcggctcactgcaacctccgcctcccaggttcaaccaattctcctgcctcagcctcccgagtagctgggactacaggcgcgggccaccacgcccggctaattttttgtatttttagtagagatggggtttcaccgtgttagccaggatggtcttgatctcctgacctcgtgatctgcccgcttcagcctcctcaaagtgctgggattataggcgtgagccaccgcgcccggcgacaggcattattttaataaaaataggattacatcaacgattatagctcaaaagaaataaacttactctaagactctcagagattcatagagagcctcaagcgggtgtggttctaggccaaaaaaaattcacagcatccataaacttggatgggtaaaaatgacatttatttctctctaaatgacaagatttagcattttcttcaattatgaatgaaggtaaaaacaccatagtagtattagcagtacctgctaatttgtcaccaatggaaataatgttcccacattatggtggttgcatgtcttcaaatacctttgtgctcatcactacttcaaaattatggttgacaacacatactactagatattatggactctttaataaaaagcattgttactgcgtaactttttccttttaccatcttgataactacattccaatctaactggtttcctttataatcctatgtaatttactttaagcatttaaaaatattctgagagttaataagcttctccagagagccaaaggggtccacggcacaaaaaaaggttaagaatccccaattaagagaagtcaagtgaactcattcagttaacggtcctctttacttccaaaaataatgtccgatgacaaaatttcggctgcggttgggaatctggtacaccccgaggggaagatcaaagccgatcaaacatagtaaccagagtttctttcagattctaagaagccatccccactgcccgagtcgccgaccgaggggaacctcccccaacccgccaccccttccccaagccttcttcaatcttccaacgccggacccagggttaactcgtgaactcacgcgtccacgcctccctcttccggggcaatcccctcatctatcagctgccggattttctggggggtcccttctggggagcgaactactgcaccccaattcttttcaacccctacggcaaacgcttgtccctcacagggcgccgccatcttggtccgctgccgagttgcttccccgagagtttgaaggctccggaacttccgtcctgggaggttaatatccgcctcttgaggcagcctggctgggaaagtctaaccgcggggcccacgccttttctcatcattttagaaccttagagcgagcttaaggagggctgtactgtttaggacaatcttgattaatcgtttcctttatcaactagcatatttaggttgataagagatttttagaacgctgtcagtccaaattcagcagggatgaggggctcaacttaattttcaagtaatattaactaatacggccgggcgccgtggctcatgcctgtaatcccagcggtttgggaggccgaggtgggcggatcgcctgaggtcaggagttcgagaccagcctggccaacatggtgaaaccccatctctaccaaaaatacaaaaattagctggacttgctggcgggcgcctgtaatcccagctactagggaggctgaggtaggagaatcgcttgaacccgggaggcggaggttgcagtgagccgagattgcgccactgcactccagcctgggcgacaagagcaaaactccgactcaaaaaaaataaaaataaaaataaattaactcatacgaccctcctaagttgcacctttctacaagcgaggaaatggtgaccctcattggagagcaaataatttagaatccttgttggaaaccgtgttatggatggatttagaagtctgtggcatttgacactattgatactccttccttagtccaacaaatatttattgaaaacgtcctatttattttttttgagatggagtttcgctcttgttgctcaggctgcagtgcaatggcgcgatctcggctcactgcaacctctgcctcccgggttcaagcgattctcctacgtcagccttccgagcagctgggattacaggcattcgccaacacgcccagcaattttttttttttttttttgtatttttagtagggacgggatttcaccatgttggtcaggctagccttgaactcctgacctcaggtgatccgcccgcctcggcctcccaaagtgttgggattacaggcatgagccaccgcgcccggccgaaagcatcctattgatagtctctaggcactagcaatgacagtcgtgagcaaagaagctgtagatcttggtggagttagatgtcaaattttcctatagttttaaaattatgattacaagtgctccaaggatgtaccaaggttataataggagaatctaatttagtttgcacattctcctgagaaaaatcaggtactggagctgagacggatgagattgaagggaagaaatctgtacagaatcttccaacaccccaggttggaagactgatgtgactaaacaatgggcaaagaggaaagtgggatcacctcctacccttccagcaccctacctgtgggctcctaactctatcagtgttcccagcagcaggacctgcaacctattgatccaattacctttctgctcttcctaactccaccaccacccttgtttcttcttttcttagccagcttaaattcattactaattgttatcatcatccctttgcaaaatttgaacatgggttgagacttagttaatatgaaggaaacattgttgatttcactatatgtaataatggcattgtagttatggttcttaaaagcccttctttattagaaatgcatcttgaagtgtttataggtgaattgatatgatgtttggaatttgctttgaagttatccaggaaaacatgtggaggaatagatgaaaaaatattgcaaaattttaaactgtcggacttggatgatagaattgtgggattcattatattattctttctgctattaagtatgtttgacaatatcataataaaaagcaaaataaataagctaaaaaatacatgttcttgaataccctttgaatttccttgaacctctcttgcttaatagtacttacttgacaaaacctcaatcacagttgaagtaagttctctattattgcttctgtacccatacaactaaatatggctaaagagaaatgacaaacttgtctctttata

SEQ ID NO: 587165 - DNA, 4001 bp, Homo sapiens
ccccctctcctttctccccctcctccttccctttcctccccctctccttcctacccccctccccctcctcccttccctgcttcccctccttcttccttcctctccctccctcccttctccctccccctcctccctcccctttcctccccctcctcccttccccctttcctccctccctctcttctccttccctccctcccgtttcctccccctcctccctccctcccctttcctccctccctctcttatccttccctccctctctcttctccttccctccctctctctcttctccttccctccctcccctttcctccccctcctccctccctcctccctttcctccctccctctctctcttctccttccctccctccttccttcctcccccttccctccctccttccttcctcccccttccctccctccttccttcctcccccttccctcccttgctttcttccttcgtgtttgtgcacaagctcagcaagcccgatttaaaacttttaacaagaaagaagaggcgggtggatcaccttaagtcaggagttcgggaccagcctggccaatacggtgaaaccccgtctctactaaaaatacaaaaaaatcagccgagcacggtggcgcgtgcctgtaatcccagcattttgggaggccaaggtgggcggatcacctaaggtcaggagttcgagaccagcctggccaacatggagaaaccccgtctctactaaaaatacaaaattagccgggcacagtggcgggcgcctgtagtcccagctcctcgggaggctgaggcaggggaatcgcttgaacccaggaggtgggggttgcagtgagccgagactgcgccactgcactccagcctgggcgacagagcgagacagtctttaaaaaaaaaaaaaaaaaagccccaattccaaatccacctgcaatccaaagggaagaagttttgcagagaagttcttcccatttgtggggcgctcccatttttcctctcttccctcaccccttattctctctcagggatagcggttcaagtcggtgtccctgagccacacgtccccctctctcttccccgtcccctcccttccttcctcccaccatgagggaatctcccctccacccccactcctgccgaggccccgtgatccttattctcactcatatcgttggtgcccgccaggagactgggctattttttttttgtctgtttcttgggggcgacagattctgaggaaaaagggcgaagggctggttgtcgccctgagaaagtttctcctcaggcaacgggtgccaggactggcagcgcctagcaccttcacctacaaccagaaactagctggctaccttcaggagcaaggaggacctaaaggcgatgggcggaaccagctgccgcagcgactccgcaagcccctcacacctcaacccaggtttcccgccaccaagaaaaggcacgaggacgccctgagcactagctccacccgagggcggtgcgctcgcggggccgaggcgcatgcgcaactggaaacagcgtctgcgtttccgcagctgaggtaaatccgccatcttccacccgaacgtcccgggaaaactacaaatcccagaatcctctttggtgtcacatatttttaggcggcggccgcggcgcctgattgttcctgaagcacatctactaacttttctgtttcagactgccttttcctccctctttccgttctctaattcctcctcttcctgctggtctccttcacgccctcaccttaggattttgagactctcctggaccccactgtcacccctgccgccctgtcctcggcccagcactccgctggcagggagaccgggcggcgcatctccccgggaaaacggcgtagactcgcttcttcctcattggcagaagctgggggggcccagcgcggaccgaacccccgtccccgcccacactcgctggtatataagtcggcgtggcgccgcggtgggtgttgagaggcccgcgaactgacgggccagtgagcgggcgtcgggagtgggcggatgcgttggggttcgggtcgtgggtgttgaggcggagaggaaggcgtggtgtggcgtctccaggtgattgcgattgggggaaggtagaggagccagagaacgactcagccgtttcgggggaagaggaagttggacaacatcggctgttttagtgctttttatttttccccaattcagcagagaatattttcaaggggggtgagttataatgacctatcgcgttttactgagcccagttccactcccgcccttccttggctttgtagggtctcccctccgctccctcggaagcgcttctaagaaggtgggcagagggggggaggtttgctaccaacagctcatgaataattcatgagccccgcccttcgtcaggaagccccgcccctccggatcgcgctgacgcacgctgcgtttaccaaacttaaggaagcgacgtcacaggcccaacccctaagacggggggcggggcgccagtttcagcacgtgctgcctctacccgcgcaagcccaaaagggtgtgcgcaggcgctgcccactaggggggaggaaggaggcggggtggggaggttgttggatttagagccgggcggagaccgctgagactcattcctcaggaacaagggtcgggtgtcaaggagaccttttcacaccagctcccgtcccccgcctacggtgggtgggatcgcgcggcagagacaaaggagatcagtagggccggacatagctgcgcagggaagtagggtgtcagtttggggtggtgggcttttgcgggggctgtgggggggttatatttaaactcccagagccgttaagttggttcgtagtctgatgcgcgcgcaaccagggtggtggcggagtgcgcatgcgtggttcccgggcgaagggaacgcgcgctcaccgtgcgcgctcgcggccgggtggtagtggcggaggagaaaggggtcggcgcacgcgcggttgagtcctcgagtagttcgggtctcgcgggcctcttgttttggtctcgcgggctagtagggcgcacttggcggggaggcgcttgggcgcgagactaggcgtgaagagcagagctgcgcgcgcactcgggaaaggggggaagggagcagggtccaggcagggggggttaggccccctgatccccctcgttaccccgactggcacggaataaggggaggaaatgatcgagatggcggcggagaaggagccgtttctggtgccggccccgccgccgccgctcaaagatgagtcgggcggagggggcggccccacggtgccaccgcaccaagaggccgcctctggggagctccgcggcgggacggagcgtggtccgggtcgttgcgcgccatctgcggggtccccagccgctgcggtcggtcgggaaagccccggggccgcggccacctcctccagtggtccccaggcgcagcagcaccgagggggcggcccccaggcgcagtcgcatggggaggcccgcctgtcggatcccccggggcgagccgctcccccggacgtgggggaggagcgccggggagggggcgggacagagctgggtccccctgctcctcctcgaccccgcaatggctatcagccccaccggccacctggggggggcgggggcaagaggagaaatagctgtaatgtagggggaggcgggggaggcttcaaacatccggccttcaagaggcgcaggcgggtgaattcggactgtgactctgtgttaccctccaacttcctcctggggggcaatatctttgatcccctgaacctgaatagcctcctggatgaggaagtgagccgcactctcaacgcggagacccctaagtcatccccccttccggccaaagggcgagatccggtggagatcctcatccccaaagatattactgacccgctcagtctcaatacttgcactgatgagggccatgtagttcttgcttcgccactcaagactggtcggaagcggcatag

SEQ ID NO: 587166 - DNA, 4001 bp, Homo sapiens
aggtcaggagttcgagaccagtctggccaacatggtgtaatccccatctatactaaaaacacaaaaattaaccgggcgtggtggcacatgcctgtaatcccagcgactcagggggtggaggcaggagaatctcttgaacccaggaagcggaggttgcagtgagccgagatcgcgccactgcactccagcctgggcaacagagcgagactccgtttcaaaaaaaaaaaaagaaaagacactggatactggaactcttttccatagtgtagcggtttaagaaaaaaaaagaagaaaaaaaaggtactggaattggccggccgtagtggctcgtgcctgtactcccagcactttggaaggctgaggtgggaggatcacttgaacccaggagttcaagaccagcctgggcaacaaagcgagacccccatctctacaaaaaatacaaaaattagccaagtgtggttgcgcatgcctgtggaggctgaggcgggaggattgcttgagcacaggagttcaagcctgggcgacagcatgagaccctgtctcaaaaacaaaccaaaaaagataccggaactggtcacttttgaccttagcagataagattctgggctgtaatgccaagtgagataaccaaacaagaagctattcatgacatgataggtgagagtaaacaaacagcagcaattctcacggggtgattcagggtacccagcctacatttctcttggttgggtaattttcagccggcagctctggcattcctcttcccaacattcacagataattcaaacagcagctcctcttgggcagcagtgtgtgcctggcatgaccagtagctgccggacatggttcttccaggagcctggatctggctgcagagacagatcaattcaacacccacataagacgacaagagttgcagtcaaaggcagaatacctgtggaaaaggatttggaagtaggggattttcagcacccccagcatgaatgggtaagactttgggagaaatggcccagactaagttgcttaggcctgctcccaaatctttgggaggcccaggcaggaggatagcttgaggttaagagttcgagaccagcctgggcaacacagtgagatcactgtccctacataaaaatttaaaaatcagtggggcgtggtggcccgcgcctgtggtcccagctacttgggaggctgaggtggaaggatggcttgagcccaggaggtcgaggctgcagtgagctgtgatcgtgccactgccttccagcctgggccatagagctggaccccatctctaaaaacaataaaagaggccgggcgcggtggctcacgcctataatcccagcactttgggaggccgaggcgggtagaacacctgaggtcaggagttcgagaccagcctgaccaacatggtgaaatccgtctctactaaatacaaaaaaaattagctgggcgtgatggcgcatgcctgtaatccaagctactggggaggctgaggcagaattgcttgaatccgggaggcggagggtgcagtaagccgagatcgcgccactgcactacagcctgggaaacaagagcgaaaccccgtctcaaaatacaataataataaagactttgtgagaaacagctagttgggaagaaataagccaagtcggtagccttgggtctctccccgccactccccattagggcctcccgaagccacccccatccaaggcacctcctgggcgggcctggtcggagatttccctgggggctggagccctggtagggggacgtggagtgcagcaggctcggaggggacaccggggccgccccggactcgggcgaggtgggggtgggacggcggccctacacacaaggggaaagggagggtcagaggaggagactgacggtcctgggacagcccaagcttcccacagccccgcggaggcggccttaccgccagccgctgggctccggcgcctcccgggcgcgatacgagacttcctgcgggctcgtgacatcagcacggcgcccctgaggggctgacttccggcggaagtgtgcgagggccgccgcgggttgcggggctggagtaacagtgacctccccggcgccctcgcagccagcctggggacctccgtggccgggtgtaaccgctgggaagtgcgattttattttattttattttattttattttattttattttattttattttattttattttatttattttattttatttattttattttatttattttattttatttattttattttatttattttattttattttattttattttattttattttattttatttattttattttatgtattacctattttcttatttacttatgtattcgttcattcattcagaaacagcctcgctctgtcgcccaagccggagtgcaatggcgctatcctagcacactacaacctccaactcctgggctcaagcaatgcctcctgcctcagcctcccaagtagctgggaccacaggtgcatgccaccacacccgcctaatttttttttttttttttttttttttgtagagacgggtgtctcactatgttgcccaagctgatctcgaactcccgggctcaagtgatcctcccacctcggcctcccagagtgttgagattacaggcgtgagtccctgcactgggctggaagtgggattttagagcagtattgccaggagacttacaggaggaccgacctgggcctggtgggggcgatcattctggggctgtgacagggactaagctgccctgcggcctgcacagagaccagtcatgtccctgctcagagcccagcagggggatccaggtggcccagggcagtcacacttagggggctctcagactatgtctgtgtggtggacagagtttgctttcagccacccacactgttgagatctagcagaacatttccagcatcttccgttgcagaagcgggcagaaagcacaatgtgtacccatcagtcagattccgctccatgtgtgtccttgctcctgatgacaaggacatgttgctctgtacagccctaaatatcctcggggcagtgacaaatacttgaccacaaacgttgaggataaaagggaagggtgtttgatgctaggcaggcttggggtaacaagagctgcttccaaacatagccctgagaaggccctgtggggtgtcctttgctctgaccatctctgaatcagctgaggccagggtctattcctgatgcctctgaagacctgagccaggcctgtcctcctttgaggggaaatgtctgatctccaaacactggccttaaagctcttctcttttcctgtctctttgctacctacgtcagcttcttgatgcgttttcttttcctttttatgaaactccttaccaacaggatgccttctcctgtgtacattgtatccaaggtcttcataaatttatggacccagaattgaaaaaccaaggctcatacctataattccagcacttcaggaggccgaggtgggaggatcgcttgagcccaggagtttgggaacagtctgggcaacatatggagaccttgtctctacaaaaaatttaaaaattagccgggtgtgctggcatgcacatgtggtcccagctacttaggaagctgaggtgggaggattgtttgagcccaggaggtcaaggctgcagtgcgttaggatcacaccactgcattccagcctggaccacaaaacaagaccctggttcagaaaaaaaaaaaaaaaaagattaatctctcagcacttggtcagttcctgaaacctaggcatgtttgattttttgcctctttaaaacatccaagcgcaaaccttgacacctgcattttataaatagcataagagaaaacagactacttaagcttaaaaccaaaaattcaagtgtgatcaaaaggattgccttgcttgtgatgcatggagcaaagaattcctctttggagtgttgctaaacgctcctgtcagctcctgaaactggacctgcagtatcag

SEQ ID NO: 587167 - DNA, 4001 bp, Homo sapiens
acagtgctcaaaacgcagatggcggagttaagtgtcacctacaagagaatcagaatagttaggaggaaagctggactgcccttcagtcaccaggatttacaatgtaattacagctaatgaaagtcaacaaacgcactgtgtggggagcattccatggagttttagtacaaataccaggtgtccgccattcgtagtcaaccccattaagagacacggactccttcacaggccttttaattcctagtctatgaagcactccttgaactcgggtttctatttaaactcacactgagggggcgagagctaattcacacagctgccagtgatgattacgactttggtgaattttaagtcacaattttatccatggaatatacttgttcacataaacaaaactctgttactaggtgctaaatcacatcagttgactccattatccagagaagatttaactctgtccctcgcctctctcttcaactcccttaggcattgaatcttactgtgaacttattcctcgatgacatcaacctggagttgatcagggagaagcgcaagctgttaagtcactatggaaaacaggcagacagctggtgaaactaccgcactcgagagagaatcaaggggctcacgaggtcccctccatgatctagtacccaccagccctcccggggccttttcctggggctcacgaggtcccgtcatctagtactcaccagcccctcccggggccttttcctgaccttcccatcagctctctccccactcctggaggcctcctagactgtcgcctaagactggaacactctcgcccatggcaaacgtctagttatcccctcccgcctcagtttaaagccattcccaccctccccagttccctctatgttacacgcccgctacttaaggtgcccattagtcctttcccagccctccttcgcccacagcttccaactacagatccgctgctttactattagctcccggtgcccgacacacagcaggcgttccgaaattgttttgttcaaggaattcacaagagtttgatgtgaatccccaaatgattttgttctggacgcacagcacccgtcctaggaaaccaacaccctaccctggcgggccgggcccgcagcaagaaaacacacatctacgtggctgtcactcggctggcgggttaacgaccccgtgcgacccggtactacggccccgatggcaggcccggcccccagcagacagccggactcccagcagacaggccggacccccagcagccagaccccggcaggcccggtccccagcagacagccggacccccaacagccagaccccggcaggcccggtccccagcagacaggccggacccccaacagccagaccccggcaggcccggtccccagcagacaggccggacccccagcagccagaccccggcaggcccggtccccagcagacaggccggacccccagcagccagaccccggcaggcccggtccccagcagacagccggacccccaacagccagaccccggcaggcccggtccccagcagacaggccggacccccagcagccagaccccggcaggcccggtccccagcagacaggccggacccccagcagcctgacctccagcaagcagccggactttcagcagccgcactcctagcagacaggccgaacccccgagcaacctgacctcaaggcaggcccgacccccggcagaccctgtctgcgcaatcccggccccgtacctggctctcgtcggggacccaggcagctgaggtgagcagcagatggaagagacgtaaactcaggtgtcctcctccgtagtcggctccgggtagctaagcagaaagaacctcgacactggcaccgagacgccgtcggaggcacacccacacccacaccggaacgcaacatctcgctgcccgcggcctacggggatttatccgcagcccccggatctgagagccgtctgggccttggggtttccgggcgcgccccgacaacgtcacccgcagaccggccaatcccgccaggccgcggcccagtggcgccggcgcacaccgaagacgacaccagccatccggccaatcccgccccgccgcgccccgcaggcccgcccactcctcgcttctccacttcccttctcgaagtgtccggtcgcttctcgcaggcggcgcgcttgctgggtcacagtgaggcggctccgcgcaggcgcagccgggcgggcgaggagcggggaagctgactcagggctgcggccggggtcctgcggggtaggagcgcgaggccggcctgagggaggaggcctagcgacccatccggcgcctcccgccccgggcacccgcccgcggccgcgcatcctgcgggccccaggaggcctccatctcaaaacaacgtgtttttaggtaatttcaaacttagggaaaagcttcaagaataataccgaaaatgtcagtgtccccagcacctagatcccccagttaaatccttttccatttcaccgcgctgccccccgccccctggacggttatgtggccgcgtggggttggctctgcccagggccgcggtcactgcacagaacgccctgcacgtaaggggctccgcctgggtaagaccccgcccagctgggcaggaggagggcgtgggcccaggacatggagaccagcctgggcaacatagcgagaccccatctctgcagaaataaaatattagccggacggtgcacggtggctcaggcctgtaatcccggcactttgggaggccgaggtgggaggatggcctgaggttagtgtctcacatgtctgtgtgaagagaccaccaaacaggctttgtgtgagcaacaaggctgtttatttcacccgggtgcagcccggctgagtcggaaaagagagtcagcaaagggcgatgggattatcattagttcttacaggttttgggatagacggtggagttaggagcaatgttttgcaggcaggtggtggatctcataaggtacattctcaagggtggggagaattacaaagaaccttcttaagggtagaggagattacaaagtacattgatcagttaggatggggcagaaacaaattacaagggtggaatgtcatcagttaaggctgttttcacttcttttgtggatcttcagttgcttcaggccatctggatgtatacatgcaggtcactggggatatgatggcttagcttgggctcagaggcctgacaggagttcaagaccagcctggtgaacatgacgaaaccctgtctctacaaaaataagaaatgaacgcagcatggtggcatgcacctgcagtcccagcctcttgggaggtggaggcataagtcagctgtgaatgcgccctgcactagagcctgggcagcagagcagacccttcctcaaacccaaaaagcgtcgtgccaaccagaccagatggtcgcctaatcaatagagaccatgcccaatcaggtaaggacagacacaaccaggcatgctttttcttgttttgttttttgtttgttgttttgagatggagtttcactcttgttgcccaggctggagtgcagtggtgtgatctcggctcaccggaaccaccacctcctgggttcaagcgattctcctgcctcagtctcccaagtagctgggattacaggcatgcaccaccaggcccggctaattttgtatttttagtagagacgggggtttctccatattggtcaggctggtctcaaactcccaacctcaggtgatctgcctgcctcggcctcccaaagtactggcattacaggcgtgagccactgcgcccagcttgttgtttttctttagacagtgtcttcctctgtggctcaggctgaagggcactgggatgatcacagctcactgcagcctccacctcccaggctcaagccatccttcttcctcaggctcctgagtagcgggagctacaggcatgcgccatcatgcctggctaatttttgtattttttgtagatacggggttttgctatg

SEQ ID NO: 587168 - DNA, 4001 bp, Homo sapiens
aaacagcccagtatttttccagggcatagtcttgaaaatgtaaacaaaggctgggcacacagtggctcacgcccgtaatcccagcactttgggaggctgaggttggcggactgcctgagatcaggcgttcgagaccagcctggccaacatggcgaaactctgtctctactaaaaatacaaaaatcagccaagccttgggacacatgcctgtagtcccagctattcgggaggcggaggcaggaggatcgcttgaactcgggaggcagaggttgcagtaagccgagatcgcaccactgcactccagcctgggcgacagagcaagactctgtctcaaaaaaaaaaaaatttttttttaaataaattgccctttgccctttacactcatttttttaaagagcaatcaaatgttttaatatgaaaaagctaccttaaaagacagctagctattcaaagaatattgatactcccacagaatgaaaatgttagatttaatatgctattcatctgtattttaaatgcttttaaatcgagaatgagcaaaagactaagtagctagcttcctcgtttgtattttaagagtggtgaaaactgcctgaaataataaacaagaatcttatatgttaattcagagaagatacaaacctggatacacattctggggcaaatcaccatggtttcctatgtaaaacagcgatttctccacatttgttcagcatatatactaacagtgctttgctgatgtggttacaatgaattctccacaattcaattcaacaagtatttattgaccgcctccaatccgcctagcactggcccgtacaataaatgctttctttggtcccaggccatggaacagccactctctataatgaaagtatcttactgtgtacagggggcactgcaggaaagggaggggagggatggaggagtgtcaagctaaactgtagttaattcttcaattacattgaccaaatcatttcgaagtcggaagggccttttgagaaaatccagttagtttttattgatgacgaaattaagacttggtgagtgtctcgtcttatccaaggtcactcagctaatcagtctcctagtgacacagtgcaatttccacaaattcccttcacttctcaccccactccatgtcaaacagagcaactatccagaattgaaaaatccacctaacgtcccggacagctcttttccaaagccttcaaagcattccatcaagctgaaagagtggggtgtatataatctctactagatcccaatcacctatttatccactatgactaggcttcaaatactctttaatcaccgctcagtgatgagggtgggagaaggaaaggcaggtctggaaacgtatgcggcacctcaaaatgtgtccatctctcatccttccgctcatttcacctcgaggtcccgaaggaaccggggggggaaaaagacacctcaccggaatcaaagcaaatggcgactaagggagagcagaaaaatcaagaccggggtcggttcgctcgcgaccccgtttgcagaaacgtcaaagggcgatgacgacactgcgggagaggggcccacagacggcttctccccgggtctccgggcaccctcagccactgaaaccctcgccccctccccgcctgatcctgggggtggggcggggacgtctcccaggaagaacggcgctttctacggccgggcccggccaggaggcaggggcatggactctcttcgcacaacagcggggccgcctggagggggtcccagggccgcagctgcggagcccaccctcgcgcacacacccttgcggccccgccctcccaccccagaggccggccccaagtctcaccgtgagccccgggagcggcctgggggcgctgggcgagaaaggggagctgactctggggctcaggccggccgaagggcaccgcacacggacttaggccctcccgacgcctcgacacagacacaatgagtcacaaaggccggaagcgtgtcaccacctcgtcttccgggaccgcgccgcgcttccgggtcctctctaggagcgcgggaggactttgcatctcggtttccgaatcgctggaccaggcgcctgcccttgagttttcaagcctccagcttggaggatcaggtcccagtccgcccctagttaatgcagggactaacgggagcaggtggtggggggtttcaggctttcccctactcaaactcaaacagactctccagctcagacaccagtccatgtgaaagttcgatttcacctgtctttttcatctcaggcagtccttgtagtaattatagttattatcaagcaatatagtacttggtaattgtatgtctgtggcaaaggaactgaaacaaggatgtagactgaggaagatcaaagtgaagccaagggtggctggtttcccaaagctgccacggtagcttctctcagggccctggagctatatggagtggtattttcaaatacttggcccgtggacaagggatgtctttccacaagcaagcatagttataaggttctgtgctttgctcatgtggcatatgctattatagccgtttaaaaggagttttcagagtaacaacagacacttttaccttcaaagtgctttcacaacctaccacagttacagccttcatctttgccttgcagggtaaggcacgcataagagggggccacgttgtgcaagggtgggggggactacaggctttaatggttgtgactttccactatgttccgagacaagttcatgggagaaactcagtagcttggttgcatgactcttactgcttggagagatttactttttttttttagatggagtctcgctctgtcacccagcctgcagtgcagtggcaccatcttggctcactgcaacctccacctcccaggttcaagcgattctcctgccttagcctcctgagtacctgggactacaggcgcacaccaccatgcctggttaatttttgtatttttggtagagaacagggtttcaccatattggccaggatggtctcgatctactgaccttgtgatccacccgcctcagcctcccaaagtgctggaattacaggcgtgagccaccgtgcccggccagatttactttttaaaaaatgtttgaaaactaaaaagcaatgacagggccagacacgatgactcaagcctgtaatcttagcacttcgggaggctgggacgggaggattcttgagcccaagagttggagaccagcctaagcaacgtaatgagaccctctctctacaaaaaatactaaaattagctgggtgcagggtagtgtgtgccagtggtcccagctgcttgggaggctgaggtagaaggatagattgagcccaggaggttgaggctgcagtgagctatgattgtgccattgcaccccagtctgggccacagagcaagatcccatctcaaaaaagaaaaaaagggccgggcacggtggctcatgcctgtaatcccagcagtttgggaggccaaggtgggtggatcacgaagtcaagagattgagatcatcctggcccatatggtgaaaccccgtctctactaaaaatacaaaaattagctgggcgtggtggcacacgcctatagtcccagctacttgggaggctgaggcaggagaatcgcttgaactccagaggcggaggctgcagtgagccgagatcgtgccactgctctccagcctggggacagagctagactctgtatccaaaaaagaagcaacaacagtatcattaaaggaaatttgcaaaatggagaaaaataattaccggtaatctctccaccctaacacaatccccatggctttagtttacctttttcctgttttcatatacaaataaatatttattgatattattttaaacactgttcaaaaccatagttgcagttgtattgaagaggaggctggtatcctggaagtatctgctacattcatatcatgtgaacactgttttttaaggaagagaaaatatatttactattcagt

SEQ ID NO: 587169 - DNA, 4001 bp, Homo sapiens
gccgaggtgggaggatcacgaggtcaggagatcgagaccatcctggctaacacggtgaaaccccgtctctactaaaaatacaaaaaaaaaaaaaaaaaaaattagccgggcctggtggcggacgcctgcagtcccagctactccggaggctgaggcaggagaatggcgtgaacccgggaggcggagcttgcagtgagccgagatcgcaccactgcactccagcataggcgacagagcgagactccgtctcaaaaataaataattaaataaatacagtaatttaaaaaataaataagatcgcagattgtcttctacaggttaacacactggatattgcttctctttgctggagtggcaggaagtcacagggtacctaatcccaggagaacaaaagaatatgaatgaagcagcagaggactaagaatctcacccctgctcagcagatggttcactcctctccttcattgctcatatagcttctctttgactcacctgctgtctgcgttcctcaagttctcgctgtatattttctatcacggccaccgcctcttctccactttcagggtgatgttccctcacccagggctggaactcttcaggcaggatggtcaggaactgctccagcaccagcagctccaggatctgctccttcgtgtgcagctcgggcctcagccactcacagcagagcacccggagttggctgagagcctcccggggtcctgaagcctcatggtactggaagtgcctgaagcgctggtaaaaagtctcaaacgttggcgggttgtactcctgcatccaggtgcagtcttcttcttccaccttcactatgaaaaggtcttcctgctcctgggaagtctcagctggggggtctaagtctataacttctcgggattcggtcattatcattccaactcagagggaagtcttcgaggctggctgtgttacactgaaacaattgtttttctgctctttaatatcttctgaaggacactttcagtagcatgcaacctactgatgtattgggcatcattattagcaaagacagatggcaaagaggtcatctatactaaagacgaccactcaacaaagtaatttacttaaaaataggtactacaaggtagccatcacttcacccacaaaatgataataaggaataaccccaacattttaaaagtgtaaaagagagccatacaaatctgacatcaggcccaacctaaaacacagttttagagtgaagaactttacattccatataaataacgggacgagactaactagtccagacgcagccgctctttctctctaccataagacgaacttaagtcggaataagggtgaaaatcattataatggtcaaaactgagcctgttctctaagctacaagagcttgacaggccaaggggagactccatcggtcccaaagagaagcagcgtttataaggtacagatctggacctggattcctcagaatggcccctgaccccgagatacagagactgtggcccggtcaaggttagggacaggacccccgtccagtcacgaagcccctgccccctcccctcaaggccccactctaggggagctctcctggaacatcaagctccccgcagccgaggctgggaagatgcggttcttcccacggagagaaaccgaagccgacactccccaacacttcctcgccggaagtaaccaagtccaatcttgccctgtccaacggggttaaaccgttagatcccacccccccccgaaagcacttccgcgtcctctctaggaatcccggaggacctcacctcgcacggggggcggaccaatcggcggggagatgggacgcgggccccgagtcccagcccaccctcagtgactcggacgtctccagggcccccgaagccgctcgcacagcatcaccaaagcggggaggcaaacggagccactctctcccctgctccatcccaaagccattcaaacagcccaagctcctcccctttccgtggggcggggaagggggcggggcctccagagttgggctgaggttgctcgtgtctgattggccggggagcttgcgccttcccccacccccaacgctctgcgccccgatttgaagtaggtctgtaccttgctgacagcccgcaaacctcgcttatgttgaatttggggcccttaggttttcttcacccgcatcctcgctactctcaccacccactttccaaacaaacccacctcttgaccaccgcagtcggctcagaaggccgacatcttcaacgtcacacccgcgagtcgcaggggccagctgttcccggaactacatctcccaggaggtggcgcgcgggactcgccggttggccaatggggggcggctctctttgcagcctcggtctcgcgagcctatcagaaggtggcagggcccggagtcgtgtcctcgggagccaaggctggaaggctgggagtgggcggagggagcggggcatccctttgaagagaggggcgttgcttacgcagggcttccctggccaagggggtctcgtccttaatgatacctctcttcagccaggcgcggggtcccacgcttgtaagcctagctagtggacaggctgaagaagcaggatcgcttgagcccaagagttcgagaccagctcgggcaacatagcgagacccctgtctattagaaataccctcccttggccgggctcggtgactcacacctgtaatgccagcactttgggaggccgaggtgggtggatcacctgaggccaggagttcgagaccagcctggccaacatggtgaaaccccgtctctactaaaaatacaaaaacttagctgggcgtggtggcgcgagcctgtaatctcagccacttgggaggctgaggcaggagaatcacttggacccgggaggctgaggatgcagtgagccgggatcgcaccattgcactccagcctgggcaacatagtgagaccccatctcttagtaataatctcccgtttttgttttgttttgttttgttttttgagacggagtctcgttgtcccccaggctggagtgcaatggcacgatctcggctcactgtaacctctgctcccaggttcgggcaattctcctgcctcagcctttcgagtagctgggattacaggcacactcaccacgcccggcttattttgtatttttagtagagacggggtttccccatgttggccaggctggtctcgaactcctgacctcaggtgatgcgcccgcatcgacctcccagtgctctccttttcatatggtgctttatagtttccaggccccagccctcccctccccctacgccccgcgcagtttacaaagttgatgggcaggcaggagaagagttactgttgccactgttttacaggcgcgaaggaaggaactgctgtgaaattgcagcatctgcaaaaagatgagaagatatttagaagttaaaggtctcttttcagggagcccaaaatcttgcattttaagtagcttcctatctaggaccaaacccccggtgaatgtttgcaatgcccgtattttgtgtgttagtgagttggtatagaattttgcacctatggcttaattttgttgctcgtataaagttgtttaatgtctatgaaagttgttccagatgggcatggtggctcacgcctgtaatcccaacattttgggaggccgaggtgagaggatcactagaatccaggagttgaagaccagcctggcctttttaccccgtctctacaaaaaataaaataaaattagctaggcatggtggcacatgcctatagtctcagctactcagcaggctgagactggaggatcacttgaattcaagaggttgaggctgcagtgagttatgattgtgccattgcacttcagcacctcagtgacagagacaccccgtctcaaaaaaaaaaatgtttggtggatacccattcttttctaatatatttacctccatttaaatgatttatttatttgtttgtttatctatttatttttttgagacgg

SEQ ID NO: 587170 - DNA, 4001 bp, Homo sapiens
cagattgtcttctacaggttaacacactggatattgcttctctttgctggagtggcaggaagtcacagggtacctaatcccaggagaacaaaagaatatgaatgaagcagcagaggactaagaatctcacccctgctcagcagatggttcactcctctccttcattgctcatatagcttctctttgactcacctgctgtctgcgttcctcaagttctcgctgtatattttctatcacggccaccgcctcttctccactttcagggtgatgttccctcacccagggctggaactcttcaggcaggatggtcaggaactgctccagcaccagcagctccaggatctgctccttcgtgtgcagctcgggcctcagccactcacagcagagcacccggagttggctgagagcctcccggggtcctgaagcctcatggtactggaagtgcctgaagcgctggtaaaaagtctcaaacgttggcgggttgtactcctgcatccaggtgcagtcttcttcttccaccttcactatgaaaaggtcttcctgctcctgggaagtctcagctggggggtctaagtctataacttctcgggattcggtcattatcattccaactcagagggaagtcttcgaggctggctgtgttacactgaaacaattgtttttctgctctttaatatcttctgaaggacactttcagtagcatgcaacctactgatgtattgggcatcattattagcaaagacagatggcaaagaggtcatctatactaaagacgaccactcaacaaagtaatttacttaaaaataggtactacaaggtagccatcacttcacccacaaaatgataataaggaataaccccaacattttaaaagtgtaaaagagagccatacaaatctgacatcaggcccaacctaaaacacagttttagagtgaagaactttacattccatataaataacgggacgagactaactagtccagacgcagccgctctttctctctaccataagacgaacttaagtcggaataagggtgaaaatcattataatggtcaaaactgagcctgttctctaagctacaagagcttgacaggccaaggggagactccatcggtcccaaagagaagcagcgtttataaggtacagatctggacctggattcctcagaatggcccctgaccccgagatacagagactgtggcccggtcaaggttagggacaggacccccgtccagtcacgaagcccctgccccctcccctcaaggccccactctaggggagctctcctggaacatcaagctccccgcagccgaggctgggaagatgcggttcttcccacggagagaaaccgaagccgacactccccaacacttcctcgccggaagtaaccaagtccaatcttgccctgtccaacggggttaaaccgttagatcccacccccccccgaaagcacttccgcgtcctctctaggaatcccggaggacctcacctcgcacggggggcggaccaatcggcggggagatgggacgcgggccccgagtcccagcccaccctcagtgactcggacgtctccagggcccccgaagccgctcgcacagcatcaccaaagcggggaggcaaacggagccactctctcccctgctccatcccaaagccattcaaacagcccaagctcctcccctttccgtggggcggggaagggggcggggcctccagagttgggctgaggttgctcgtgtctgattggccggggagcttgcgccttcccccacccccaacgctctgcgccccgatttgaagtaggtctgtaccttgctgacagcccgcaaacctcgcttatgttgaatttggggcccttaggttttcttcacccgcatcctcgctactctcaccacccactttccaaacaaacccacctcttgaccaccgcagtcggctcagaaggccgacatcttcaacgtcacacccgcgagtcgcaggggccagctgttcccggaactacatctcccaggaggtggcgcgcgggactcgccggttggccaatggggggcggctctctttgcagcctcggtctcgcgagcctatcagaaggtggcagggcccggagtcgtgtcctcgggagccaaggctggaaggctgggagtgggcggagggagcggggcatccctttgaagagaggggcgttgcttacgcagggcttccctggccaagggggtctcgtccttaatgatacctctcttcagccaggcgcggggtcccacgcttgtaagcctagctagtggacaggctgaagaagcaggatcgcttgagcccaagagttcgagaccagctcgggcaacatagcgagacccctgtctattagaaataccctcccttggccgggctcggtgactcacacctgtaatgccagcactttgggaggccgaggtgggtggatcacctgaggccaggagttcgagaccagcctggccaacatggtgaaaccccgtctctactaaaaatacaaaaacttagctgggcgtggtggcgcgagcctgtaatctcagccacttgggaggctgaggcaggagaatcacttggacccgggaggctgaggatgcagtgagccgggatcgcaccattgcactccagcctgggcaacatagtgagaccccatctcttagtaataatctcccgtttttgttttgttttgttttgttttttgagacggagtctcgttgtcccccaggctggagtgcaatggcacgatctcggctcactgtaacctctgctcccaggttcgggcaattctcctgcctcagcctttcgagtagctgggattacaggcacactcaccacgcccggcttattttgtatttttagtagagacggggtttccccatgttggccaggctggtctcgaactcctgacctcaggtgatgcgcccgcatcgacctcccagtgctctccttttcatatggtgctttatagtttccaggccccagccctcccctccccctacgccccgcgcagtttacaaagttgatgggcaggcaggagaagagttactgttgccactgttttacaggcgcgaaggaaggaactgctgtgaaattgcagcatctgcaaaaagatgagaagatatttagaagttaaaggtctcttttcagggagcccaaaatcttgcattttaagtagcttcctatctaggaccaaacccccggtgaatgtttgcaatgcccgtattttgtgtgttagtgagttggtatagaattttgcacctatggcttaattttgttgctcgtataaagttgtttaatgtctatgaaagttgttccagatgggcatggtggctcacgcctgtaatcccaacattttgggaggccgaggtgagaggatcactagaatccaggagttgaagaccagcctggcctttttaccccgtctctacaaaaaataaaataaaattagctaggcatggtggcacatgcctatagtctcagctactcagcaggctgagactggaggatcacttgaattcaagaggttgaggctgcagtgagttatgattgtgccattgcacttcagcacctcagtgacagagacaccccgtctcaaaaaaaaaaatgtttggtggatacccattcttttctaatatatttacctccatttaaatgatttatttatttgtttgtttatctatttatttttttgagacggaatctcactctgtcgcccaggctggagtgccgtggcatgatctcggctcactgcaacctccgcctcccgggttcaagcgattctcctgcctcagcctcctgagtagctgggattacaggtgtgtgccaccacacctggataactttttgtatttttagtagagatggggtttcaccgtgttacccaggatggtctccatctcctgacctcgtgatctgcctgcttcggcctcccaaagtgctgggattacaggcgtgagccaccgcaaccggtttgaattatttataaacaccttttgca

SEQ ID NO: 587171 - DNA, 4001 bp, Homo sapiens
aagtgggccctgtggcaggcaacgcttctcaataggtcacacatcaggactcactgtctccaagattgcagggtcaggatccaacccaggtgacaatggagtcaaagggtattgaagaaatgatggctgtggaatgttgcaggagcggggtccttggtagcaaaaagtggggtactcacatatacaggtagctgaaagtcctgccccctctacctgtaaggccacagtactaaaatgtctaagcgtggggctaagtcaggatgcagagttcatcaaaaagtccaggaataagcaatggcccaggcatgagacatttcagtgaacagctgaagggacaaccttaacctggcatcagtttacaatgtgtaagatggatatctggtagcatcctaggactgaggacacatgaccaccttcatgtcatcagcccttgggagctcaatcccaataatcaggatgctccccaaacatcttaggcctgtccttcagaaatctacaaccggcaactgtcacctgcttgttctcttcatttacacttccagcttgtaactatcccctgggcatgacaagggctagaggtcagtacctctggaagttaagattccttcacttctcctgtttccacactaagcatcaagggatgccctctggttctagcttgccagaacttggtggtgagtctgtgtccatcctatccgtaatcaccacggtctcagaccaagtcacatgttccgtgtgtgtccctgtgaaatctgcgatgacacaaattaaagacaccaccatggatgttctgtaatactggaaagagggtaccctagggagaaggagaggcagaacactgcagggcagagggtccagggaatgggaggagagacacggtaggtggaggggtaaacaaggcaccgggtgggggtgccgcggtgaaggacacctggcactagggaagacaaggcacctcaggggagcagggcatcctcacgcctgagcttcagtatgtccagtttggaaaggggtgtccccatcaaaactggcagctgggggctggccgctcagcgtcgttcagcccaggagcggaacagctcctccgcgagcaggtgacggcctcagacggcccccacatcgccgtgctggtgggcacgtaagtaggagcggaggggcgtaccatgtaggtgagactgcctggccccaaagctaggaacgatcaggttggagcgaaggcccggccagccttcatcgctcaggagaaccccgagcgccgcttacacccctcggccagcctccaacaaagactcaggggagggctggatgaccctgacgcccacggggccgagcctgcccaagaccacgacgcacgcgtggcaggtgccggcaggtgggcggcagagcctctagccccagcccagctgtgaaccctaccgtggcgccgcagcggaaccggggcgccccgggcgaccagctacacctgcctgcccgcccgcacctgccggcccgcacctgccgcacctgcctgcccccgccggcccacacctgcctgctggcggcgttgccaggggccacccccaggaccccgctcacctccgcccggcctggcccggcccctcgccgtggcggcccccggcccgcgccgctccatgcgctcagcccgccctccgcgccgcccgccgccccggggccgccgccacccgcgccatcgcgccgccgcccgctccgagggcacaatggagccgccgccgcgccgctcatgcatatgcatgacgccgcgcagccggccccgcctcccaggccagagcagcagagccccgagccggcgctcggggcgggggcggccgcgagcccgagcggcccaaagcggcagggtggggccagggccgcaggtggctgggcgggcaggagacgcagcctgatcgcgacctgcgcccccagccccctccacacctttctgaacgcggcgtcggcagagccactgcgctcttcctgctcgcagtccgccgggagcggggcggggccgggcggcggaggcggggccaggacgccggggcggggccgagtggaaggcggggccaaggtgccggggcggggtcgggaggaggaggcggatccagagagccggggtggggccagggctcggggcgggccccggcggaggaggaaaggaagagtgagtccttgcccttcccccacccgccccgcccgcgccccgcccgcgccccccctgcttcctgggagtccattgctctggcccggcgggcggggacacgactgggagacagagagacccagggtgccacttttgggaggggatcttattaaaggactccggaagcccctcgttaaagcagaaaactaaacttaacaagttcgctgtcctcactgctcagttctctcttcccagtggttctccttctggaaaaagtcactattgagctagtctagcctgatggaatagcctctctgatcagtttcgatctttgaaatgctattatcagcctttaagttattcttgacttttcctaccgtaagttgaggaagaccacattctctcaactacccataattaatttttcttaattgtggtaaaatacacataacgtaaaacttaccatcttaactgtttccaagtgtagttctgtggcaccaagtacattcacattcttgtgcaaccaccaaccgtctccaggactttttcatcttctcaaatggaaactccatacccagtaaacactagctccccattctttcctcctcctagcctttggcattcactattcgtctctaaattagactactctaaggacatcgtataagtggaatcatacattatatgtctttttgtgacagtcttactttagttagcacagtgtcctcacttccatccatgttgtggcatgtgtcagaatttctttctttctttctttctttctttctttctttctttctttctttctttcctttctctctctctttctttctttctttctttccttccttctttccttccttcttccctccccttcccttcccttcttttttttgacggagtctcactctgtcgccaggctggagtgcagtggtgcaatctcggctcactgcaacctccacctcccaggttcaagcgattcccctgcctcagcctcctgagtagctgagactacaggggcacgccaccacgcctggctaatttttttgtgtgtgtgttttagtagagacggggttcatcatgttggccaggatggaatcgatctcctgacctcgtgatccgcctgcctgggcctcccaaagtgttgggattacaggcgtgagccacggcgcccagccccttctttcttatggctgaataatattccattgtatgcatattccacatttaagttatccattcatctatcaatggatactccacaattaatttttgacattgttgaaatttcttccctgaaggccgcctctgaactctgtgctctatttcttttgggaatcattcgttcattgaacaaatatggcaggcctgctgtacaacagtccctggtctggggtctgtgaacactggtctgtccccaggaaccaggagaataaggcccctccatccatacagcaagcatgttagaggggacaaacagaaggaaatgagttaacaggtaacagtgtgtctgtcagaaagagtgttaggaagaaaactaaatcagggccagagaatggggagggagtgatgaggtatgagggacggattctctgtggagctggccctgaagaagagacccaaatgaagggggaggcaggcaccaggggaccctgaccattcctctgtctcggaagaggctgcatgtatgggggagttgcaggcaggtttgtggaggatgctggaagtggccacgccaagcatcccaggtgcccccagggcaggcatctctctcacctcctaactgcttcaataattcctgccctgctcccctgggaaaggccacctggtgtccactcctttctagggaatgttttcattttct

SEQ ID NO: 587172 - DNA, 4001 bp, Homo sapiens
cctcttctcatctcctggctttgagtctgggttgggaacaagcctggagcctggaatctggatcccagatcatgcaaggcccatgcccaccaagggtcttagtgcctggcgctttccttgtaaactaactccagctggaagctaggaccccttgagagatggacaaggtcagtctagagggccacaaggctttctcgggggtcagatcacatcttcctctagacagagttacagaactcactaccccagacctctcttccccaaatgtcccagagtagctgcacccccaagtctcctggttgacctcctgagccttgttccatgccacctctctgcctgcctagtcagctaggagcaggaccagcaagtgggccctgtggcaggcaacgcttctcaataggtcacacatcaggactcactgtctccaagattgcagggtcaggatccaacccaggtgacaatggagtcaaagggtattgaagaaatgatggctgtggaatgttgcaggagcggggtccttggtagcaaaaagtggggtactcacatatacaggtagctgaaagtcctgccccctctacctgtaaggccacagtactaaaatgtctaagcgtggggctaagtcaggatgcagagttcatcaaaaagtccaggaataagcaatggcccaggcatgagacatttcagtgaacagctgaagggacaaccttaacctggcatcagtttacaatgtgtaagatggatatctggtagcatcctaggactgaggacacatgaccaccttcatgtcatcagcccttgggagctcaatcccaataatcaggatgctccccaaacatcttaggcctgtccttcagaaatctacaaccggcaactgtcacctgcttgttctcttcatttacacttccagcttgtaactatcccctgggcatgacaagggctagaggtcagtacctctggaagttaagattccttcacttctcctgtttccacactaagcatcaagggatgccctctggttctagcttgccagaacttggtggtgagtctgtgtccatcctatccgtaatcaccacggtctcagaccaagtcacatgttccgtgtgtgtccctgtgaaatctgcgatgacacaaattaaagacaccaccatggatgttctgtaatactggaaagagggtaccctagggagaaggagaggcagaacactgcagggcagagggtccagggaatgggaggagagacacggtaggtggaggggtaaacaaggcaccgggtgggggtgccgcggtgaaggacacctggcactagggaagacaaggcacctcaggggagcagggcatcctcacgcctgagcttcagtatgtccagtttggaaaggggtgtccccatcaaaactggcagctgggggctggccgctcagcgtcgttcagcccaggagcggaacagctcctccgcgagcaggtgacggcctcagacggcccccacatcgccgtgctggtgggcacgtaagtaggagcggaggggcgtaccatgtaggtgagactgcctggccccaaagctaggaacgatcaggttggagcgaaggcccggccagccttcatcgctcaggagaaccccgagcgccgcttacacccctcggccagcctccaacaaagactcaggggagggctggatgaccctgacgcccacggggccgagcctgcccaagaccacgacgcacgcgtggcaggtgccggcaggtgggcggcagagcctctagccccagcccagctgtgaaccctaccgtggcgccgcagcggaaccggggcgccccgggcgaccagctacacctgcctgcccgcccgcacctgccggcccgcacctgccgcacctgcctgcccccgccggcccacacctgcctgctggcggcgttgccaggggccacccccaggaccccgctcacctccgcccggcctggcccggcccctcgccgtggcggcccccggcccgcgccgctccatgcgctcagcccgccctccgcgccgcccgccgccccggggccgccgccacccgcgccatcgcgccgccgcccgctccgagggcacaatggagccgccgccgcgccgctcatgcatatgcatgacgccgcgcagccggccccgcctcccaggccagagcagcagagccccgagccggcgctcggggcgggggcggccgcgagcccgagcggcccaaagcggcagggtggggccagggccgcaggtggctgggcgggcaggagacgcagcctgatcgcgacctgcgcccccagccccctccacacctttctgaacgcggcgtcggcagagccactgcgctcttcctgctcgcagtccgccgggagcggggcggggccgggcggcggaggcggggccaggacgccggggcggggccgagtggaaggcggggccaaggtgccggggcggggtcgggaggaggaggcggatccagagagccggggtggggccagggctcggggcgggccccggcggaggaggaaaggaagagtgagtccttgcccttcccccacccgccccgcccgcgccccgcccgcgccccccctgcttcctgggagtccattgctctggcccggcgggcggggacacgactgggagacagagagacccagggtgccacttttgggaggggatcttattaaaggactccggaagcccctcgttaaagcagaaaactaaacttaacaagttcgctgtcctcactgctcagttctctcttcccagtggttctccttctggaaaaagtcactattgagctagtctagcctgatggaatagcctctctgatcagtttcgatctttgaaatgctattatcagcctttaagttattcttgacttttcctaccgtaagttgaggaagaccacattctctcaactacccataattaatttttcttaattgtggtaaaatacacataacgtaaaacttaccatcttaactgtttccaagtgtagttctgtggcaccaagtacattcacattcttgtgcaaccaccaaccgtctccaggactttttcatcttctcaaatggaaactccatacccagtaaacactagctccccattctttcctcctcctagcctttggcattcactattcgtctctaaattagactactctaaggacatcgtataagtggaatcatacattatatgtctttttgtgacagtcttactttagttagcacagtgtcctcacttccatccatgttgtggcatgtgtcagaatttctttctttctttctttctttctttctttctttctttctttctttctttcctttctctctctctttctttctttctttctttccttccttctttccttccttcttccctccccttcccttcccttcttttttttgacggagtctcactctgtcgccaggctggagtgcagtggtgcaatctcggctcactgcaacctccacctcccaggttcaagcgattcccctgcctcagcctcctgagtagctgagactacaggggcacgccaccacgcctggctaatttttttgtgtgtgtgttttagtagagacggggttcatcatgttggccaggatggaatcgatctcctgacctcgtgatccgcctgcctgggcctcccaaagtgttgggattacaggcgtgagccacggcgcccagccccttctttcttatggctgaataatattccattgtatgcatattccacatttaagttatccattcatctatcaatggatactccacaattaatttttgacattgttgaaatttcttccctgaaggccgcctctgaactctgtgctctatttcttttgggaatcattcgttcattgaacaaatatggcaggcctgctgtacaacagtccctggtctggggtctgtgaacactggtctgtccccaggaaccaggagaataaggcccctccatccatacagcaagcatgttagaggggacaaacagaaggaaatgagttaacagg

SEQ ID NO: 587173 - DNA, 4001 bp, Homo sapiens
ctctttaccacagctctaaagagtgcctgggtgagggagttggtacccaaggccccaaactaggtgacctggacactcacctcagagtaggttctcttgaccccctgtcggggcagtggctgggcctggggaggcccaggatacccatgttggggcagacgctgccctgcatacaagggtgtcattcctgctgcccgggtggggttcatagccaagggggagaggccagaggggcccattacccctcctatgccagtagggttcatgccagcggggacactaggcccccggggacctccatgctgcagaaactggctgttaaaagactgtccggcccccatctaggaagagaaaaaagaagaatggtccaggtcccacccacaaagggctccaaaagataggcataaaacccgcccacccacccatgtgggcaccataccctttcacaggacaccccagaaacctctcccctcagaccctcactccttcccacacatctctcttttactggcttcatgagccctggcatattccatgcttgtccctggagcccactgtctggctgagtacctcctcccaggccctcaggctggctgccatgtgggaggagctgctgagggggctcaccgctccatactggctcagctcctggctctgcttctcctggagagcagccacggtggctgtggctgtggcggtggcagtggctgccgcagcagccacagctgcagcagctgccgcttgcgtgaagtcagtggagggtcttgcagcatgtgaggggaggcccaggccccccgggccgcctgcatacctgcaggagacacaggattgccacgctctctgcgtgggctcatgagggccaggactgtgctcaccccagaggcatgcagcacccagggggagcccattctttctagaccctccactacagctgtcaggaagcagagagggaacgtccagctgatcagcgccacagttctgaggtgcctgccagattgatggctcctagcatacctgccaggtgagggaacttgcttacccggtggtgaagccgggggccccagggtagcccccgcggctgtacacgccttgctgcacgtagcccttgttggcgccgccttcagcaaacgcctgctgtcccaggcactgtggggaggtcaaggcggagctgccccctgccacaccaggcatcatggagctgccagagggactccctgcagggcccatggggttccccaaaacctatgaggaagcaggaatcaccaaagggaaccagccaaacaacgtgcttcatgcagcagctccaaagtgctagaaaccaacaggcctggcaagtgggttgggggagaggtgggggggacagggtatagcacgggaagcagggaaagcagctgtccacagggaggttggggcattttgtgaaggctaggtgaagacaggagaagaaaatcccacagcaggtgtggaaagagaaccagtgtccaaagacttaggggactcaggaggccccatcctcatatgtcatgcctcagcctctctgtcctcacctctcagcctcttcgtctctcagagctctgaggaggcactaagcactgccaagtgctgggaggctctgtctgctcgggggtggggcaccagtgggtgcttacctggctctgtgtcgcgttgccaactccccacacagtagtgaccacagacagcgatccagccggctgagtggcgctttgttgccaaggcacagactcatatgcgaatgaaccatcactgcagggaaagaggctgctgaggcctgggtcaggaagccactggtgtccaagagtctaggatcttccagaaatgccacccccaaccccagggcctgaggggtgggcagaggagcccacactcacccgtgtggcgcagggggcagggcaggtttcatggggttcatggagttcattggcaatggagcagcctacaggccgggtctgacagtttttatctggaactcagctgctctggctgcccgacaggaaggaagggatgttagctgcgatgcagccaggagaccctttcagcagggtggagggaccccggtgccagcaggccccacctctttctcaataagggacccctgggctctgatggcaggcaaggcagtggaggggcctagtactgacccaccccactcactctggtgaggatctgcccccacaaatacagcctggaggccagcatgaaccctttctgaccaggccctgccacccagagtccctggatcagccctagagatggacttcccgattccaaatactttccccactctcccgcccacaccgaggcctggctatccttataaagccagggacaatcctagctaccccgtggaaactggggtttagagaggagccagtagccagtaaccccacagaaggccctggggtgaaggacagagggcagtggaggtgaggggactccctgctaaaggtcttgtctaccctgagtagcccaggtaggggcataggcggttctggaggccaggggctgagaaagccgaggaggagagtgcaggggtgcggtgatcacaggagtgcagtggtcaaccaacaactctccatcctggccttggggagggacatgcaggatacctcctgaaatggggtgtggggccagtaacctgggctctggctagcagcccctcccaacaagaaggccctctttagggtagtagaagggctccaggccagggcacctcagaactgacccagattccaccaagtgggggctgcccgaggctgatatggtcctaggggccaggcaggcagacccactggcccatccatgacacccccaggagagggcagggacacacagcacaatagatggagggtgggcacccacagacctggcagggactgtgacttggccagtgtttctaagaaaggggctggggagacattgaagtgactctgcaagatggggctgagtggataccagtgacctggtgctcaggacagggcagcagagggggtgtgtcagggaggacgcatgcaggaccacagtgctggcaccatgggacttacatgtgccacgctaagtttgctctccccatttagtaaataagccacggaagtgaccacaccttcaggctgcttctgagtgccacgccttccgacactgccacaagcaagccccttaccaaagcaggcccagacatgccctggagccctgcccctgagtgtccctgaagggccctcactggcactaccctgggttctgacactcccaggaccacctgacatgtccacctctgcctgcctaggctatccacagaggaacactggctgcagcacaggagaggccgcttcagctgtttctcaggagtccccaggcatgctcgccttggatactactcccttttagggcctacaaggctgccacacacacagacatgccacctgaggcgtgctgaccactggtgccatcctgccatcgcagcactcacatggcctctccctgccccaggagagggtggccccgcattcatctaggctgccatttcttgtgctgaccgagggcctcaccaatggaggtaggaacagcctcacccctcaaaatatagacctggagattctgagggcgagctgtgtgcccagggccccagagcaggtgagaagtagagctgagctctgcctggggagtctaagcatgtggcctttcactggatcttcccatcaccgagcactgggactggggggtaccaattagggaagagggagagggcagtgttctggacttcctcacaccctcaggggaggcaagacttgattcccagcccataggctcctccccttgctcccccagaccaagtcctgcccaggaagcaggggtgaagaaaaccaggggctgatggctccagaaggctccaggcacctggactctaggcaagaacaggcctgggagctgagatggcccagccaggcaaggtaggggtggcaatcccagtcccatagcctgactca

SEQ ID NO: 587174 - DNA, 4001 bp, Homo sapiens
ctcatttaagtgcccaatgaccaccctctctgtagacactgccctatgcctcagtgactactccaagtgcatttcattttgcaagttcttgtaccatctcactggggtcaagtttgatttttttttttttttgtcttctggaatactattttttctttcacaaatcttagagaatccagggggcagaaattatttctgagttttcctctcaataccagcatctgattggctgaccagcaatgtacctctgagaaatggaagtcgggttgagtgaacacaatcttaatgcctcaaagggttagctttccaaaggaagggtataccaggagattcctctcagccccagggcatccacctgctcccttgagaggctacactccaacctcagattgtcctctgtctcccattcccagatacccagagttccattccaggccaggagctgaaatttactagagattctagcatacacagccacagttgatatcttgatttatccccagacagtactgaaacccaggaccaggagaaaaccgaaaggtggctgaggacacatcaccctgtaaagtttccaaagggaaaccttgacccaaaaacattctgataagatctctgcgcctagggaagataaaaggaaaataggcacagacttttttttacaatacagtgtcaggggattattttttgttttcttctcattggaaatattttcaaacagcaaacaatttgtttaaagtgccacccaataatttgtcaacaatgattaattaaaatacagtatctaaaatgtacactaaaggacaaatagttgataatgtgaattagggaggggaagctgggatttgggaatgtcaaaggaaactggaaatttagcattttactgaaagtcagttaggctaaaagaatggggaatagggagtagtcttgagaccctgcttgagacacgtgaaagttgcaggggaaaatctgtcccctgtggagtgtgaaaataactaaatggcaggcaattagactgaggtggctctagtcccagggtttttactttttaaaaaatctaactcaaatgctttttttttgtaaattactacattggggaaaacaaaatttagacttaatcaaccatgaactgccaattaagctctgattacgtgaccagaaaatttccaccttcatctaaaactaagaaactacgtaactctacctaaccaattattgagtttgctttcctttatcatgcaccttctaaaagtcttttcttcaagcccctcccatggaaaataaactacaaaccacagctgggtgctctataattcttcaattactctttgattaaattctttaacatttttgtggtgacttccatagatttttaagagaaaaaagatggactaggaaccccacagactaaagcttttcccattcatgaaccccgcatcccgagtcaggattctcccctgatgaccctcccggcatccctgcacaatcggggagagatgccgcgctgcgggtgcaaagccgcccggagagggctccaggccagggcacagtcactgagcagggaggagacaggacgcccagggtcccggctgtcagcccagccgccatcttacggctgaaggggactgaggaccgagctgcgccaaggagaactcggggccgcgggggactgagggccgagctgcgccaaggagaacttggggccgcggactttggaggcccgagtccagccacagccacttccgatcggttccaaccagcccctccccctctctcgggatgtcggacccagcactctcaccatttctaggtttccagggagtcccggcgtcttagctgtggatctcccaatatctgcaggtcacagggacacagaggctgggcctctaggagcagaggacactgagcagtgaggaggagagcaggagctccggctgcagccagagacaaaggccccgccaaatcccggaagccgtcctgtccgctccagctgcgtgcctgattggacggttcccagcccagcagtcctgattggataacgtttgctgccctgctccctcaggccctgagtgacagaagctgtgctcagatgctgggctggaagaagataaagtgaaacctaagctgcagccttttcaggcagggctcctccctgagttgagccaggtccaccccagaaggcatttgcatttaacctgtatataaagtcatatgcatttataaataatatattatgtggctattcacacatgaaaataatataacaattattttaaaattccagattttatgccctttctgaattctggtcctttgagcaggccgattgagagtttaaaaaggaggcaatcctctgaaataaaacgtgagccacatgtgtattctaaattttctagcagtcaaacttcaagaaggaagaagaaggccaggcgcggtggctcacgcctgtaatcccagcactttgggaggccgtggtgggcggatcacgaggtcaggagatcgagaccatcctggctaacacggtgaaaccccgtctctactaaaaatacaaaaaattagcccggcgcggtggcgggggcctgtagtcccagctactcgggaggctgaggcaggagaatggtgtgaacccaggaggcagagcttgcagtgaaccgagatagtgccactgcactccagcctggacgacggagtgagactccgtctcaaaaaaaaaaaaaaaaaaaaaggaaggaagaagaaacaggtggaattcattctaaccatttaattaacccactatatcaaaaatattatattaatatctgagcaatatgtaattattaataaagtgtgtatatttttggaactaaatctttaactctgtattttacctttctagcacatcgcagttctgaccagccacattccggacacccagtagccatacatggccaatagctgtcacattaaagtgcagctttgacaacaggggtttgaagggcctgaacattccttttctgccagaggtgagggaagagcctctccctaccaacatctctcttcagttctgaggtggaacagaccgtggccataaaaagagcagaggacagcaggaataaaataacctaaggttgttaagaattaatgtaattaatatgtatataattaaaactactagatgtatgaaaaacaattctgcatagagaatgtataaacaaaagtaaaatatgcttttaaggaagaaagttagaaacattttatctagtttgaaattacttaatgattgtttcaaattgaaaaaagaaaaaaccaaaaatataatataaaaagttgaaaaatttattataatagactataaaatatttatgaaaatctacagtagccaaaaatgacacatttgatggatttatttataaggttttattaaagttagctttagtattaataatacagtaatacaaaagtaaaagttgattttcttttgaacaaaaattttacatatcaatatgacatagtacaatatttttgtccaccttttgaataaattttaaaataaagaaagtaaaaaagagaatttttctcatgcagtctttctcaggttttttgactggaaaactgaatctcctgtatcaaacagtaaatgattttgtttttaaaatcttttaattatcactttggataaataaatgactattattttatggtgatctgtggtcctattttagtgaagtgttttaaccctatgacatatttgacaggcttcccaacatcaaattttgctttaaaagtgtcttttttttacaccccaaacttttggatgctatagagtgtcaatgcagcatgcaaaagagtgataaacaggcagggggaggcgggcagatcaccaggtcaagagatggagaccatcctggccaacatgatgaaaccctgtctctactaaaaatacaaaaattaactgggcatggtggtgagcgcctgtaatctgagctactcaggaggctgaggctggagaatggagaatggct

SEQ ID NO: 587175 - DNA, 4001 bp, Homo sapiens
ctaatgtaattcctatcaaactaccaaaaacattcttaacagaactaaaaacaactattttaaaattcatatagaactaacaaagagcccgaatacccaaggcaatgtatacacacacacacacacatatatacacatatacacacacacacacatatatataaacgactcatagaacaagaaacagaatagatagccaataaataatgccacaatgccacacacctgcaaccatctgatcttcaacaaagcttacaagagcaatgcaggaagaattccctatttaataaatgaggttggaataactagctagcactatgcagaagattgaaactggatgcctttcttacatgatatataaaaatcaattcaagatgaattaaagacttaaatgtagaacttaaaattatatatatatatatatatatatatatatatatatatatatatatatatatatataaaacctgaaaataatctagaaaataacctagaaaattctaagacataaaaactggcaaagattttatgatgaagataccaaaagcaattgcaacagaagcaaaaattgacaaatgggacctaattaaactaaagagctattttgcagcaatggaaacaatcaactgaataaacagacaacctacagactagaagaaaatatttgcaaactatgcttctgacaaaggtctaaaatctagcatccataagaaacttaaacaaatttattttaaaaaaaaagaagaagaagaataagccaggatctgtggctcatgcttgtaatcccagcactttgggaagctgaggcagatggatcatgaggtcaagagatccagaccatcctggccaacatggtgaaaccccatctctaataaaaatacaaaaattagctgggttttgtgtcacgcacctgtgatcccagctactcaggagactgaagcagaagaatcatctgaacctgggaggtggaggttgcagtgagtcgagatcatgccactgcactccatcctggtgacacagcaagactccatctcagaaaacaacaacaacaacaaaaagaaaaccaaaaacctaattaaaaagtaagcaaaaacatgaacagatacttttcaaaagaagacatacatgtggctgacaagcatatgaaaacaaaattcacgttgttaattattagaaaaatgcagagaaaaaccacagtgagataccatctcatccagtcagaatgcctattgttaaaaagtcaatgacagatgcgggctaggttgcagagaaaaaggaatgcttatatgttgtgggaatcaggaggccggagagatcactgggtgcaacaggaaggttttatttaggtggccactggcccagcggattaacatccaaaggctgagccctgaacaaagacagggcttgacttttatacatgcatcaggcaggggcaagtcgggtttttggcgcaaaacctgcgaggtgagaaagcagtcttacagaagcagaacaaaggcagttaatcataccgtgacaggttttacaacaggatttgcaacatgagcctaccttacttaaacatgtcttgtgaccttgccatgctacagaaagaaaaacaagaacttacaaaatctttacagacttgcagaaatagttacaaaaatagttgtgagagcagaacaaagaataatgttatggggagagaatttcaaacagggaaactgataaggagaacttgtttttctcatccctgctcctggagcccactccttcggagcccctgcctggccttgcagataattatcatagctccagcaggactttggagtgagtcagactggtcaggaaaggacttgttttccctttacttgtttttccttttatatttcctgcttcattcccccctttgatgctttttataagtaaagtttaagagaaagcatcactatcttcatttacttcaagaggaagtagctcttttcttggcaggggttaatacttagttagggccattagtcgtgtggtagtccgtctgtccacaagagcctctatggctgtttggatatttttgacaatgaggggtaagagacaagggagtataaggcaaactcccaatatggctaggactatttgtactaaggttttaaatcctccaagggatgagaaccaacctctgaaaagggaatctggagactatcctttccaagtctgaactgggatgtgagctaacttttggattttagcagttatttctttgatgacctttccttcgtcatcaagttccaggcagcagttagtaaggttgaactttccgcatactccctcttcctgggctaggaggtagtctaaggccagtctattttgataaatgacatttctcatttttgtggcttgctgggcaagcagattcaaggcccctgcagtttcattggtaatgatttctagtactgcctgcaatcttataatgcggttaagcatgtaaactggggtgcggtatccccacattccatcttctgcccaggtggctgggccataatattgaattattctttcaggaggccattcattgtccttccaatctcctatagttatgcctcttttgcttttccttttagtttcatcatagatggggtatcctaaggcttctccctgttttaggggcattaggaagaaggacggcctaattgtccccagtacacaggcccctgaccatttagctggcagttgtcgatatgcttgtggcccacagatccagtagaggccagagggtgcctgccaggtatttggagcttcaagttggtaccaagaatggtttaaagatgggaaacgagagaatgggcttgggtgtggtgattcagaattattgcttttgcccctccataaagtctttcctagtgtctcgttgtaatattgttgtcctaggcaagttaactctcctactgggtctgtaaaggcctttccccagcgagcaatacagaattttccaataatggaggtttttaagaaccagatgctctgacttgatggtgcaggttcgagggaagaggcggttagtgtgaaattatcttggggcattagttcccttgcttcccatggccattggtctcccatgttcattcccccacagacataacatgaagcaacgtgcaggctgctggctatgttttcagccagttgggcgaataaattactggccaagggagggggctcaggcaatttctggttaacatgctcatagaatgactcaaaaactcggaactgttgggttgagcgggtccgagttttctttatgatatatagatagacataggctcctgggccaatttcttcaccgctgactcgtgcccctagcggtgcttttaaacctgttgtccatatgggctgatctggctctaagatggtaagatttacagaattgcaagtgcttgttttacaatctggttctaatggtattttggtaagcataattggccctagtgattgttggttagtggaccacgttgtgcagtcccagcaagttgttactggggaatcggtggaacaagcagggtgtgcatacctatttttatggcagctactatagtactccatggaactgaagattacgggaaagagtgagcccatggatactatctggcaaacatcaaagtataaggatacgacatccttgccagagggaaataccttggtttggtttagaagatccccttcctttgacccgacatgaatttcaaaccaggtcccaggtgaagacttagggtcataacacacataaggctggccccttcctgggtcacagactgagtaggttgtctggttgtgagtacaagttcctaggcaggtcccagcacactcataataagtgtgatacaacagggttttagtcatgatgttccccgaccacgtagtgtgggtgcagtggaggcatccctcccagggttctccttttaacatggataaggggagtagcaagaacaaagtgatgagtagcatgttcatacccagcatggacagaaaag

SEQ ID NO: 587176 - DNA, 4001 bp, Homo sapiens
agaacataagacgcttgtactctgacttcaagaactctttaaggatcacgctatctgcgcatatgaatatgataaaaaggcttggtgctgatggctactgttctgtctgaccaaatcttgtatctatttctactttcccattttaaactttgaacccttaatctcctcctaaggtgtattgtaaatcagagtagagaataaatacatgaacagaaacactcaccagggatttattcattttctgctgctcttggaaaaatctggaggactgtgaaagcggaggcagatctggggaaggaaaacccaagccatggcgttatgagcggtctggcctgccaaggcggtcatctcccgcccaaaacctacacagaaagttccaagaagtacatcttgtgggagactgtccctttaagccttcagaagggattggaaaatgatcaggagggggaccgatctgcacatttgaaactcacacatggctaccttgtgactgagtggatgagattctcatggtgaatgaatactggatcctactgaaataatctgccatcattaaatgcaagatttaaaaaggaattctggtgaccagcctggccaacatggtgaaaccccatgtctagtaaaaatacaaaaattagctgggcgtggtggcgggcgcctgtaaccccagctactcgggaggctgaggcaggagaatcgcttgaacccgggaggcggaggttgcagtgagctgggatggcaccattgcactccagcctgggcaacaaagcgaaacttgtctcaaaaacaaacaaacaaacaaacaaaaaacaaacaacaaaaaatgaattctgtaatactcatctattttcttactcttttaaataaagatcagaaaatccacaggatgccctaaataaaggaatacagtcggcataattgagtctttatttgcagaaacttcagtgtgctactcaaaaggatcttttattgaagaacttacgctcacttaactaggatacgggggacagaacactggcctgggagataaaactccagagttctactatgagcaactccacccacaaaacctcggacaagtcacccacctgctaaggcccttcccctagcaaatgaggcagcaagagatagttcctgcaggctgttcctgcactacaacgtatgattccacaagagcagacctaagggggaatcagcacttaaatgagagaacagaggtgctgacggacgtttagatacggtagcaatctggagcagagagaggaggaagggctgctggggtgaggggggagtggagacaacgtccgcagctgaggctggtgacaccccccacgcccccgtaagcctcgtcctcgccggaccctgccttcaaacccaaacacacgtcactcctgcaagcgatcgagaccttccactgtccctcactctaaggtgccctacacgcggtgacttcacccaggcccttctcgccccgggcccgcaaacccacgacttaccctcctggggctccgcagcctctgccccaccgctcccgacaggccggggcgggattgctgtcgcgggcgcgcgtctgctcgcgaggtcccttcctgtccacctcaccaaggccgttctgctccagaggggcccgggccgggcctacgggacaaatccaggcggggcgtccctcccggagcccagatccgtctccctggggctcaccgtcctgcggagccggggccgggccgtcgaggacgcacacgggccgggcccgggtcccgccgccccttcgcctccgccgtcgtcaccgcccggccggccccttgggccccagcgccgtcggctccgggggtcgtgctcggggatccccgcttgagcctccgcctggcccgcacagccccgcgcccgcttgggtgccggcccggctcttcggcgcccagccccgcaggctccgcgattctcgcccaccggaggccaaagcctgggaactagggcgagcggtgacctggggacgcacaggaagcgagggcactgcggccgcggcgcgcatgcgcgaacacgcacacagagaggggtgcacatgcgcaggaatgcaccggaagtccgcctcccgggacccgccgccggtcccaggacaaataccgtgactctatttcccatgagcctacgcgctccccaaatttaggagccatttgaaatgtctctatctggtctagcggttaagaggctctatgctaagagaattggcaacgccgaaccccagactcaaatttctccttagtttaagggaacgtcttcatggggatgtcttgactatctttaagggaacgtctagaaagtctctgcttcctgtagcatctcgtagaccatgcctgggccagtcctgccttaccggagagctcaaggcttaaaatcaatgtccatgtgcaaccgtgacaaatggaacaagagggtgcatcatgctagcttatgatcacaatgacacatttaacgaaaacttcagtaaatagagcccatggatgaaataatagaggattagcctgggacaggataccatcctcgccccaacaaggagaaaaagaattccagcttttccaaatcactttgaattagtgatagctagaaaactcagagaatatgtacagaattgaaagaagaaaaaaattagccagaactctacttcctgaagaggatgaggcaagcagaagaagaaatttgcgtcttaatggaaaacgaagcacatttagaaagccatgttacttgattccaaccctgttccttatctttgaggtattttacacctctttgaaaactgtaggtaatcgatgcaagttatgttctgtctggtggaagttggttgacttcccacaatccccactagagaaaatgcagttttgactgcatttctccatttacataatcatttcaatattcctgatctgaaaatatgtctgtttctcagattctctctctctctctctttttttttttaattttgagacagggtctcactctgctgtgcatgctggagttcagtggcgagatcttggctcactggttcaaggaattctcctgcctcagcctcccaagtaactgggattacaggtgcacaccaccaagcccgactaatttttgaatttttagtagagatgggggtttcaccatgttggccaggctggtcttaaactcctgacctcaagtgatccacccgcctcagcctcccaaagtgctgggattacaggcatgagccaccatgtccagccctcagattctcttttgaaccagttataatatctgcctgtttcctcttgaattaaataaaatctttagcatgtgctcatttttatatctgtatcagagtcatgattttacttttatgttttaaggttttccaggtctttgcagaagtccctgatggaatcacatgactgagccaggaaaacctcaggactggagtgcctcatgaactgttgaagcccaggtgaatcttttcttggctcccaggaatgagtccaaagtgccagtagaaatttgctggcttctcatttttcagtaatttccccatttaccaatcctgtgttttactttggtttgcatttgtttacattgctagcatcactgattgggactttgtttgtttttgttgtttcaaggcaaagtctcactctgccgcccaggctggagtgcaggggtacgatctcggctcactgcaacttctgcctcccaagttcaagtgattctcctgcctcaacctcctgagtagctgggactataggtgcatgccaccatgcccgactaatttttgtatttttagtagagacggggtttttccatgttggccagactggtctcgaactcctgacctcaggtggtagactcgcctcagcttcccaaagtggtgggattacaggcgtgaagcaccgcgctgggctaggaatttggttttatggtctgatcacatggtgatctctgtaatgagattaatgtttgcaaagacctaatctctgttgggtgagagacat

SEQ ID NO: 587177 - DNA, 4001 bp, Homo sapiens
actcacatgtcaagtcaagccacccaatcacttgagagattctcccaccccatcctgctcacttaagtgctaaacgaccaccctctctgaagaccaccctctctgaagacgctgcactatgcctcagtgactgccccaagtacatttcactttgcaagttcttgaaccatctcactggggtaaggtttgatttgtctttttggatactatcatttctttcacaaatcttagagaatccagtgggccgaaattatttctgtgttctcccctcaataccagcatatgattgattgaccagcaatatgtctccggaaatggacactgggttggtttgaagacaatcttaacttctcaaagggtttgcttttcaaaggaagagtacaccaggagattcctctcagccccagggcattcacctgctcccttgagaggctacactccaacctcaggttgtcctctgtctcccattcccagataaccagagttcattccaggccaggagctgaaatttaccagagattctagcatacacagccacagtggatattttgatttatcctcagaaagtactgaaacccaggaccaaggaaaaaactgaagagtgactaaggacacattaccttataaagtttccaaagggaaaccttgacccaaaaatattctgataagatctctgtacctagggaagatttaaaaaaaaaaaaaaaggcacagagattttttacaatacagcatcaggggatgagtctttggtttcttctcatgggaaatatttacaaacagataacaaatcttttttaaaatgccatccatgctttgtcaaaaaatgattaattaaaatacagtatttcaaatgtacactaaaggacaaatagttgataatgtgaattaggaaggggaagttggcatttgggaatgtcagaaggaactggaaatttagtattttactgcaagccagagttaggctgaaggaatgggaaatggggagggggaggagtcttgagaccctgcttgggacacatgtgaaaaatgaaggggaagatctgtcccctgtggagtgtgaaaataattaagtggcaggcaattagactgaggtcgctccagtcccagggtttctggttttaaaaaaatctaactcaaatgcatttttttgtaaattactaccttgtgaaaaataaaattcatgtttaaccaactgtaaactgccaattaacctctgattacatgaccaggaaatttcctccttcattgtacaaattaagaaactacataactctactaaccaattactgaatttggttttatcatacaccttatacaagtgtttccttcaaacccctcccacggaccactactgcaaaccacagctgggtgctccacaattcttgaatcactgtttgattaaattaatttttttgcggtgactttcataaattttaataggggaaaagagggacagggaagcccgcggaggaaacctcttcccattcatgaacccagcaccccgagtcaggattctcccctgacgaccctcccgtcgtctctgcacaatcgctgcgggtgcagagctgctcagagagggctccaggccagggcacagtcactgcgcagggaggagacaggacgcctggttccggctgtcagcccagctgccatgctatggcttaaggggactgagggccgagctgtgccaagaactcggggccgcggattttgcagccgactgcgggaagacccgagtactgccacagccacttccgaccggttccaaccagctccctccccctctctcgggatgtcggacccagcactctcaccatttctaggcttccgggggatcctggcgtcttagctgtgaatctcccaataaccagatcacagcgccacagaggctgggcctctaggagtaagaggacgcagaaaagtgaaggccagacctgcagcacccgctgcagcgagacaaagaccccgccgcctcccggaagacgtcatgtccgctccagctgggtgcctgattggaccgttcccagcccggcgtccctgattggataacgtttaacaacccgccccctcaggccctgagtgacagatgtgctcaggtgctgggctgaaggaagacagagttaaacctaagcagcagccttttccagaagggcttcctccctgagctgagtcaggcccaccccagagggcatttgcatttaaccttgtgtataaggtcgtatgcatttataaataacatatagctattcacatctgaatataacaattatttttaaattccagattttataaccgtactggcttctggtcctttgagcaggcagcctgagatttttttcttttttttttttgagacagagtctcactctcacccaggctcaagcacagtggcacgatttcggctcaccccaaactccgcatctcgggctcaagtgattctcctgccttagcctcctgagtaattgggattacaggcacccgcctccacgcccggctactttttgtatatttaatagagacagaattttgccatgttggtcaggctgatctcgaactcctgacctcaggtgatccacctgcctcggcctcccaaagtgctgggattacagagcacatgtgaattccaaattttctagtagtcaaactttaagaataaacaggtggaattcactctaattgagatggttagtcatttaggctgggctcagtgagaccattcttgtgacctcagctgagttccttcagacatgtatcatcagctgcttgttgactaggcagctgtgcttctgggggtgagcttctgcttctgaggctgtcaacagaggcaacttgcttctcctccccatactattttatcttccatctggctaacatgggcttttttcgcggagatagtagccttctgaaagaaaaacagaagcatgcaaaaccatttgagcctacgcctcaaactagcacactgcactgttcacaggtttttactgccctgagcaaataaggccagccagatctagggtttggaaaacagaactggatctcaatggaaacagctgtaaatgcacctggcaatgggcatggatagcggagggatgaaaaattgctaacatttttgcaatcagtatcattctgcctttttttgcatatgtggtttatataactcttccacatcaaaaaaaaaaaaatttgtgcaaagacccacagctattaagtggctgggctgggactcagaattaactccatttgacccttgaaatcctggagagtgacacttctaaaatagaagccagatttcttttagatttgtgcccatatagcactgtttattattattgctagaaataatcttaagaaattgaagaagcacacggtagctcacatctataatcctagcactttggcaagctgagatgggagaatcacttgcgctcaggagttcaagtgcagcctgaataacatagttaagatcctatgtgcatgaaaatttttttttttttaattagccagtcatggccgggcgcggtggctcatgcctgtaatcccagcactttgggaggccgaggagggcagatcacgaggtcaggagatcgagaccatcctggctaacacggtgaaaccccgtctctactaaaaatacagtcccagctgctcgggaggctgaggcaggagaatggcatgaacccacgagatggggcttgcagtgagccaagatcccaccactgcactccagcctgggtgacagagcgagactccgtctcaaaaaaaataaaaaataaaaataaataaaaataaaaattagccagcatgaggcaatcctgtagtcccagctactcaggtggcagaggcaagaggattacttgagcctggaaggtcgaggctgcagtgagccatgattggttacgacactgcacttcagcctgggtggtgagagtgtgatcctttctccaaaaaaaaaaaaagaaaagaaaagaaacagaaaagaaaaaagttgcaggagcatt

SEQ ID NO: 587178 - DNA, 4001 bp, Homo sapiens
taaaatacatttcaaatgcatttatgtgcagggttttccagcattttcagttgtttcatcagggcacctacttgagcttactgttaaatgacagacacctgaaatgtctgagaagagaaacaggctcaagaacaatttgaataagttctacaacgacagattcatgttatttaaggcatagtttgggattgtggtggactttttttttttttttttttttgagacagagtcttgctctgtcacccaggctggagtgcaatagcacgatctcagctcactgcaacctccacctcccaggttcaagcgattattctgcctcagcctcccgagtagctgggtctacaggcacccgccaccacgcccggctaatttttgtatttttagtagagaccgggtttcaccacattggccagactagtcttgaactcctgacctcgtgatccgccctcctcggcctcctaaagtgctgggattacaggcatgagccactgcgcctggcctgtggtggacctttaaggcttcttcctaacaaggtctactgacgacatgtaggtaattgtggagtgacctggcaggaagaactgtggcagaatcctctcgccggactctaacactaactagatcttgtggaaaagccaagtctttgactggctcagcctagcttataggagtcagatgaggttaatattgtaaacatttgtgtcttgtcttcccaattcaactgttaacttccttgaaagcaaatactgtgttctctaagtctcccaatctctccgttcttagttcttaacgcactttctacaagaatcaaatatagcgcaccctgctcatggtcaaattttccccacagaatttccttagccctccattctcacaaagatctaacatgattctcgaagtgtttctagaccaaggaacacttcattaaaagtcaattcaattccagctgccccttccgttgcaaaccctctggtgttgttaaattaaccactactttgaaacagtatgggaacagtatgagaatgtcggagctggaaggaaacttaaagccttggagatcatctagcaactactccaacactctcgatttacagttaagaaaacgaaagagacccagagaagcgaacacagttgcctaaaatcacccaaatggacagctgaaagcttcgtgactccacaaataggattttcctcacaccaaactccgtatcttgacattcccagaatggggatggtcggtgggctgggaggggggtgttggggggggggtgaaggagagagtttgggcagctctacaaacaaaatgcagcaactgcactgtagataacatccgtccccaaggagaagcagcccaggctgacttcaacctgtggctgcaacccccagacagaaatctgcagcactggaaaaaccgacaacacatcggaccgaagaggaggtggtcgcagagaggcaagtcctggggtctcccgggcagcgggagagctcactcgtagcgacggagaccgtttccaatctggaaacactccaacctgggaacgggctcttttggcacgaaagagaaaatgtgtgggcagggtcacaaatccaccaacctaaagcaagcgtcagagaagtttctgggcaagggcgcacggcgccgaggctccgaccccgctgcagaaggaagcggagggaaaaaagggcagagcactggggtcgcgaagaggagggtccgcgttcacccgcgccaacggcagccccgggaaaccaagaccccggcggcgtccaaaccgcgaagccccgcccccggcaggggactccgccatccccaacgcgccctcgagccagcgcgccggtgcctctttacccgagcaggcgccgactccgccatggctccagtcgcccctcaacacccagaccccgcctcggagcccccgtgctgcgttcctgtccgctcggcgccccagagcctgttggaagccgccgccgccgccgccgtgttgatgccaggtgcattctgggagcagcgacctccccggcacaagaccggctccagccgctcttcctcactgtgcaggcttcccattgtgcccccgtgcggcgggagggagaacgctgcttggcactcccggccagagtgcgggcaccaggagggctcagtcactcaaaagtcaagaccaggttccgcgtttcaggcaaagccacgggatcctgctgtcttccgtatgcccagcactctgctaaatgctttgagggattcaaaaatgtgtacaactcagactttttgctgaggaaagaacatgtaatgttgttggggaaaagaaatatggttccaaaaggcaagtgattttattccaaaagttcacctgttatttggctttttagaaactgggaacagtttccatatcaacagtgtggagcgtggggtcaggcccaggccagccctctgtagcctgttaattatggtaatcatgtgccttggaaagtccaagacaaccctgatttcaaatatttccagtcctcatgctacatgtaagacgatgtgtctggaatttttgttggaaagcacggccacatgaccatttaatcgccatgtacttaatccccaataccagcaacactacggcaaccatagctgcctaatttataccattgtctctctggagacaagcaatgaacttccacttcacaggataggcgtgaagtgtttcctctgagaacgaaactttttttttttgagatggagtttcgctcttgttgcccaggctggagtgcaatggcgcaatctcggctcactgcaacctccacctcccgggctcaagcgattcttctgcctcagcctccctagtagctgggattacaggcatgtgccaccacgcctggctaattttgtatttttagtagagacggggtttccccatgttggtcaggctggtctcaaactcccgacctcaggtgatccgcccacctcagcctcccaaagcgccgggattacaggtgtgagccaccccacccggcggagaacgaaacttttaagatcatgactggctccttcctcacatgcagggctcagttcagattctacatcctcagagagatatccccagtcccccctttctacagccccacaccatcctccatctcaatactcaatctcgttaccctgctggaaatttttcataccatttatcaccatctgaagtaatctctctttttcactcatttacatattaattatctgtatctcttccactgaaatgtctgtctactgtatcctccatttgttgtacacagaagtgttcatatttgtaaatgattgaatggtgaatcagagtgtaaggatatgaaatgtcatctcaaacagaggcattatttccagggcaactagatcaacgggcacgtcactgaatcattaataaatctagagaaagaatgggccaggctgaagaaaccggtcagtcagggagatcctgtccagagggtctgacctaatctctcagaccaacaaactcttggtgtcagatacagaaaaaaaaaaaaatgtgtcatgggtgaggtggctcatgcctgtaatcctagcactttgggagggcaaggcaggaggatcactggagtttgagaccaacctgagcaaataggcagaccctgtctctacaaaattaaaattaaaattaaaatgagccaggagtagtggtgcacacctgtagtctcagctactcaagaggttgaggtggaagaatcatttgaacccagtagttcaaggctgcagtgaatcacgatcgcaccactgcactccagcgtaggcaacagaccaagatcttgtctttaaaaataaaataaaaatgttatcctccacaggcacaatatcaggacataggatgctgaggtcattaaacagttcggtcgtagaactcattccctctattctatttctatactcacaaggcaaccttctgacgttgcatgttgccaggtagcttctgggaggcaacatgcaggtgaagctgatgcacatgtat

SEQ ID NO: 587179 - DNA, 4001 bp, Homo sapiens
ttggtaggctgagactggagaatcgcttgaacctgggaggcggagtttgcagtgagccacgatcgccccattgcactccagcctgggcgacagaatgagactgtctcaaaaaaaaaaaaaaaaaaaaaaaaaagtgcaccaggagatgcctctcagccccacgacatccacctgctcttttaagaagctacactccatacctgagactgtcctatgggagaaaatgacccaggagctgatattcactaaacattgtagcagacatagcgattgtgggtatcttggtttatccccagacagtactaaaactcaaaaccaggaaaacactgaggagtggctgaggaaacagcactccataaagtttccaaagggaaaccttgacccaaaaacattttggtaagatctctgtgcctagggaagattattttaaaaagaggcacagagatttttttacaatacagtgtcaggggatgattctttgctttcttctcctgggaaatattttcaaacagaaaaaaatttttctaaagtgctatccaatgctgtgtcaaaaaatgattaattaaaatacagtatctaaaatgtacactaaaataatgtgaattaggatgaggaagttggcatttcggaatgtcagaaaaaactggaaatttggtattttactgcaagccagagttaggctgaaggaattgggggtggggagtagtcttgagactctgcttgggccacatgtgaaaatttcaggggaaaatctatcccctgtagagtgtgtacacaattaagtagcaggcaattagactgaggtagctccagtcccagggtccccattttttaaaaaaatctaactcaaattggccgggcgcggtggctcacgcctgtagtcctagcactttgggaggcggaggcgggtggattgcctgagctcaggagttcgagaccaggctgggcaacacagtgaaacccagactctactaaaatacagaaaagttagctgggcgtggcggcgtgcgcctgtaatcccagttacttgggaggctgaagcaggagaattgcatgaacccgggaggcgttggttgcagtgagccgagatggctgccattgcactccagcctgagcgacagtgtgagactctgtctcagaaagaaagaaaaaaaaatctaactcaaactttttgtaaattacaacattgagggaaacaaaattcaggcttaaccaaccataaactgccaattaacctctgatgacataaccaggaaatgtccaccctgaatttacaaattaagaaactacataacggtacctaaccaattattggctttcttcatcacacaccttataaaagtctttccttcaagcccttcccatggaccacaaactacaaaccacagctgggtgctctataatttgtgaatgactgtctgattaaattctttaatattttcgcggtgacttccatacatttttaatagaaaaaaggagggtctgggaaccccatggaccaaagctcttcctagtcatgaaccctgcatcccgagtcatcgaggagagatgcggcgctgcggcagcagagctgcccagggagggctccaggccagggaacggtcactgcgcagggaggagacaggacgcccgggatcccggctgccagcccagcagccatcttatgactgaaggggactgagggccgagctgcgccaaggagaactcctggccgcggattttggagtctactgcagggaggccggagtctcgccacatccacttcccaccagttccaaccaggccctccccctctctcgggatctgggacccggcactctcaccatttctaggcttccagggagtcctggcgtcttagctgtggatctcccaatacctgcaggtaacggggccacagaaggtggacctctaggagcagaggacatagagcagtgaagacgagacctggagctgcgactgcagcgagagacaaaggccccgccaaatcccggaagccgtcctgtccgctccagctgcgtgcctgattggacgggtcccagcccagcgtccctgattggaggatgtttaaggacccgccccctcaggccctgaatgacagaaggtgtgctcagttgctgggctgaaagaagatagaatgaaacctaaactgcaggcttttcagtcagggcttcctccctgaactgagcccggcccacccacggggtatttgcatttaaccttgtgtataaggtcatatgcatttatattaataaatagtatagtgtgtgaaaggaaaataaattttgcggccccaaaatcactaagctatagggaaaagtcaagctgggaactgcttagggcaaacctgccttccattctattcaaagtcacccctctgctcactgagatgattgcatatctgattgcctccttttcccaggctaatcaggaactcaaaagaatgcaaccatttgtcttttatctacctaggacctggaagccgcctccccacttccagttttctttctttctttttctttctctctctctgtctctttcggagtctcgctctgtcttccaggctggagtgcagtggcacgatccgatctctgctactgcaacttccacctccctccggggttcaagcgattctcctgcctcagcctccagagtagctggctaatttttctatttttagtaaagacggggtttcaccactttgtccaggctggtcttgaactcctgacctcaggtgatccacccgcctcggcttcccaaagtgctgggattacaggcgtgagccaccgcgcctggcctcagaataaactttctaaattaactgagatctgtctcagatatttgaggttcacaattatatggctattaacaaatggaaaaaatataataacattatttaatatccgattttacgaccttcctagcttctggtcctttaagcaggcagcctgagattttaaaacggagttaattctctgaaataaaatgtaagccacatgtgaattttaaatattctagtagccaaacttaaaaaaaaaaggaagaaacaggtggaatttattgtaacaatttcatcgttatatattctagttctagaattcaaatattctaatattcaaaatattattttaatatgtgagcagtatgtaatttttcatgtaatatatattattgtatataataatataaaatatgtataataatatataatattatgtataatattatacatgacctcaagtgatctgcccgccttggcctcccaaagtagtgctaggattacaggcgtgagccaccgcgcccgaagcagcggtgctttttgagaaggagtttcactcgcacaatgtgggctcaccgcaacctccacctccgggttcaagcgattctcccacctcagcctcccgagtagctgagattaccggcatgtgccatcgtgcccggctaattttgtatttttagtagagacggcctttctccatgttggtcaggctggtctcgaactcccaacctcatgtgatccgcccgcctcggcctcccaaagtgctgggattacaagtgcttttaagagaaagagacacatcataggaggatcccatggcagagaaaagaaaagagggtctcacttacggaagaaataatcacctatcatctggaatagcataagacaagcaaaagagatcacgacctgactacatcaatgagaagaaaaaggcaacctggctgaaaggactcattggcatcatggagctacatttaataagctgcagtgaatggtcagcctctgggataccaatagtctaccaagaaggctgaactcattctaataaaatcagcatgtctgcaccattccggtggcatagggttacagtatccgttacagaaaccccataaagaccagtgggtacccttctagaattgaagttattgtgaaaaagcataccagcgccgggcacggtagctcatgcctgtaatcccagcactttgggaggctgaggcaggtagat

SEQ ID NO: 587180 - DNA, 4001 bp, Homo sapiens
agaatatgttggaaagaatatgtaccaaactcttatcacttaatactcggggagtggtgctgtgaggtgagggaattttcattttttttacttcatacacttctgaatggtttgaagtgcttttaaaaacttttaaacttgtaaaatttaaaaataaatatttttaaatattttacatttttgaaaggcatatcctttttttttgttttgtttttgatacagagtcttgctctgcctcccaggctggagtgcagtggtggatcatggctcaccacaacctccgcctcccgggctcaagggattctcctgcctcggcctcccgagtagctgggactacaggcatccgccaccacgcccggctaatttttgtatttttagtagagacggggtttcaccatattggccaggctggtctcgaactcctgaccttgtgatccactcgcctcggcctcccaaagtgctggtattacaggggtgagccaccgtgcccggccattttttaaaataagttagactgtgagataaattcaccagtttagatcttaaactggtagccctctggaactttgaaaatctaggaaaccgtaatagtctgttaccatcagatagcccaatatataaccaacccaaaaataaaccattagggtgttaaattcaatatttaactcaggagactaccaaagatttgtttggtagaggtactaaaataatttcagagtagggagttccactgttgggaagtgggaaaaaactgcacttcaactctgtgccgctgaggtaaatacttaagatgatatcaatttaactgtgaaagcaaaaacaaataaatcgaaaaacaaagtcgcaacagtctgagaactatatttaagccccaaaccatgttcatcagaaaaagacaacttgtgctaaattacacatcaagacaaaaatggggtggggggaatgggggagggatagactaaaggtaaaagagtcctaaacacaatccacctgcagctttcaaaatttggttttttattcctacagtggatcagaggacaacctgaaagtcaggtacagccaaagttgtgatggttttcaaaactcttttcaaatgttctttgaagccacgagtgcaaattatctatcactttccttttctttctctaaggacccagagactgggaagatctctcaggctccacatacaaatctgaagaacacccagagcagttaaccatctacagggaggttgtgagatacacacactttcccttcagaggtcacctcagccacaaactgggcaaatctgtagagtggagagcagtgaccaccagtctgcgactggaaatactccggaagctaaataaaacacacctgcgaggtcaaaccaagcaaaccaaggcagtgtactggtgaggagaaagagctgctaatcccaaaattataaacacacgcgcgcgaaccagatctgaaccaaacccactcagcagctagctcaaagctgggagctccaaaccagaagacaaacgctcagggagcttccccggcggaggggaaggccattccatggcattttctccgccatcccatggcattttctccgccatccccgggcagccccaaccaagtagccgccaccggctccaacccatcccgctgggccaccacccgtggggcccagtcgaacccaggtggccccagagctgaagggctcctagggtcagaccagaggtccgttgcacacccggtcatagagaaaggaagacacatcagccgcgcctccggggcaccgtactcacccccataacctacacccccgactgtgctgcagctcccatcacggtcttcctgcattcgggcgacagccccctgggtcttggaagcagccattacccggcagaaaagaaaagggagggccgcagggcgggtcggaggcggggtggcaccagtagaaacgctactggaggcgaactccccgtcgacgtaatgttttctccacacctacgccgcgctctggaccaataggacgcaatcagtaaaactgaatccccgccccgaaccacatttgccgcgcccacttccgggatggggaggccaagaactacaattcccagcgtgctgcggggccctgggacgggagggctggactaggcgctggcgggcgggggtgcgccggagagtgccccggcgtgttcgcttagttcagtgaatcagaacaatgactgcgccgccgggtacccgggagcgcgtcggaggactgtgagcagccgccgccgggagagctgcgggcggcgcagtgtcaacgctgggctcgggagcctccagcgcagatcctgcccagcgcccgcagcccgcgcgaagccgctgggctccggcactgcagcgctgctcggggactgtgcattgttgtgagccggagaaggggcgcggggattacaaagcctgaagaccccggagcccctttagccatgtggatacctacggagcacgagaaatacggcgtgggtgagtctccgcggggcgaacttttattctgctctggcccgagcgagtgcgcatttctcgtccttgcccccgcgcccctctcgctccgcccggttgaaaatgcctaatcctggcatcgcgcagctggtacggggctttgccgagccagctccaggcagagggctgcgcaccaggctctcgccccgcaccgcctgctcggcgcgccccgcactggttcccgaagcgccgggacagcttgggggagcgcgcggccggcccgctagcttcgggctctgcctgcggagtttggagtggcgactgggcgtgtgtgtgtgtgtgtgtgtgtgtgtcaagttggaagaggaggcgaatggggtttctctccttccttacccttcttccccaaagcgacagggagctgcaacggttcctctgggtggagagggagacaacaacactcgggcagagagaacacccccaaaacagtagggaggcgcaaacccttccctctggctcggatcgacattcccggagtgtggaatgtggcagggtcctggagagagccgctctgacaagctgagccctctctgaccctcctccctctctgcgatcccggatttatggggtgtgtatgttgcggggcgggggcattggtaaatttcaacatctgcgccgctcggttctttggtctttggagaagaacgggtatttcagcagtgtttttacttctggccaccctctcgaccccgggtgagcgcagtgggggcggtgtggcggtacagggctgctgagtgataaatggggagggggatcggaaagcctggttcttgggggcagggagatagcttttaggaaagcataccctgacactggcgttcggagaaaaaggaacaggatagctctcgctgttctgtgtaaaggtgaacaacaaaggacattaatgttgactgatgaatacaggagtctcccttccttttcctcctcccatttcaggcgggttacagttcccgtttttgttgtttgatttcagctgggtcgccccttgacagttactccttttagggttgagactattaagaagccaggctctccgacaaggctgcagccggccaaatgcaattataacctcccagaaggtctaacagaaagcattatggattttactaacactctttatttcctataatgccctgttctgccgactggtgtactttgtgtgtgtgtgtgtgtgtgtgtgtgttttaaaattgaggacaggtctagtgatttaggtgatgtgtagatatctgcttatgttctaaattcattttcctgcaatttaaaacatctggaaagccttcccagggagtcgtagtccgaggggatttttgtttttttttttcccaactttgcctggggataggactttggggtccattgaaaggactgtaggattcaacaaaatcattcccacatttcacgttagcttccattctggattgtgactaattaccaagacaatagtttgacctgaacccacctttgggaaaggtttc

SEQ ID NO: 587181 - DNA, 4001 bp, Homo sapiens
aaacaaataaacaacaaaaaaacccaccacattcctaccagggctgcagtcaaggaaaagaccggagagcccaagctagggcagaaaagcagcttccccccatatacaactactgtttcataaacattttccaaattgaaaataggttcactaaaaaaggtcactcattagaggtgaagaggggatgtccctcacacccaagaggaccaagagaaagaaaaactcctctgggacccctccttgcttcctggggaaggggtgccccatggcctggggactcccccttttatcttccagcacagagccctcaccccagaagggtaaactaattggtgcaattgagagctgagacctatggctaaggggggctggttgaggctggtgacagttcactggtcatctgggacctggtgtcagactcagggctcactggaccacatgggctggcagccgactctccttcacacctgggacaggaagaggtgtcattttctgtcctcccgatggctgcagaaaaggccctcaggctaggaaaaggggaggcctgctgcttggggcgatctgggcagaccagccccactctctgactcaagagcagccctgctccggggcagacctgctccgggacacagcagagtggagagcagggccctaggatcgccaggccctgtaataccagtaagaggtgctggtgtttccatcaaaagcacccattcctccatcacagaggctccactccgccctagcccacagaaggggacagagtccacagtagaagttaagaaagtcccggggcccagtttagttttctcgggtttgaagccctaaccctgaaaatgatcaaacacaacacagcagcccctggctccctcgttagcacctggctgagagccgcgtggtgagcagaggggcccctgagcagcccagccccagggtgggcccagagagtcttccctgggcaagctttcaggcctctctgaggatccacctcccctggttttatacccaattctggagcaccggttctgcccacggagatcatcgatggagcctgaagaaatgcctggtgctactctcacccgtcagagaccctgagctctgggaccaggcaagggctcaggagtcttaaaagctgcccaggccattccaacatgcggccaagtttgtcaaccgcaggaaagaccccgaagtcatctctccatggccccctccctggatcacacccggtgcagggggagagtgaattactcattacacttggtgaaaggtggtaatcaaacatttaaaaaatatccccgtcaaattggccaccgtgtaaacacgaacgaggcattcacttctgcggccgggcggaagcactgcccgcgaagctctccgccggccgggcgcaaagggagccccaagccggggctcagccacagggtcagagctctgccaggtcccggaaaggacggtcccggcccccgccccgcggggcctccgcacttgggcccggcgaccgctgctccgcgccgcgcgggccaggcctgcccttccgggcctgcgtcgggcccgctccgtcctgcccgccgcgcagcccggccgtgccccgcccgcctcgggcctcgcctgggcgcggaagctgggagggcgccgcaaggctaccggaggacggcgcggcccggtcccgcggcccagcccgcgccccgcccccacggcagcgcggccatggcgccggcggggttctcccacctgcatgggcggcattccctcggccatttccccgcgcagcgccggctcctggtggcagacctcctccgggggcagagcctgggcccagctccagctcccgctgtccagccccaggccctggatgcccagctgctgaggctgcggccgtgttgacacaaactgcatcctgggagtgctgttccccgctcgggtcggccagggagaagaagaacgttttccaggcgccttccccctctccggggccggacagctccatctacagcccgtaggagcaaacagtccccttcggcggcgctccccgccccttggcagcccgcgcgccagccaatggcctcggagctcctgcccgcctgcggggacctaccggggccactcccggactggggtcgccaccgccccaaaactgagaggcggcggcctcgcccaggggtcaggccccctcaatctgggatggccgactttaaaggcccaaactatgcgaggacctggactgtgggcttgattactgttaattctgcaaatgtattgggcatcccgggagaaaatagtgcctgacccttgtgaaaattttgcaggagtaattctgtcttcagacactttcttctggccttctgccttccctcactcctttgcagactttacctcccactccccttcttcccaatccagatttacctggacccatcccagagcttttgcactgttatggatgatagagaagtgattcatgttaaggtgtcaaaagagggctgagctctttctcccaggtaaggtgcagtgcattttaacagtggcctcttcaaacaccttgaaattgggttgggcgtggtgcctcacacctgtaatctcagcactctgagaggctgaagcaggagaacgacttgagcccaggagttcgagaccagactgagcaacatattgacaccccatccctataaaaaataaaaattagccgagcgcggtggctcacatctgtaatcccagcacattgggaggctgaggcaggcggatcacctgaggtcaggagttcgagaccagcctggccaacatggtgaaaccccgtctctactaaaaatacaaaaagattagccgggcgtggtggcgtgggcctataatcctagctactcgggaggctgaggcaggagaatcgcttcaacctccgaagcggaggttgcagtgagccaagatcgcgccagtgcgctccagcctgggcaacagagcgagactccatctcaaaaaataataataaggccgggcgccgtggctcacgcctgtaatcccagcactttgggaggccaagacgggcggatcacgaggtcaggagatcgagaccatcctggctaacacggtgaaaccccgtctctactaaaaatacaaaaaaattagccgggtgtggtggcggcgcctgtagtcccagctactcgggaggctgaggcaggagaatggcgtgaacccgggaggcggagcttgcagtgagccgagatcgcgccactgcactctagcctgggcaacagagcaagactccgtctcaaaaaaaaataataataataataataaaataaaaaataaaaattacccgggcatgatggctaatgcctgtactcctagttactcaggaggctaaggctgtaggattgcttgaactcaggagttggaggttgcagtgagctgtgattgtgccgttgtgctccagcttgggcggcatagcaaagatcctgtgtcaaataaataaataaataaacctttaaatcgggcagtcatggtggctcacacctgtaatcccaacactttggaggccaaggctgaggccaggagttcaagaccagcctgggtgacacagcgagatcccttctctacaaataaaaccctttaaaggcaggtcagtgtcactttgaaacatcaggccaggtcagaggaggagccagggagaggccagtataagctgatgaagatggaggaggggaaaattcagtcattccaaatgtatttattgaacacctactgtgtgccaggtactgtttaggaagagggtgagctttgcagttgcatacacctgagtttaaatcccaaaatcaccactcactagctatgactttgagcaacttatttaacttctctgagcctcattctcttcatatataaatgaagaaaataatggcaactctattttaatgttgtaaaattaaatgagaattgtgcctggcacatagcgagcattctgcaaagatagttacccccaaaaggtgtttttgtaattattctcaaaatag

SEQ ID NO: 587182 - DNA, 4001 bp, Homo sapiens
cgcctgtaatcccaacactttgggaggccaaggcaggtggatcacttgaggccaggagttgcagaccagcctggccaaaagggcggaaccccgtctctactaaaaatacaaaaaattcgccggaggtggtggcgggcgcctgtagtcccaaccactcgggaggctgaagcaggagaagcgcttgaaccgggaggcggaggttgcagtgagccgagatcgcgccactgcactccagagacagtctcaaaaataaataaaaattaatttttttaaaaaaagagcttcaataacagaatcttctccttccacccgactgtccatcaaacacgtataatcaaatgatgcccactctccacagatgtcttttctggagaaaataatacgctcgttcctctaattagcccatcggtttcaggttcatcactctgctatcttctcctggagtttacaaaagcccttcagagtgtaaacaccgatgtggattcaatcccacttccggagagaggatcaaaccaggaatctaatacaactgaaaacggagcctgagccaggtgtatcacgcgatgcactgggctccagcaggattacccctggaatcggcgtctgcacccactcccagccctcgtgctaactgcgtacgcttagcagaatttctctgatccttggacccagctgcgtaaaaataaacttcctctcctgccacgggcgcgaataactgtgttaacatcaaataaaaacgtctgggagaaataccaagttagggtcgctgtcattagctgctttcaagagagaggcgcccctaccgctctgctgaaacttttaaacgctccagctgggtcgccgttaaagtcacaaaaccagaaccggagccccattactaacccctacgcaggatcccgctaggctagggggatccctggggaagcggagtagaggacgggctgcaggggacggaggggcgcctccccgaaccctgctccgggccggccgggggaccctgcgggccgcagtggcacagacaccacccccttccccggcgaccacagcctccgtctcaccgcgagacccggggacgcgtggactcaccctgggggcagggacgacagatttgggggaccggacacggaccaggccctgttggaccctgtcacagacccacacaccggggacagaacaaagaacggaagttccccctcgtttcgcttccgggtcggttgttcttgccactcacccgtacccccaacgcccacttgttctgtctaggaaaatgggaggtcctcgcctctctgtggtttgctgactcagggcggctggcaggcggcgagggcaaggagcgcgatcgctgacgcggcactcggggatctttcgctgcgggggctggccggctgcgccctctgctggccacgaatgtgcgaaagcggccgaccacggtcctgggcctcaggacatgtgctccagcgtcgccggccttgggggcgggcggcgggggcgcgcggggatgtcgagcccgcgcttctcaggctggctcgcgaagggcagcagtaaacatacaattattgaaggattcatcaatattaaaaaatgaaccctgatttaaaacttgcctccgaacaaaccgagttttttttgtttcttgtaaaaatgccccctttaaattacccacatctgaagaaaacattccagtccatcacagagttgacatgaggaaaaaacccgtgtacaggtgatgagagcagagaagaggaagcttaccggccgggcgcggaggctcacgcctgtaatcccagcactttaggaggccgaggcgggcggatcacctgaggtcaggagttcgagaccagcctggccaacatggcgaaaccccgtctcgactaaaaatacaaaaaaattacccgggcgtggtggcagacgcctgtaatcccagctactctggaggctgagacaggagaatcgcttgaacccaggaggcggaggttgcagtgagccgacatcgcaccactgtactccaggctggccacagagtgagactgtctcaaaaaaaaaaaaaaggaagctacaggtggaagcgaggcggggatagtcaaggaagtgaccgtgtcctggagacgcggcaaccgtggtgaccgcagtcaacacagtaagccccagcattcgcattgtaattgagctcattcaagctgagcgctctccagtagggactttcccctgtagggagcatgcgcattttgatttcacctgtcctcaaactgaccctttgctcattatcttggtaaaaaacacgcccctgggtggaaatttaagatgctaatgaaacatgcaatgtatgaacaagcctgtacacccactgcgcatgtgcacctagaggaccacccagaacatacttactagtaacacttctcccacccccttatgaataatcgtgtaagaccccttacaaagggggtctctctagagccagcctttgctgtttcatccttaggagcagccctccctgaactaactctctctctatctctctctctcccagggtgtactgtctactctgcacttaactttcaaaatactattttccttttgcaataaattactctatgctggatttcctttgacatgtgtttcttttattctttttcctttttttttttttttttttgttgttgttgttgttgagagggagtctcactcttgtcacccaggctgattctcgtgcctcagcctcccaagtagctgggactacaggcgtgtgataccatacccggctaatttgtgtgtatttttagtagagacaaggtttcaccatgttggtcaggcttgtctcgaactccttacctcaaatgatctgccgcctcaatctcccaaagtgctggggttacaggtgtgagccaccgcgcccggcctcctgtgtgtttcttgtttaaattttttttttcttttgagacgggggtcttactctgtcacccaggctggagtgcagtgttgtgatttcggctcactgcaacctccacctcacaaggtcaagtgatcctcccacctcagcctcccaagtagctggaaccccagatgcatgccaccacgcccggctacttttttgtagagacagagggttttcaccatgttgcccagactggtctcaaactcctgagctcaagggatccgcccacctcagcctcccaaagtgttgggattacaggtgtgagccactgcacccagccttaaatccttttaaactaagaagataagaaatgaggtatcacaatagccatcaatagaaggaaagcacctcatcatgttcatgctttcctctgccttcttcaacatatgaagtcttttttttttttttttttttagagacagggtctcactctgtcacccaggctggagtgcagtggcgcgatcctacctcactacagcctcaacctcctggactcaggcgatcctccctcctcagcttccagagtagctgggaccacaggcacgcaccatcacacctggcttcctttctgttttgtagactgggtgctgccagttcatgaatccctaataaagccaactcaatctttaaaattcaatttgttggccgggtgcagtgcttcacgcctgtaatcccagcactttgggaggccgaggcagatagatcacctgaggtcaggagtttgagaccagcctggccaacatggtgaaaccctgcctctactaaaaatacaaaaacaaaaattagccgggagtggtggcaggcacctgtaatcccagctacttgggagactgaggtggcagaatggcttgaacctgggaggtggaggttgcagtgagccgagatcgcaccactgcactccagcctgggagcgacagagggatactccatctctgtatatatatacgtatcctgaagtatgtttatggtctgtttcctacaactagggtataagctccatgaggtcaggacttcgttttgtttagtgatgtacctgctgcctggtaggcactcccaaatatttgttaaa

SEQ ID NO: 587183 - DNA, 4001 bp, Homo sapiens
tgagctcactccagactcaaactcctaagttcaagtgatcctcccagctcagcctcccaaggagctgggactaaaggtgtgcactgccacatctggctgagttttttaaaattctttttgtagaaatgcagcctcactgtgttgctcaggctggtctcaatctcctggcctcaagtgattctcccacctcagcctcccaaagtgctgggattacaggcatgagccaccgagtccagcctaaacttcatttctaatcaagacatttaaagaaaaggaaaaaaaagagaatacttattatatgctaataaataccaattaagaccaccaccacaactagtatttgcgttgcacccgtggagagatgaaagggaatggtaggttctcaggtccacctccacccagggtaagaaagttctaacgttctgtcagctaacttgctagacactgtgctccgaactacttcagcaggggatccacattgcacagctgagccattagaagtcttcaggtgattcgctgaaaatctatctccttggaccttcaccgcacagagacctagtgcatcacagaaattcaatgactggcgacctgcagtggctcacgcctgtaaccccagcactttaggaggctgaggtgggaggattacttgagcccaggagttccaggctatggtgagccatgatggcaccacggcactccagccgggggcaacagagcaagaccttaatacacacacaaacattttaaaaggaaaaaaaaaaaaaaggccgggcgcggtggctaacgcctgtaatcccaacactttgggaggccaaggcaggtggatcacttgaggccaggagttgcagaccagcctggccaaaagggcggaaccccgtctctactaaaaatacaaaaaattcgccggaggtggtggcgggcgcctgtagtcccaaccactcgggaggctgaagcaggagaagcgcttgaaccgggaggcggaggttgcagtgagccgagatcgcgccactgcactccagagacagtctcaaaaataaataaaaattaatttttttaaaaaaagagcttcaataacagaatcttctccttccacccgactgtccatcaaacacgtataatcaaatgatgcccactctccacagatgtcttttctggagaaaataatacgctcgttcctctaattagcccatcggtttcaggttcatcactctgctatcttctcctggagtttacaaaagcccttcagagtgtaaacaccgatgtggattcaatcccacttccggagagaggatcaaaccaggaatctaatacaactgaaaacggagcctgagccaggtgtatcacgcgatgcactgggctccagcaggattacccctggaatcggcgtctgcacccactcccagccctcgtgctaactgcgtacgcttagcagaatttctctgatccttggacccagctgcgtaaaaataaacttcctctcctgccacgggcgcgaataactgtgttaacatcaaataaaaacgtctgggagaaataccaagttagggtcgctgtcattagctgctttcaagagagaggcgcccctaccgctctgctgaaacttttaaacgctccagctgggtcgccgttaaagtcacaaaaccagaaccggagccccattactaacccctacgcaggatcccgctaggctagggggatccctggggaagcggagtagaggacgggctgcaggggacggaggggcgcctccccgaaccctgctccgggccggccgggggaccctgcgggccgcagtggcacagacaccacccccttccccggcgaccacagcctccgtctcaccgcgagacccggggacgcgtggactcaccctgggggcagggacgacagatttgggggaccggacacggaccaggccctgttggaccctgtcacagacccacacaccggggacagaacaaagaacggaagttccccctcgtttcgcttccgggtcggttgttcttgccactcacccgtacccccaacgcccacttgttctgtctaggaaaatgggaggtcctcgcctctctgtggtttgctgactcagggcggctggcaggcggcgagggcaaggagcgcgatcgctgacgcggcactcggggatctttcgctgcgggggctggccggctgcgccctctgctggccacgaatgtgcgaaagcggccgaccacggtcctgggcctcaggacatgtgctccagcgtcgccggccttgggggcgggcggcgggggcgcgcggggatgtcgagcccgcgcttctcaggctggctcgcgaagggcagcagtaaacatacaattattgaaggattcatcaatattaaaaaatgaaccctgatttaaaacttgcctccgaacaaaccgagttttttttgtttcttgtaaaaatgccccctttaaattacccacatctgaagaaaacattccagtccatcacagagttgacatgaggaaaaaacccgtgtacaggtgatgagagcagagaagaggaagcttaccggccgggcgcggaggctcacgcctgtaatcccagcactttaggaggccgaggcgggcggatcacctgaggtcaggagttcgagaccagcctggccaacatggcgaaaccccgtctcgactaaaaatacaaaaaaattacccgggcgtggtggcagacgcctgtaatcccagctactctggaggctgagacaggagaatcgcttgaacccaggaggcggaggttgcagtgagccgacatcgcaccactgtactccaggctggccacagagtgagactgtctcaaaaaaaaaaaaaaggaagctacaggtggaagcgaggcggggatagtcaaggaagtgaccgtgtcctggagacgcggcaaccgtggtgaccgcagtcaacacagtaagccccagcattcgcattgtaattgagctcattcaagctgagcgctctccagtagggactttcccctgtagggagcatgcgcattttgatttcacctgtcctcaaactgaccctttgctcattatcttggtaaaaaacacgcccctgggtggaaatttaagatgctaatgaaacatgcaatgtatgaacaagcctgtacacccactgcgcatgtgcacctagaggaccacccagaacatacttactagtaacacttctcccacccccttatgaataatcgtgtaagaccccttacaaagggggtctctctagagccagcctttgctgtttcatccttaggagcagccctccctgaactaactctctctctatctctctctctcccagggtgtactgtctactctgcacttaactttcaaaatactattttccttttgcaataaattactctatgctggatttcctttgacatgtgtttcttttattctttttcctttttttttttttttttttgttgttgttgttgttgagagggagtctcactcttgtcacccaggctgattctcgtgcctcagcctcccaagtagctgggactacaggcgtgtgataccatacccggctaatttgtgtgtatttttagtagagacaaggtttcaccatgttggtcaggcttgtctcgaactccttacctcaaatgatctgccgcctcaatctcccaaagtgctggggttacaggtgtgagccaccgcgcccggcctcctgtgtgtttcttgtttaaattttttttttcttttgagacgggggtcttactctgtcacccaggctggagtgcagtgttgtgatttcggctcactgcaacctccacctcacaaggtcaagtgatcctcccacctcagcctcccaagtagctggaaccccagatgcatgccaccacgcccggctacttttttgtagagacagagggttttcaccatgttgcccagactggtctcaaactcctgagctcaagggatccgcccacctcagcctcccaaagtgttgggattacaggtgtgagccactgcacccagccttaaa

SEQ ID NO: 587184 - DNA, 4001 bp, Homo sapiens
cctcacaccagcacttaagaagcattcaaatacttactaaaagaatgtctaaagtcgccagccaatgtgatggacacaggatttttcaaactcagcattttggccctactgtcctgttccagaacagactgaccactgctgggggtagggggttggggggacccttggaattggaactcaccccagaagcagtggagagtctctgcctccaaagacgacactgagttctttctcccaagaagtccacccacggatgaccagagaaggtggaggaccagctcctacagaggtcagaagcacagccagacatcgtccccaacccaagattcagaacataatggtttgaaaaacggacctcagcagtccgggcagagtttagattccagcaactccccctgggttatctctgcctcccccaggcctgcactcttgccctcttcttgccagcctgccagtccactgtaaacactgctcacttctccctcggcatccaactctgggtcagaggccacagggggtctcatcagcatcaatcccaaaccagaggccacagggagcttcaccaacgtcatcccaaaccctcatttctcaaactccccacctcaggtgatccacccgcctcgacctcacaaagtgctgggattacaggcgtgagccacctcacccggccccaaaccctcatttctactagggccctgcactctaggatacggtgctgcagccaacatttagaatgggaggtgacaaggtatctcccaagaggagaagggagcgaggcaagggcaggaagaagaggcaaagcttgaaagttgatagaaactcctcacaaaagctccaaagccagggaaacccaactcagagagcgggagatgtgggggtgtgcttgtgtctagcccccttcattccctctgggtggcccccgctgccctcagagcccttcgggtcttcatgccctcctgaaggacttccttccccgaccaccacagtcctcactgtctgtcctcggattctggatccccctactttcctgggtttgctcctggtgcaggttatttccacgggggccatctcaggttccccagggtagccccctcaccaccccacccggcccccagacctgcccacacttgttgaaccaaaccaagcaccgaggtctccccacacaagcagagctgggggcctgatcctcctggtacctgcacttcctcttgcccatcgggtcctcgaccaaagcccagcccctttcctacctctgctgccacgcgggacagcccagaccccatccaatcccagggatgggtgtccctacctacctgccggcagcagaagacagccgagcagcccaccggggctccttctgcagatgagggaaagcccggataaggcccccaaggtcacaaagcgggctcctggggcgacgggccgagcgcctcccgccccccagggggcgtccggagccgcctcctcctgcagagacctagacgatgacagcccctcctggatgggtgtgtcctgggggcggccgcggcccagcccctgccgctgcggccgagaaggcgtgggcgggcaccccgaggtgtcacgcgtggcctcccgggcctgccccctccgcctcctgcccggaccggccccgggggtcggcaacgcgcaggcccggacgggggtccgggaggcgggggcgctgccgcggaagtccctacccgcgttccgctccgactctgcaggccccggccccgccgcctccccgcggcctccccgcgccgggcgtcgagggccagcccggccccgccgccgccgccgcccccgagcgcaagcccggcccgcccgcacctgccgcccgcgccgccgcccaccggccccgcgagacccactcaccgcgcgggccgggctggccgagccacgggccggacaccggggccggggcctgcgggccggcggcggaccccgcgctacacaaagtgacggcccgggagctgcgcgacggcggcgcgtgggcaccggaagtaccgccggccggccccgccccgcccgcgcccgcggggggaggaacttccggtcacgcgggggcagcggcgcggagcggggaagcgcgggttgcgggggtttgcccagctgggcctcgggccggggcgaggacggggcatgcggggaggggacgggagcgccctcgacactcgtggggcgcccacaacctcgccccgctcctggacaccctggccaggtctcggaggtgaccccgaggtcccgccgctgcgaccaccgccttccccgaaccccagcccggcctcgttcatcggggcgcccgctgaggaccaggccccgcgctgggccccctccgccagtccacggagcctgcccgggaccccaggatggtggagggaggaggcgacccctgtggtggggagggggccaggtgtccacgcctccaccagatccccgggcccgcgcggggtgaacgtcttgtgggtggggagggaggagggacgggcggggtgaacgtcttatgggtggactgtggcggttgagtgcaggaggagactggggttgtggagcccgcacttggagggacatggggtcacgggcagggaagcgatgtccaggcagagggcatggccagtgtgggggcagaagtgacaggcgaccccaggaacccagggaggggtcggtgagctcagcggccacccccagacccccacccacaagcctgtctgcacctgctcccaagaggtgcagctggggtgtcaggatgagctctggcattggtggagtccagggtctgtcttccgcctggaatggtgtggcctgggccccttccccagctcccagcccgcctgcaccactgttcttggtgcttttctgtggggaccccaggcctgactgggcaagagatagaggaggactcggccaggcacggtgtctgtaatcctagcactttgggaggtcttggcgggcggatcacgaggtcaggagttcgagactagcttggctaacatggtgggtgaaaccccatctctactaaaaatacaaaaattagccggccgtggtagcgcacccctgtagtcccagctgcttgggaggctgaggcaggagaatcgtttgaagccgggaggcagagggtgcagtgagccgagatcacaccactgcacgccagcctgggcgacaaggtgagactctgtctcaaaataataataagatagaggaggactcaaaccttagtcccacagaggggtgcagccccaaccccttgaatcagaccctcacagtgatgtcgcttggctcttggtgtcttaaaatgtcttaaagttaataacattttaaaataaggagtcccattcttgtttaaaaaataaaattgaaaaatcaggttctaatgcggggtctcacacctataaattaagcactctggggggccgaggcgggtcacacctgtaatcccagcactttgggaaaacaaggtgggaggattgcttgagcccaggaggttgaggctgcagtgagctatgatagcaccactccactccagcctgggcaacagattgaaaccctgtctctaataataaataaaatctgaaaaatcagaagttctggcaacacaaggcccctggtttgcagggcaccagccagtagggcctgagaagtaaccagcttctgtgggtgggactgagcgtggccatggtcctcagtgcccaccactccctgtccctttcctccaggcccacatctgaatgacactgcctgactctcctgtgggtatcttttagaacccctaatccctagattagacccttccccaccctacctgatccgtcaggttcagtaggaaggtgcaattgcccccaggcactcccaggaagggctctgactgtaggacaattaacaattgaccaaaagcagtgtcaccaggtgatgtggtttggctgtgtccccactgaaatctcgtcttgaattgtagttctcatgatccccacatgttgtggaagggacccggtgggaggtaatta

SEQ ID NO: 587185 - DNA, 4001 bp, Homo sapiens
agtaatgatatacagcgtggagctacgtgtctatgtagagacaatataagacatgcatggaagtcatgaacacaacagtcagcttactggctacctctggagaaggatagaggggaagggtttcagggaggctatgtgggggcctcacctacagctgtaacatactatttccttggcaatatggccaagtattaagatctgataaacttgggtggtagacacaggggatggtcattatcttttttttatatagttttctgtatgtataaaacattaaaaatgaaccaaagtaaaaagctgaatctagcacctagcagtacagaggctcctgcttgcgttacagaaggcacctgaaggctctcagcccaagtctgggaatggcatagtggctcagggatggtagtgaaccagcccttcacaaaccacacaccgcaataaaccagcagagcaacagcactcactcggcggaactgtgctcccggaatccttctgcgcactctctctgcagaagtccctccgtgctgggtccaggcgctcccactcctcccaggttagagacacagccgtgtcctcgaaagtcaccatcccctggaacaacacaagagccccattcagtacctgctgtccctgtacagcactaacactcttcttgagtcttgtaccgacaagggagtttggagagatcagagatagaggctgacattctcttgtaatcctgaaaagcctttctgtggactatttacactaattttggaggtaggtaggagcaaaatatttctttaacttatatcactgtgatgtatgggaatggaaatatgatacagattaaaagtaaacaaggccgggcgcggtggctcacgcctgtaatcccagcattttgggaggccgaggcgggcggatcacctgaggtcaggagttcgagaccagcctggccaacacagtgaaaccccgtctctactaaaaatacaaaaattagccgggcgtggtggcgggcgcctgtaatcccagctactcgggagactgaggcaggagaatcgcttgaacccgggagtcagaggttgcagcgagccgagatcgcgccattgcactccagcctgggcaacaagagtgaaactccatctcaaacaacagcaagaacaacaagaaaaaaaaaaaaaagaaaagaaaaagaaagaaaaccagtaatccgtgttcgctttatgctgaggtctataacaagtcatttcctggatggatctgtcactgtggcctacagaaaggaagtccatacacaccccaatgttcacacgaaatgtaataaggaagtaagttccgaaacgcagagcacccctaaacgcctattttccacactcccacctccagaacaggcctttcgcttctcacctgggatgaggttccatcgagcgctcgctgcagagcccgcaccacggccaccgcctcctccccgctctctgggcagtgctctcgcacccaggcttgaagctcctcgggcaggatggtgaggaactgctccagcaccagcagctccaggatctgctccttggagagcagctcgggtctcagccaccgacgacagagttctcggagccggctcagcgcctcttccggtccagccacctcctggtaacgcagctgcctaaagtgcagtcgagaagtttcggggtccggcgaagccgcgggatagttgggctcccaacttccgggtgagtcttcctccactttcacgggcaaaagtccgtcgcgttgggacggcgccgcgtccttggacctcgcagccatcacccagggtcccaactcggcgtcactgccgcgcctctgggcggtcaagctggaattcatctttctccggcatgtgctgcccttcctggagtcttcttttcaggtgaagaaagagcaaacccaaggaactcatcagccgtcaacaccctccggtcccaaacaccgggccccaccacaccaggcccctctccacactctcctttcctcagctttgcgcctacaactctctcggtcaaacaaccgaaaacatcccgtgccggaagcgcgtcatcgaggccttgcggcacctttccctgcatttccggggcctctctaggcgcctgatggggtgaggtgcatctcgctggtttatcgtcctagccccgcccgacgcagagggtcttgacggtttcccgcatcccgaggaaatacgggcgtccgagccggtggccgagctccggcaagggcgggaaccttcaggattaaatagacagggtctggctctgtcgcccaggctggactgcagtggcgcgatttcggctcactgcaacttctgtctcccgggttcaagcaattctccagcttcagcctcccaagtatctaggactacaggtgcgcgcgaccacgcccggtttattaatttttctgtggggatggggtttcattatattgcccaggttggacaaagttgtttttttttcttttttcaggcggactctcgctctgtcgccaggctgtcttagcctcctgagtagcttggactacaggcgcgcgccaccatgcccggctactttctgtattttagtagagatggggtttcaccatgttggtcaggctggtctggaactcctgacctcgtgatccgcctgccccggcctcccaaagtgctggattacaggcgtgagccgctgcgcccagttggaaaaagttttgttttttttttaaaactaagtgcttccatgtacatcagatgttaacgactttgatcctaacaaacaaacaaaaaagatgaggaaattgaggctcaaagatgtgtcctggcctggctcagtggcgtatgcctgtaatcccagcattttgggaggctgaggggggaagatcgcttgaagccaagaattggagaccccaatgtctacaaaaaataaaaaattagctgggtgtggtggtgcacacctgtagtcccagtgagaggtgaagctagttggacttcctgggtccagtggggacttggacaacttttctgtcttacaagaggtttgtaaaaatgcaccaatcagcgctctgtagctagcaagaggtttgtaaaatgcaccaatcagcgctctgtaaaatggaccaatcagcaggattctaaaagcagccaatcgcagggaggatggaaaaaagggcgttctgatacgacagaaacggacatgggaggggacaaataagagactaaaagctcccaccccagtcagcggaggcaaccggctggagtgctctgccatgctgtggaaggtttgttctttcgctcttcacaataaatcttgctgctactcactctttgggtccgtgccatctttaagagctgtaacacagtgaaggtcggaggctgcattcttgaagtcagcgagaggatgaacccactggaaggaaccaactcaggatacaccacttacttgggaggctgaggtgggaggatcctttgagcccaggaggtaaagactgcagtgagatatgatcgcaccagtgcactccagcctgggtgacagagcaagactctgtctctaaaacaaagtgtcttggttgatgtcaagctgctggtgatttgcaacttgcataaaatgagacgatcgcttgagaccaggagttccaggccagcctgagcaacatagagaggatgtgtctccatataaaaataaaaaaatttttttttgagagggagtatcgctcgggttcaagcgattctcctatctcagcctcccaagtagctgggattacaggcgcgtgccaccacacccagctaattttttgtatttttagtagagacggggtttcaccatgttagccaggatggtcttgatttcctgacctcggctcactgcaacctctgcctcctgggttcaagcaatccccctccccaccccacgcccaaacaaaccgaacactatttatcaatccaggtgtgtttaataactagacataaaaatatctcttatggagccaggtgcggtggctcacgcctgtaatcccagcactttggg

SEQ ID NO: 587186 - DNA, 4001 bp, Homo sapiens
taaagacagtcactatgagacatcctaagaatcttggtctccacaaccccttatcttaacccagacactcctttctatgaacctggtcttcagatagccaattgccaatcagaaaatcgctgaatccgcctgtgacctgtaagcaccgcttggagttgtcccgcctttcctgacagaaccagtgtacactttacatgtattgactgatgtcttaagtcttcccaaaacgtgtaaaatcaagctgtaacccaaccaccttggatacatgttcttaggacctcttcagacagtaccttggccttcctcactcatatttggctcagaataaacttctaaatattttacagtttgactcttcgtaaacatggatgaatcacaaaagcattacgcttttgaggagccagtcacaaaaggttatatcatactgtatgattccatttatataccatttctaaaaagagaaaactaggtttcaagagcagatcagtccttgccaaggatccaggtgtcggagggagtgaccataaagcaaatgaagcacagaagagaatggcagcacaaggagtttcagggtgggacagggctcttccgtatcctggttacagtggttactacacgtatacatacatatgtgaaaattcatagaactttacacccaaagaaacgttagtttttttgtttgtttgtttttggtttttttgagatggagtctccctctgtcgcccaggctggagtgcagtggcgcgatctcggctcactgcaagctccgcctcccgggttcacgccactctcccgactcagcctccctaggagctgggactacaggcgcccgccacaacgctcggctattttttttttttttttttttgtatttttagtagagacggggtttcgccgttagccaggatggtctcgctctcctgacctcgtgatccgcccgcctccgcctcccaaagtgctgggattacaggcgtgaggcaccgcgcccatccgaaacgttagttttaatgtaaggttttttttttttaaccctttaatcagtaaggtgcatctacatttcacgattccgggacaaatacagatgtgcacacgctcctcagcctatgcagggactactttctcatggacatcctttctaactacacacttttcatttgttactttagcctgacacctaaaacatgactaggacagaatgcgaggttgattttctggggacagtcgccacccccttccttgccctctctctcctttctgtctctccctggtttccccttctgcgtcttcccacctctcccgtttttgcgtcttcgtgtttctcacgccctgtgtcatggcctcctccgtcttctcccgctctgtcacagtctcccgccgggggctaggggtgcccggcccgcatccctgggcgaccctgagtccccgcaggcggccccgaggccggggtggcttccgcatggggtctctgcccgaggcctttctctgccaaggagggagtgtggacgctcggggagcccagaagggcgctgcacccacggggaccggacgtggtgggcggacccctcctccgcgtccccgacgggacatgcccggggcccacacggcctccgcgcccccggcgggacggacaccccgggccaccgcgcgccccccaccacctacccggcctcgctggattcccgggaccccctcacaaacgaaaccctcgagctcatccctgacttgggggcagctttggaaggaacagcaccggactctcaccctctcgctgcctctcagtccgggtttctgtggagcgcgtctcccagtcgctgtccctactctctccctgttcctgctctctccatgttcacctgcccctccgtttcccctcccgtcagctccctcatctcgtcttcgaccgcatccctcgcatgcagatccgggagtccaagggtccctcaaagaccggcgtgctgcggcccgcacggagggtgcccgggcccctcctctgaggaccgactccctctggcggcgccgctcctcccgcccgcagggggcgctatggggcggagcggcttccgcttccgagcgccgagtcccagcatgcaccgcgcccggccggctctgcctttgggggccagcagggctgtacctgggagttgggttggggcggagcggaggggaggccgtgccaggcagggccggttcgtgcggaaccgccatggccgagccggcttcggtaagaagggccggtggaggatgcaggctctgtcgaaactcgggtccctgtcgcagctggattggggtccgcgtccagggagtggggcggccggggcctgggcctgggggttggcagtggcccacggactgagctccgggctgggctggagaaggtgcagtcttgctgcgtgtgctgttctggaattgacctggggaaaagctggtctggccgggcttggccgcgcgcgtctgtggccccggccactcggaaggctgaggcgggagcagcgcttgagcccgggagctctgcgctgtatatgcgctaggtccgtcgcgcggtgcctctgagttctgcatctgtgtggtgacctctcgggagcggggaccaccaggttccccagggagggggaaccggcccagctcggaaaccgagcagggcaaaaccccagtgctgatcgttagtgggatcgcgcctgtgaatagccactgccctccagcctgggcaacagccagaccccgtctgtttaatacataaataaaagttggtttgggagaaagaatccgggtgggaaagatctgtttctcggcctgttgtaggctcagatcaacaacgctgtccctgccttcagtgtcggggctctgaacctcggggtctctctggggcccgtgctctcctgctgaaggtagtttcagagaagcacatcagtgttaagcagatgagaaaaaggagaaggaaagctggaactgagagaaattggagaccgctccctctaggaaaggacagaaaacttaaaatgaattgggtggttagcgtaaatcgaatttaccgtaaatgctgtagtattgtaatgtagtattgaaaatttgagcaccggttttagagtttgaaaggcgtatcctgaggcttaatccaagaaaccctgttacattcagttaagtataacttgcttaagtgtgcaagtttttcttgtgcccccaatgaaattttataatcttaggaatgtaatgctccttatttgcatttgattcttcccttttgcttcccactccttttccccaccctcctttggcaggtacagattcttttctgatttctccaagctttgtttctacagccaggctttctttttttctctcctctttaagtgattgggaatctcctggaatattcctctctgttctgggaaagtttgtggtagctcttctttgtacattgaatttatagaaaatgtggtaacagtttattggctaatgtattatttgggataggcaaggaaaaatcgttttcttgattttcctttccactgtagcagtttaatgctaattgtaaatgtggtcataaatgggaattttataggtggaaaacacatgggtggccgggcgtggtggctcacgccagtaatcccagcactttgggaggctgaggcgggcggatcacctgaggtcgggagttcgagaccagcctgaccaacatggagaaagcccgtctctaccaaaaatacaaaattagcctggcatggtggtgcatgcctgtaatctcagctactggggaggctgaggcaagagaatcgcttgaacccaggaggcagaggttgaagtgagccgagatcgtgccattgcactccagcctgggcaacaagagcgaaactccgtctcaaaaacaaaaccaacaacaacaacaacaacaaaaaaatatgggtgaggtacaataaaactgtagaggaatttggttgaaatcacattgtaaaaataacaaggccatccggacgtggtggcttacgcctgtaatcccagcactt

SEQ ID NO: 587187 - DNA, 4001 bp, Homo sapiens
cgaggtcaggagattgagaccatcccggcaaacacggtgaaacccccctctctactaaaaatacaaaaggacccgggcgtagtggcacgcgcctgtagtcccagctactcgggaggctgaggcaggagaatcgcttgaaccggcaaggcagaagttgcagtgagcccagatggcgccactgcactccagcctgagggacagagtgagactccacctcaaaaaataaataaataaataaattgatgacatgttgaaataatattttgcatatattgagttagatatataattaaaattaatttcatctatttattttttaacttctcaaaaattttttttattttagagacgcggtgtggactgcctcgaactcctggactcaagtgattcttccgcctcagcccccggcctagctgggactacaggcgtgcacaacacagcgcctggctttttactttttaaacgtgacgcctagagaatttaagcaggggtgtccaatcttttggcttccctgggccacactggaagaactgtcttgggtcacacataaaatactgatcatgatagctgatgagctaaaaaaaaaaaaaaaaaaaaaaaaaaaagacaaagaaaaaggtccgtgcataaatctcatgatgttctaggaaagtttacgaatttgtgttgggccgcatttaaagcagtcctagtccgcatgcggcctgggggccgcgggttggacaagcttgatttagagttttgtatgcggcttcccttatatttctattagccaggactggcacaacacaggatcatcgctaccatcccacctatacacaaaaaaaaaggttggaaaaaagaaaaacaggtccaagagtggaggtggcacttccctctgctctaccccctacccatcgctgctcttcctccttttcccagtcacccctcatgtgccagggtggctcctgacccagtacaattgctctcctagaggtgaccaaagacctcttgggtggcaaatgcgatcagtgctttccccgcggcctgaccgtccccttctcattctacggggctgcgtgcaggcgcggcccggtcgcctcggtcgccctggcaactggccgctgccggcccccgcaggccttggcaaacacccgcgaatgaaccgccacgcacgcgaggccactccagcctccgggtccgcaccattcattcggcagctatttcgggagggcctcccgcgtgtcccgagtccggtgccgggagcccaggcgtcacgcagcgcggcgggaatgcgcctccgcacacttaaatgccgcccgcgccaccgctcagattgctggtgacgaacgctcccgcggccgcgagaatggctgacggctccccagcccaaccccgctgcgcgtctggcgggcaggcgtggggctgacacgcagcaggcaccccctcgacttcaacccaactgcagggccccgggtctcatagctgcctgcgagtgcccctcagacctgcggcccagcctggtgtccccgggtgggcggtttcacacccacccgctaagtcccctcacgcgaggctgcagccgccaagcacgggcgacaggcgacgtggccggcgggacccgagaacggcgcctatgcctggcagctccctgcccgcccgccttcctccctcggggtctgggtctcgggggctcacaacactcgcgcgcggccgcccttaccggggccggggccgcctcagccatggccctgcgctgtctagcccgggcctcggaagtcgccgccgctgccgccgctgccaccgcgcccggctccaagcaggcccggccgccgggtcctctccacaggcggcgccgacccggccctgccttccccgcacggacgggactcacgcggccgtcggggctcgggacgcgcaggaacgcggcggaggcgcggtgcagcaggcggcggatcaagctggggtcgcgaggccgactccgccgcactccacccgcagcggcccctcagctggcgctttgtgggcagcgagtgcaccgggaaccgcgcgggcctagacgcgccgcaggctcgcgctgcccagccaccgcggccagcgcgccccctgccggcccctgcggccagcgccccccgcgtcgcctccgcccctcccccccagctcttgggcttcggtgtggggagggttgttatttggggcccacgtgtgttccgctttctcacattcccacgagaaggttcagctcaccgcagtttaggacccagccgcaaagccgggctcattctggggagtgattttcttcacggaggctcgatacgcaggcgccgtctgcaggcaacagcttctgctgaagggcagccgtatttagaacagcggaaatgtgcagggtgagagtaagggggacacggctgaagggagcctatgggtggaatgagtgacggagaggcacaattttggaatgaagaagatatagatcatttgcggaaattacaaatgtggttgccaaggtgaggcggttcaggtcccacgcggcctgtgttgggatcaataatattttaaggtctccttcacatctcggattattgactctccggggcctggtctggaaataggattcttaatttttgtttatttatttatttagagacggagtctcactccgtcgcccaggctggagtgcagtggcgggatctcggctcactgcaaccgccttccgggttcaaccgattctcctgcctttgcctcccaagtagctgggattacaggcatgtaccaccatgcccagctaatttttttttttttaagtggagacggggtttcaccatgttggccaggctggtctgaaactcctgacctcaaatgatccacccgccttggcctcccaaagtgctaggattacaagcgtgagccattgcgcccggccttatttattgatttatttagagacagtctccctctgtcgtccaggctggagtgcaagtggcacaaacaaggctcactgcagccttaaactgctgggctcaaacgatccttcccctcagcctgcccgagcatcttggactacaggcgcagctaccaagcccggctaatgttttatttatttgtatttatttatttacttatttatttttctgtagagacagggtctcgctatgttgcccaagctggaggaagtggaattcctgagagcagcagagatcgagcttggggttacggtttgctgcgtctgagcaaaaggacctgcgagaacaggccgagcgcagtggctcacgcctgtaattccagcactttgggaggccgaggcgggcagatcacctgagttccagaccagcctggccaacatggtgaaaccccgtctctactaaaaaatacaaaaattagccgggcgtggtgtcgtgcacctgatattccagctgctccggaggctgaggcaagagaatcgctggaacccaggaggcggaggttgcagtgagcagagatggcagcactgcactccaccctgggcgacagagctagactccatcttaaaaaaaaaaaaaaaaaaaaaggacctgcgagaacaaagtgttttctggtgaggttgtgttttaagtcaacagagtgtgtgtaacagcagtaggttccttgcccaatgcacatagcaagtctatatgcagagacaccaggttgcagcagagaaagaggtctaatcatagggccacctaaggaggagacaggaagaagcctcacatccatctctgctaggaatttgggaatttggggttagagtttgtaagggtaatggagttgactgattggtgggagagtgctggtgaaatcgtggtacaaggagatgaagaaactacattctcatgctcatcccattcctctgtggggggtcttcaaactggttgaactcaactgtttcaccggaactcgtggtctgaaaaacatcttaagcgatccttaaacaaaagccttatgattctaatgtcagagatcctgtctacaggaacaacagggatgcaaatcaattcttagtc

SEQ ID NO: 587188 - DNA, 4001 bp, Homo sapiens
gagtttcaccgtgttagccaggatggtctcgatctcctgacctcatgatccgcccgtcttggccacccaaagtgctgggattacaggcgtaagccaccacgtccggatggccttgttatttttacaatgtgatttcaaccaaattcctctacagttttattgtacctcacccatatttttttgttgttgttgttgttgttggttttgtttttgagacggagtttcgctcttgttgcccaggctggagtgcaatggcacgatctcggctcacttcaacctctgcctcctgggttcaagcgattctcttgcctcagcctccccagtagctgagattacaggcatgcaccaccatgccaggctaattttgtatttttggtagagacgggctttctccatgttggtcaggctggtctcgaactcccgacctcaggtgatccgcccgcctcagcctcccaaagtgctgggattactggcgtgagccaccacgcccggccacccatgtgttttccacctataaaattcccatttatgaccacatttacaattagcattaaactgctacagtggaaaggaaaatcaagaaaacgatttttccttgcctatcccaaataatacattagccaataaactgttaccacattttctataaattcaatgtacaaagaagagctaccacaaactttcccagaacagagaggaatattccaggagattcccaatcacttaaagaggagagaaaaaaagaaagcctggctgtagaaacaaagcttggagaaatcagaaaagaatctgtacctgccaaaggagggtggggaaaaggagtgggaagcaaaagggaagaatcaaatgcaaataaggagcattacattcctaagattataaaatttcattgggggcacaagaaaaacttgcacacttaagcaagttatacttaactgaatgtaacagggtttcttggattaagcctcaggatacgcctttcaaactctaaaaccggtgctcaaattttcaatactacattacaatactacagcatttacggtaaattcgatttacgctaaccacccaattcattttaagttttctgtcctttcctagagggagcggtctccaatttctctcagttccagctttccttctcctttttctcatctgcttaacactgatgtgcttctctgaaactaccttcagcaggagagcacgggccccagagagaccccgaggttcagagccccgacactgaaggcagggacagcgttgttgatctgagcctacaacaggccgagaaacagatctttcccacccggattctttctcccaaaccaacttttatttatgtattaaacagacggggtctggctgttgcccaggctggagggcagtggctattcacaggcgcgatcccactaacgatcagcactggggttttgccctgctcggtttccgagctgggccggttccccctccctggggaacctggtggtccccgctcccgagaggtcaccacacagatgcagaactcagaggcaccgcgcgacggacctagcgcatatacagcgcagagctcccgggctcaagcgctgctcccgcctcagccttccgagtggccggggccacagacgcgcgcggccaagcccggccagaccagcttttccccaggtcaattccagaacagcacacgcagcaagactgcaccttctccagcccagcccggagctcagtccgtgggccactgccaacccccaggcccaggccccggccgccccactccctggacgcggaccccaatccagctgcgacagggacccgagtttcgacagagcctgcatcctccaccggcccttcttaccgaagccggctcggccatggcggttccgcacgaaccggccctgcctggcacggcctcccctccgctccgccccaacccaactcccaggtacagccctgctggcccccaaaggcagagccggccgggcgcggtgcatgctgggactcggcgctcggaagcggaagccgctccgccccatagcgccccctgcgggcgggaggagcggcgccgccagagggagtcggtcctcagaggaggggcccgggcaccctccgtgcgggccgcagcacgccggtctttgagggacccttggactcccggatctgcatgcgagggatgcggtcgaagacgagatgagggagctgacgggaggggaaacggaggggcaggtgaacatggagagagcaggaacagggagagagtagggacagcgactgggagacgcgctccacagaaacccggactgagaggcagcgagagggtgagagtccggtgctgttccttccaaagctgcccccaagtcagggatgagctcgagggtttcgtttgtgagggggtcccgggaatccagcgaggccgggtaggtggtggggggcgcgcggtggcccggggtgtccgtcccgccgggggcgcggaggccgtgtgggccccgggcatgtcccgtcggggacgcggaggaggggtccgcccaccacgtccggtccccgtgggtgcagcgcccttctgggctccccgagcgtccacactccctccttggcagagaaaggcctcgggcagagaccccatgcggaagccaccccggcctcggggccgcctgcggggactcagggtcgcccagggatgcgggccgggcacccctagcccccggcgggagactgtgacagagcgggagaagacggaggaggccatgacacagggcgtgagaaacacgaagacgcaaaaacgggagaggtgggaagacgcagaaggggaaaccagggagagacagaaaggagagagagggcaaggaagggggtggcgactgtccccagaaaatcaacctcgcattctgtcctagtcatgttttaggtgtcaggctaaagtaacaaatgaaaagtgtgtagttagaaaggatgtccatgagaaagtagtccctgcataggctgaggagcgtgtgcacatctgtatttgtcccggaatcgtgaaatgtagatgcaccttactgattaaagggttaaaaaaaaaaaaccttacattaaaactaacgtttcggatgggcgcggtgcctcacgcctgtaatcccagcactttgggaggcggaggcgggcggatcacgaggtcaggagagcgagaccatcctggctaacggcgaaaccccgtctctactaaaaatacaaaaaaaaaaaaaaaaaaaatagccgagcgttgtggcgggcgcctgtagtcccagctcctagggaggctgagtcgggagagtggcgtgaacccgggaggcggagcttgcagtgagccgagatcgcgccactgcactccagcctgggcgacagagggagactccatctcaaaaaaaccaaaaacaaacaaacaaaaaaactaacgtttctttgggtgtaaagttctatgaattttcacatatgtatgtatacgtgtagtaaccactgtaaccaggatacggaagagccctgtcccaccctgaaactccttgtgctgccattctcttctgtgcttcatttgctttatggtcactccctccgacacctggatccttggcaaggactgatctgctcttgaaacctagttttctctttttagaaatggtatataaatggaatcatacagtatgatataaccttttgtgactggctcctcaaaagcgtaatgcttttgtgattcatccatgtttacgaagagtcaaactgtaaaatatttagaagtttattctgagccaaatatgagtgaggaaggccaaggtactgtctgaagaggtcctaagaacatgtatccaaggtggttgggttacagcttgattttacacgttttgggaagacttaagacatcagtcaatacatgtaaagtgtacactggttctgtcaggaaaggcgggacaactccaagcggtgcttacaggtcacaggcggattcagcgattttctgattggcaattggctatctgaagaccaggttcatagaaagg

SEQ ID NO: 587189 - DNA, 4001 bp, Homo sapiens
aatttgggaaactgggtttagaaagccaagccaagagatctttgaaggtggcccaagaaggccttgaaacgatttctgtcagctctggaaaccagccgcgccaccccctcacctggcaggtctgtcaccgccaaccccggcccatcagcaccgcaactccacgccccagcgtccttgcctgggaaagtgcaggcaagattcgattctctggggagaggcttgagggtgggagcccagggtggggagtgggaaacttcatctcccaggtcctccagctgtcactgcccgagctggtgaaataggagccagcccaggggcgggagtgagtgtcactttaggggtactgcttggggaggtcctcgagaggatcctcttgtagctagaaaatgatcgcctcttcctaaacccctaccacaaaaccacctctcacccgtgccgggctgcccaaggcccggacaccgcccctgctgccccttccctgctccgccttccgcggctcccccgcccctcccccagcagactcccctcccccatctccccggcagccttccctctgccccgcccctcccgctccctctgccttccgccctctctcccctgcgaatcgggccggcgcctcggctccgcccccggccccgcccctcaggctccgcccgcccgagcccggcagggccaacccctcgaggccccgtccgggtcggccctccgctgccaccgcctcccctgaccctacgctccgggccgcctcggcggcagcgctcccctccccctctcagactccaggctgcctttccctaccctcccggttctcccccgctccatctccctccccggctgcacaccctctcccttcctttccccctcctcttttccttcctcgccaacccccgccctcctcctctcagctcttttccccaacccagttctcctctcccctccctcctctcctcccccaccccggtttcccttccttctcctttcctcgcctcacctcggttcccttcccctccccctttccagccctcccccacgtctccccaccgccctccccctcccccctcccttctgcagctctccttcccctccgaggcccccgcctcccttccccctctgtctccccagcaggctccagcttcgcttccctccccgtccccagtccccagaaccgctcttcccctcccccctcccaggctgcttcccagctcccgggtcctccggcccccaagcctgggggtctagggctgacccgctctctcgggaccttcccgcgggccctgccctccccactccgtctcccctccgaacacccctccgcgcctctcttctccgccgcggcgccccctccctatttctgctcccctcggacttctcacccctcccaagttttcctcccgacgggaccctcagctccacctccctgccccgccgccctcccaagcagctccgatcgccgacttcattccaggtcccggccccctccccagctccggggctcacctgtcagcgccctcctctcccgcccctaccgagtggcccggtccccagcgcccgcttcttcctccccttccccctcggccccctcccacactccctctctcctcccctcggggcccgtcgtcccccttcccacctgcctcccgcccgaccccctcccagcccccgcccttccctccagcccccccggtctcctctacccccacagccctcaccctgcccgcgccggccttgccctcccttccccccagcccccgacctccccggacccgcgcccctcccccacgcccgccgtccgcgcccctacccccggggctgtcacctgcgcggagccggccgtgacccaaccgcggcgctgagggagacgcgggcggggccgcctgcagaggagcctccccggcccttacctggctggccggccgctccgcccgcgccgcggggacccaggcgcccgggcctcctgccccgccggctctgctcacaatggcgctcgccgcctgcagctcgggtgctgacggcctgaaagactgacagactgacagccccgaaacttcgcggggaggagagggatagacgcgcggggagtcgaagccgggaaacggcgcctgcaagggaggagggaccgagggagcgggcggagagccccggcgcaccgggctgggggaggcaggggcagggggtttcaggagtggggtcccaggagggagcaccgtgggcttaggtgggcaggtgatggtcctaaggctccgagcctggagtaggtgtggaagtgggagctcaggacgggggaggggaggggaggggaggggagggtgatgggagagggggtggaggagggcgaggaggctggggaggacaggcactcgggctgcggggaagggtgccaagggagggtgctcgcggccgcggagggaggagccggggaaaggtggagcgcgaacgggtgggggggtggcggggaggagttgggggaacgaggaggggccgtgtcgggggggagccagcgagtcgtgcgctgccgtctctaagtcgccggtgccagccgggtgtgcagcgccgcgctcccgcgggaggacggcccggggggtcggtctgggaaactccggccccgcccccattctccacccggattccaccccgatccacccagacccgcagcccctcgcctggagtcccgaggacccgattcgaaaccagccgcgggagccgtgggggcaggcgggagagagggctgggcccctgtgcttgcgagaacgggtccttcgaagtagaaactggggagaggactttaagccaggtcccctgggagaaggccgggccaggtcgggagctccagggggcaaggctgggacggggctgggcggagattctgagggcggggtccgggggagggtctgggagggggctgcagagaggggagggctctatgggcgggagacgattgctggggggcctgctggcccggacaccacctggagttagatgtggagggcagccctcagccctcagccctcagccccagctcctcaggggactccactcgccctccctgcccaggttacgaggtttctccttggccttgttcccgctgcgcccactcctgaaagctccggagatgctgaagtctggactgttagttcccggtctcctctccatgaactttctccaaacccctgggttccagcttcctcccttctgcccctttacgggaaagggtgactgcaactcgggtctcttcccaatcccagtgctgcctgatcagccccggtttgaatccagagctgagtgaggctgggaaggggagggtgtgaatggcccttgagctcctgctaccacagcccaccacaaggatgagtgcctggaagagcgcccatcactcgggctcagctgtgaaggctcctctgcctccaggatgaagggagcacctggagtagcatgtgtcactgtgcgtgctggggtgtggccgagcacctgtgccggtgttgtgagacttacagtgagagtgtgcatgtgtgtaaaacaggaaaggggggtgtctgggtgtgcgtgtggctctttctgaggactccagagcaggagttgatcccagtcatccgtgaccccctgagagactcactctgggcccttttttggccctgggaccaatggtgaacccaggagaaggagagcccggcccagctctggttaacagcagcccccttcctcccctaggtggaatgactctacaggatactcggagggatatcaggtttaggagaccgaggggtgtggagtcggagccaggctgcattccagcccgggtgtccgggtgtgctcagagctctgctgggaccagggtggaccccggattcccctgtggagcctgtcactgcccctcccagccggattctcggattatttcatccggcttagctctgccccagggctgggggagctggctcccccgcccactccttccagagggtcctctcattcctcagcataggctccccagttctagaccccag

SEQ ID NO: 587190 - DNA, 4001 bp, Homo sapiens
actgcgagatatctttaggaccatcacctatgttatgtgactctttttttgccttgaatctgtttgcaggaggaatggttacatatcactaggcccatcacctagatggtgtgaccgtcttctacctggaacgtgtttacagggtggattgtgacatattgcttttcctagcacccaggagatgtgacttttattgacaggaccctgcccatagtaaaaatattgacatattgctggcccagcacctagttgatgtgattctccctcctagtctctgcccacaggtgggatggtcacacattaggcccagctcacaggtataatgaagactcacatatgtgaacccagccagtagaagacattttaactcttctagctaggcttagaaaaacaggcaatgatctgggtcttctacatgtagaaagatcacacaatatatcacactcatgtatattctataaagtctttgagtgataaaaagagtgttaaaacagagtccagcaccgaggtaaaattgtgaatcttataggcacacttagttgacaattaaaattgtcttcctcacacattgacaaaacttattggtgaagtcttgactctcatatgaggacacgatacacagttagaatattgaccatccaatgtggatctgtccaaaggtcagatggtgagtcatagctggactcagcctacaggcgcagcgatgactcttatacccggacccagccagtaggagaggtattgactttcatagctgggcttaggccaaaaaatacagttctgggttttctactttaagaaaaatcacaggtgattaccacacacatgcatgttgtgtaaagccctcagatggtacagagagtgtcataataagacccagcacaacactgaggttgtgactattggatgcacactcagctgactgttaaaattgtcacctttatatagggagagagcaaaatagttcctgaatctcactgacagatacagtccacagttggatcatgtcggtcacatgtggattgagccacaggagggatgttgaccaatttctgtaaccagatcacaggaacaaaaatgactctcctacctggaaccaaaaataggagagatgttgactctcatgcttgggcttagggcaatgggcatgatcctacatttgggattgttaacaaatgcctgggcaagcacaaatgtctcaaagcagattgtgaatctcacatgtgccatataaaaccctcaggtggtacagacagtgtcataacagggagcagcaaacaggtgagattgtgactctcatatgcacacctggctaacagtatgaattgtcaccctcccacctgaacacagcctccttacaacgtcctcaatctcacactcagaggcagtcaaagttggaattatgactctcatatgtgaacgcagtccacaggtagcatggtgattcccacaccaagattcagcagccctgtgaggctgtggctctgctactgggacactgtaagtggggttcaggctctcatgcacacagccagtccactgttgaggttgtgagtcaaatacttaaccatatctcgcaagatatgttgactgtcataagtgaagccaggacatttgtggggttttaaatcttatctttaaacctttctgcaggtgtaattgtgacatatacattttcccagcctctgattaattttactctgttgcttgggcccagtgtacagttgagattgtcacatatacctgggccatgcagtatattcagttcctcttctgcatgagagctgtcctcaggggaaattgtaatgtatctctggaccaatcatcaaaggaagtgactctccttttctgcctgggtcctgcccttagttgggattgtgacatatcacaagacctttaacccaaatgatataactcttttttctgggttctaattacagaaggcattgtgaaatatctctaggcccatcacctacgtgatgtgactcttctttcctgcctgaaccctgcccccaagagacattgtgacatatcactgggtccagcttccaggtaatgtaacagtcctgccttggccctgcccacaaggggcattgtgacatattgctgagcccagtacctaggtgatatgactctcctgaattgcccctgcactcaggggagacttttgaccctgcccaaagtggcaattgtgacatatctttggccagcacccaggagatccaaactttgttcctggtctctctccacagttggaattgggaactacacatgggcacagcttacaggtggaatgatgactcacacctgaagatattttgacctttgtagtcttagggcaaaaactaaggtcctgtgtcttcaacttgtaggatggtcacggaatattacaacttgcatgcacgttgaatgaagccctcaaatgctacaaagagtgccaaaatagagcccagctaaaactgtggtaaaactgtggctgttgtatgcaaactcaaataaaagtaaggattatcagccttccacattaacagaacccactgttgaggttctgaatcgctcaccaagaggcaatcaagttggaattgtgactctcatgcatcaatccaatcgacagatgagatgataacaccaagtccaggatttagaacacctgggggctgtgcttcccctatcaaaacacagtctgttggtgagatttgggctctcgtgcattgatttagtccactgttgtgactgacttgcatagttgaactcaaacccacaagaggtgttgactcttatacctttagcaggaaaatgtcccggattgtgaatttctgctattgaccgggtccaggtatgagtttcattgctgtttctgtgagctgggttaaaaaatgagtcactatctcacctgtagctgcatctatatatgacagtcacaattccaagtctggattgcatttgagtgtgagatttaggacctcaccagtgagaactgtctatgtgtgagggtgacaattctatcagatggatgtgcatatgagagtcacaatctcaccttcgttctgggtcctgttatgacactgtatcatttgagggctttatacaatatgccttgatatcataatacactatgacctttatttaagtaggagacccaggaccttatctgttgccctaagcctagatatcagagtcaaaatctgttctcttagctggatccaggtatgagagtcatcatctcacctgtgagctgtgaccatgtatatgtcgcaatttcacctgtcatcaggaagcagacatgagagtcctatcacctgggtgctgggtaagtgatatgccacaattcttacttgggcagggtccaggcaacagaggagagacacatcacctatatgactggcccagcaatgagtgaaaatcctctttcagtgcagggcctattcaggagagtcatatcacctagctgcttggccaagcaatatatcacaatgccccctttgcacagggccaagacaggacagttacatcaccagggagctgggtccagctacgtgtcacaattccttttgtggaaagtgtccaggcagaaaagcagagtcacatcacctaggcccagagagacgccacaatgccatttgtgggctgggccctgggagaagaataacatcacccagtgctgggcccagcaatatgttgtgatcccaactagaaaaaggttccagacaagagaggagaatcacatcatcatgttgataagccaagagatatttacaatcccccctgtgcacatgtcccaggcagaagacttgaattacctttttacttagaccagtaatgtcacagtgcttcttcagggcagggcacaaacaagacaggacagtcacatcattaagtactaggcttagtgatatgtcgtaacttcacctgtgggcagggtccaggcaggagaagatttacttcacctaggtgctcagtaaagagatacattacaatacctttcagggaagtagccaggc

SEQ ID NO: 587191 - DNA, 4001 bp, Homo sapiens
tttcattcctccctctagggaccatgttcttattccagttcttggcctctctcaaaccaggcccaggagccccctcgggagcccctccgcactcccactctcccagacggaagtgctttctctgccttacccccagtgagtccctgttccatgtcggtgtcctgcacaaactgaggctctggggacagacactcagactgggtctccaaagactgaaactggacccttggtgaccctgctgcttcctgggctggtatttcctccatcactgctctggaggacaatgaccatcactgcaaggtaagattaagagaaattactgtaataagttaaagcatttcatcattttatatcgtcaggactttgcaaaggatcttacacactatggatattcaataaaaattagttgataatgattaaccaccctaaataagtaacagaaaaatggggccaggcgcagtggcctgtaatcccagcactttgggaggctgaggcgggaagatcacttgaggtcaggagttcaagaccagcctgatcaacatggtgcaacttcttctctactaaaaatacaaaaattagccagcgtggtggtgcgggtctgtaatcccagctattcgggaggctgaggcaggagaattgcttgaatacagaaggcatacgtggcagtgagccaagattgcaccactgcactccaacctgggcaacacagtgagactccgtcccaaaaaaaaaaaaaagaaaaaaaagaaaaagaaatatggatatgcttcagctttaaatacttaagaaccaaatcatagaagagtctctaatttggaatttgtggcattaaaaaaattaacacggtacaatttaatagtgtaaagctttctgtggaaactttaaaatatttaaaattggccacgtgcggtggctcaagcctgtaatcccaacagtttgggaggcacagacgggtggatcccttaagctcaggagttccagaccgtcctggacaacatggtgaaaccccgtccctacaaaaaaaaaaaaaaaaaaaaaaattaggtggcccaggcctgtagttccagctactccaaaggccaaggcaggagaatcgcttgagcttgggaggtagaggctgcagtgagctatgactgcgccactgcattccagcctgtatgacagcgtgacagcccacctcaaataaacaaaacaaaatatttaaaatttacaatcgtctttggaggctcaagttggtgcccagagaaaaatgctagttatgattgctcattttattttaattttgttttagcagagatgggagtctcgctatgttgcccaggctggactcgaacgcctggcctcaagcgatcctcccacttcggcctcccaaagtgcggggattacggcgtgaaccaccgtgacaggcccgcgtttacgtaaataaactcatttaaataaataaaacagcaggccccctaggaaatgtcttggtaacaccgtcagcccactccgatttactacacgggcttggcgaataaaactccacttttggggtcaggcccttcgctaactcagaccagctagaccggccttttcccggaatcctgagagcaacgcaggtaagagctgcggttcgaacaggtttgagcggcgtccttcaggcccaaggacgcatgagggtgccgtccccctcccaccaccctcgccctgggcccctgcccggctcccagctcggtcctcagaaggccttgcccggcgctgccctcctcccacttcccttttaggccaaggcaaagtcccaaaaggaccagtgaggacatacagaccagctcgcaccagggcacggtcgccggctcctgacggcggggccctcggtccgcgaggtgaatgaaccagggctgaagagaaacaggccctcctcgcacccgggcctccgcgcactctcggggaagcgaactaccgtcggccgcggccggacgccgcctccttctactcccgtgaaggcaaaacaagctgccaccccgctgcgaccccaaaacggcttccgggtactcaccgaggggaggggcgggcctggccgctgtcctgtcacctacacactcgcgctcggggccaccacagcctctcccgggccgctgtagacagccccgaggccggcgcttctcggtggcacttccggcgacggagtgcagggtcccgaatgagggccccccctcctccgcccaggcatgagggtcccggatgtgggtgagagccccggatgagggtcccggatgtgagtgagggccccggatgtgagtgacggccccggatgaggaactcggaggaggagctgggcccgcgcgtccatgattcgaaggctcgttttcgcagcttttccacgtctttttccggtcccactgccctccatgctaactcactgggcgtctctagccgttataccaacaatgactgcgaccagtgttgggaaagcgccccctgggcccctccctgacgccagcccatccttgagactccctgcaaggaggcggcccgacccagtgggtgcgtgtcgtggggtgaggaggaatggccgacctaatggtcccgcttccgtgagtagcacaggggtgcctgctcagagtgtagtacaacgctgacaagtagaaggcgaggattgcggggcctgggtgagatgggacccactaagttgtgggatcgaaatctcagtaggtccttggggaaagcggggacgggaggggagatgagcagattggaatagaaccgagagagacggaggaaactgacagttgcgtccctggtgggaagactaaaatctatgcagaaacagggataggcaaaagcattgtgcacaagcgggacaggcagagcgccgggacagaaacccttaggacattctgacaccttgctgaacctggatccttacagaatatgtcttgtaggtgaagctagatctgcaaggcataggcaagcctcttagagaatcagaaaagtgatttggaaggaacttcagctgttactactttgtttaagcaaatcaaatgctgttctttaatgttactggacgtttcaaattaaacacaagaaaacctgaagtgtggcattttatatattttttcaaaatgtatcagcttcttggagattctgatattcctttcctctctttatccctaagtatcatttatccaacctaaattcatactaggacacaatctctctagtctgcagtgcccgtcacagtggagtcaggatcggagaaagaaaatgcactgcttagtccatttcatgctggacagctccaattagaaacttttccttgtgttgaacagaaatacacccctggtgatgtctatctattgttcctgttgacaggtccccaggacaatagatgacacagtacttcttcctcttcataacggccattttaatatcctaggagagctaaaggtttggagttcttcctgagttgccatttccccacctagaacccttcacaggttgtacctattagcaatgtgatgggaaaccatttcagcagcaaaggtgagtgagctatggcagtgaggcacatcgcgtccaagttttagctgactcaggcaattggctccagtgagaggaccacaaaaggtacccacttaaagaggccacttcccaccagtactcatcaaaacataacaaagtgttaagaaacagcagctgctattttgcttttgagcaaaattttcttttaacagtttgccagatgacagaggtggaaacaactcaaaaaattgttaccttttttcgtttttgtctttttgttgttgttgagacagagtcttgctctgtcgcccaggctggagtgcagtggcgcgatctcagctcactgcaacctccagctcccaggttcaagcattttccctgcctcagcctccagagtagatgggattacaggtgggcaccaccacacctagctaatttttgtatttttagtagagatggggtttcaccatgttggccaggctggtctcaaactcctg

SEQ ID NO: 587192 - DNA, 4001 bp, Homo sapiens
tagttgataatgattaaccaccctaaataagtaacagaaaaatggggccaggcgcagtggcctgtaatcccagcactttgggaggctgaggcgggaagatcacttgaggtcaggagttcaagaccagcctgatcaacatggtgcaacttcttctctactaaaaatacaaaaattagccagcgtggtggtgcgggtctgtaatcccagctattcgggaggctgaggcaggagaattgcttgaatacagaaggcatacgtggcagtgagccaagattgcaccactgcactccaacctgggcaacacagtgagactccgtcccaaaaaaaaaaaaaagaaaaaaaagaaaaagaaatatggatatgcttcagctttaaatacttaagaaccaaatcatagaagagtctctaatttggaatttgtggcattaaaaaaattaacacggtacaatttaatagtgtaaagctttctgtggaaactttaaaatatttaaaattggccacgtgcggtggctcaagcctgtaatcccaacagtttgggaggcacagacgggtggatcccttaagctcaggagttccagaccgtcctggacaacatggtgaaaccccgtccctacaaaaaaaaaaaaaaaaaaaaaaattaggtggcccaggcctgtagttccagctactccaaaggccaaggcaggagaatcgcttgagcttgggaggtagaggctgcagtgagctatgactgcgccactgcattccagcctgtatgacagcgtgacagcccacctcaaataaacaaaacaaaatatttaaaatttacaatcgtctttggaggctcaagttggtgcccagagaaaaatgctagttatgattgctcattttattttaattttgttttagcagagatgggagtctcgctatgttgcccaggctggactcgaacgcctggcctcaagcgatcctcccacttcggcctcccaaagtgcggggattacggcgtgaaccaccgtgacaggcccgcgtttacgtaaataaactcatttaaataaataaaacagcaggccccctaggaaatgtcttggtaacaccgtcagcccactccgatttactacacgggcttggcgaataaaactccacttttggggtcaggcccttcgctaactcagaccagctagaccggccttttcccggaatcctgagagcaacgcaggtaagagctgcggttcgaacaggtttgagcggcgtccttcaggcccaaggacgcatgagggtgccgtccccctcccaccaccctcgccctgggcccctgcccggctcccagctcggtcctcagaaggccttgcccggcgctgccctcctcccacttcccttttaggccaaggcaaagtcccaaaaggaccagtgaggacatacagaccagctcgcaccagggcacggtcgccggctcctgacggcggggccctcggtccgcgaggtgaatgaaccagggctgaagagaaacaggccctcctcgcacccgggcctccgcgcactctcggggaagcgaactaccgtcggccgcggccggacgccgcctccttctactcccgtgaaggcaaaacaagctgccaccccgctgcgaccccaaaacggcttccgggtactcaccgaggggaggggcgggcctggccgctgtcctgtcacctacacactcgcgctcggggccaccacagcctctcccgggccgctgtagacagccccgaggccggcgcttctcggtggcacttccggcgacggagtgcagggtcccgaatgagggccccccctcctccgcccaggcatgagggtcccggatgtgggtgagagccccggatgagggtcccggatgtgagtgagggccccggatgtgagtgacggccccggatgaggaactcggaggaggagctgggcccgcgcgtccatgattcgaaggctcgttttcgcagcttttccacgtctttttccggtcccactgccctccatgctaactcactgggcgtctctagccgttataccaacaatgactgcgaccagtgttgggaaagcgccccctgggcccctccctgacgccagcccatccttgagactccctgcaaggaggcggcccgacccagtgggtgcgtgtcgtggggtgaggaggaatggccgacctaatggtcccgcttccgtgagtagcacaggggtgcctgctcagagtgtagtacaacgctgacaagtagaaggcgaggattgcggggcctgggtgagatgggacccactaagttgtgggatcgaaatctcagtaggtccttggggaaagcggggacgggaggggagatgagcagattggaatagaaccgagagagacggaggaaactgacagttgcgtccctggtgggaagactaaaatctatgcagaaacagggataggcaaaagcattgtgcacaagcgggacaggcagagcgccgggacagaaacccttaggacattctgacaccttgctgaacctggatccttacagaatatgtcttgtaggtgaagctagatctgcaaggcataggcaagcctcttagagaatcagaaaagtgatttggaaggaacttcagctgttactactttgtttaagcaaatcaaatgctgttctttaatgttactggacgtttcaaattaaacacaagaaaacctgaagtgtggcattttatatattttttcaaaatgtatcagcttcttggagattctgatattcctttcctctctttatccctaagtatcatttatccaacctaaattcatactaggacacaatctctctagtctgcagtgcccgtcacagtggagtcaggatcggagaaagaaaatgcactgcttagtccatttcatgctggacagctccaattagaaacttttccttgtgttgaacagaaatacacccctggtgatgtctatctattgttcctgttgacaggtccccaggacaatagatgacacagtacttcttcctcttcataacggccattttaatatcctaggagagctaaaggtttggagttcttcctgagttgccatttccccacctagaacccttcacaggttgtacctattagcaatgtgatgggaaaccatttcagcagcaaaggtgagtgagctatggcagtgaggcacatcgcgtccaagttttagctgactcaggcaattggctccagtgagaggaccacaaaaggtacccacttaaagaggccacttcccaccagtactcatcaaaacataacaaagtgttaagaaacagcagctgctattttgcttttgagcaaaattttcttttaacagtttgccagatgacagaggtggaaacaactcaaaaaattgttaccttttttcgtttttgtctttttgttgttgttgagacagagtcttgctctgtcgcccaggctggagtgcagtggcgcgatctcagctcactgcaacctccagctcccaggttcaagcattttccctgcctcagcctccagagtagatgggattacaggtgggcaccaccacacctagctaatttttgtatttttagtagagatggggtttcaccatgttggccaggctggtctcaaactcctgacctcgggtgatccgcccgtcttggcctcccaaagtgctgggattacaggcgtgagccactgcaccgagcctgttttgttttttttagtgcaaattaacaaactgattctaaagtttatatagaaatgctaaggatttaggattgccaaaacaattttgaaaaagaataaaattggaatacttgtatttttttaagatttttttcctaaaggtacagtaatcaggatggtatggtatcagcatagagacaaatagatcaacagagcagaacagaaagtccagaaatatgaggttgaatttcttaaagaaaaaaaagtccagaaatagatctagatacatacaatagctgattttttataaattactaaggtaattctgcatctagctaagctgaaaattaggc

SEQ ID NO: 587193 - DNA, 4001 bp, Homo sapiens
tgcaagctccgcttcccgggttcacgccattctcctgcctcagcctccccagtagctgggactacaggcgcccgccaccgcgcccggctaattttttgtatttttagtagagacggggtttcaccttgttagccaggatggtctcgatctcctgacctcatgatccacccgcctcggcctcccaaagtgctgggattacaggcgtgagccaccgcgcccggcctcttggcccttttcttaggggaaatttggacatatctctgggtatatcacctgggttatgttaccatctttttctgcctgagtgtggcccacaggggaaatcatagtatatttttagacccatcacctaggtgatgttactcttcccttctgcctgggtcctgcttccagtaagaattgtaacatatcgctggatcctgcacccaaatgatgttaccctcctgcctgggccatgccgacagtgggaattgtgacatttctgggcccaacatttaagcgatgtgactatcctcttatgttcgcagcatgtgttgtaacatatcactaagcccagaactcaggtgatgtggctttcctgccatggcactgcacacaaggagaatgctgacatatccctggccctgaattcagatgatatgactgttttacctgatccacactctgaagtgaaattgttacatatacccaggcccagttagcagacatgatgatgactctcatacatagacccagcaaatacaacagattttttactcccctggctagatttagggacacaggtaagggtctgcatttccttataaaaggtcacaggaaatatgacataaatattttataaagtccatgagttttatgagctgtgtcataatgcagtccaacaagcaggagagattgtgactctcataggcacatccagccaacaatgggattatcactcttaaacctagacacagcccactggtgaggttataaatctcacatatggatgcagaccacagttggaatcgtgactgtcgtatgtggatgtggccacaggtcaaaggggaagtcatttcttgactaactcacaggcacagtgttgtctcttatacttggaccaagctaatagaagagacgttgtctcactgttacgcttgggaaaatggggatggttctgggttttctaactgtacaaaggtcacaaaaaaatcacaacactcatgcgtacagtataatgccctattatactgtacgcaactttgtattgggctgtgttgacactctctgtaatactgtaatacctgaccacaggtaagattctgactcatttctgggcccagctcacaaacatggtgatgactctcatacctggacccaggcaagagaaaatgtgttaacttctgcctgggcttagggtaacgggtaagatcttggatccataaaaacataaagttctcagagcagaattccactctcaagcatgttgtgtgaagatctcaaatggtacaaagagtgtcataacagagccaaaaacatagaggaaattgtgaatctcctatgcatacctagccaacaataaggatggtcactctcccatatggacacagctcactgttgaggttctgaatctcatgcccagaggcaatgaaaagttgaaagtttgactcacatacatgcatctgatcaacaggtaggatagtgactctgagaccaagattcagcaccctggtgaggctgtgcctatcttatgaggactctgtttgcaggtggagatggagctctcgtgcacggatcctgtccagtgttaagactgtgtctcgtgtatttggatgcaactcaccagaagtgtagactctcagacctaaagctgggaaatacgtagaattgtgaaatttattcctggtccttcccgcaggtgtgattgtggcgtatactttcacacagcacctaatttattttactaatttgcttgggcccagccaacagttgggaatgtgacatatacctggatcaagtacctaggtgatataactctccagcccaggccttaccacagggtacattgtgacatatctttggacttatcacctatgtgatgtgactctactgacttgccttgtcttggcctccattggggattgtggcatatttctgtgcccagtacctaagttatgtgactcttctttcctgcttgtgcatttagaagggattgtgacatattgctgggccaagaacctaggtgatgtgactctcctgccttggccctgccttcaggaaaaattgtgacatgactctgggtttattacctaggtgatatgacttccatttcctgtgtgggcaaggccaaaggggtcactgtgacatacctctggacacctcacagaagtggtataacttttctctcattccaggaccctggtctcagtagaaattgtgaaatctctctgggcccataacctaggtaatgtgactctcctgtcctgcctggaccctgcttacaggcaagttcatgacatttggctgggtccatcacctaggtaatgtgactctgcttttcttcctgtgccctgccaccagtgaagattttgacaaatttctgggccaatcagctgtgtgatatgactctgtgctctttcctgggccctgttaacagggagcattgtgacattgccaggctcagcagctaggtaatgtgatttttcttgctctctgggccctacttacagaagggattgtgacatactgctgagccaagaactcagatgatgtgactctcctgcctgtgccctgcctacagtgggcattgtgacatatcactggatctagcacccaggtgatgtgattctcctgttttgttcttgccggcaggtgaaattgtggcatatacctgggcccagctcacaaccacaatgatgactctcttacctggacacagacagtgggagatattttgacttttgtagccaggcttaggccataggtaatgtcctgggtctcctacttgtataaagttcacagaacattacaacactcaggactatcataggaagccctagagtgatagaggtgataacaaggcctagctaacagctgagattgtgactcttgtatgcagacccagccgacagactcttcctcattcttacagataaacagagcctacgaatgaggcacttaatctcacacataaaaacagttgcaagttggatttattactctcatatgtggatctggtttccaggtggtttggtgactctcgaaccatgattcggcagacctgtgaggctgtgagttccctattggaacacaatctgcaggtgagattggggctgttgtgcatgcattttgtgcattgttgagactgtatctcctttacttgaaccccactcacaagaggggttgcctctcatacatgaagccaggactcgtgtgaaactgtgaaactcatttctgtacattcccaagtgtgtgattgggaaatatacctttgcccagaacctgagtgatctgactgtttcctaggcccagcccacagataaaattgtgacatatacatggaccacccacctaagtaatgtgaaactccttcctgggccctgcctgccaagggcatttttacatttcatagcaaccagcatcaacccaggtcctgtgactcccctgcctgctccctgcctacaaaaagcattgtgacttatttctgggttcattacacaggtgatgtgacttctactgccttggctctgcacttagagtgcactgtgacatttagctgggtactgcacccacgtaatgtgactctcctgactgagttcttcctacaggaagcattggaacatatcacttagcccagcacctaggtgatgtgattctcctcttgcctagttcctgcccactggagagattgtgacccattgctgagcctggcagcaaggtgatgtcactctcctgccttggctgtgcccatgggggccactgtgaaacctgtctaggctaattacttaggtgaagtgattccc

SEQ ID NO: 587194 - DNA, 4001 bp, Homo sapiens
aggaaacggaagctgagttgggtgaagacaatcttaatgtctcaaggtgtcagcctttccaaggaagagtgcaccaggagatttctctcagctccagggcatccacctgctccctcgagaggctacactttgtacctcaggcagtcctgtgggagaaaatgacccaggagctgatattcattaggcactctagcagacatagtcatggtgggtatcatggtttattcccagacagtactgaaacccaggaccaggaaaaatctgaagggtagccgaggacacatcaccccataaagtttccaaagggaaactgtgaccccccaaaattctgataagatctctgtgcctatggaagataaaaggaaaagaggcgcagagattttttacaatagtgtccagggattactctttgctttcttcttacagaaaatttttacaaacggaaaacaaatcttttaaaaagtaccatccaatgatttctcaaaaaatgattaattaaaatatagtatcaaaaatgtacactagggccgggcgcggtggctgacgcctgtaatcccagcactttgggaggccgaggcgggtggattacgaggtcaggagatcaagaccatcctggctaacttggtgaaaccctgtccctactaaaaatacaaaaaaattagccaggcgtggtggcgggcgcctgtagtcccagctactcaggaggctgaggcaggagaatggcgtcaacccaggaggcggagcttgcagtgagccgagatcgcgccactgcactccagcctgggcgacagagcaagactccgtctcaaaaaaaaaaaaaatttacattaggcacagtggctcacgcctgtaatcccagcactttgagaggccgaggcgggcagatcacaaggtcaggagttcaagaccagcctgtccaacatggtgaaacccgtctctactaaaaatacaaaaattagccgggcatggtggcgggcgcctgtaatcccagctactcgggaggctgagacaggagaatcacttgaacccgggaggcagaggttgtagtgagccgagatcgtgccactgcacttcagcctgggcgacagagcgagactccgtttcaaaaaaaaaaaaaaaaaaatctaactcaaatacattgttttttgtaaagtattacattgggggaaataaaattcttgcttaaccaactataaactgccaagtaccctccgattacataaccagaaaatttccactttgatcttacaaattaagaagttatgtaactgtacctaaccgattattgaatttggttttattcatcatacaccacttaaaagtctttccttcaagcccctcccatggaccacaaattacaaatcatagctgggtgctctacgatttttgaaccactcttctattacatttttaaatatatttgcagtgacttccatgaatttttaatagaaaaaaggagggactgggaccccatggaccaaagcgcttcccatttatgaaccctgcaccccgagttatcggcagagatgcggcactgcgggtgcagagctgcccagcgagggctccaggccaaggcacagtcactgcgcagggaggagacatgacgcccggggtccggctgtcagcccagccgccatcttatggctgaaggggactgaggaccgagctgcgccaaggacaactcgggccgcggattttggagcccagtgcttggagcctggagtcctgccacagccacttccgaccggttccaaccagcccctccccctctctcggggtgtcggaccgcactctcaccatttctaggcttccaggtggtcctggcatcttagctgtgcatctcccaatacctgcagataacggagtcacagaggctgggcctctaggagcagaatacacagagcagtaaagactagacctggagctcccgcagcagctagagacaaaggccccgccaaatcccggaagccgtcctgtccgctccagctgcgtgcctgattggacgggtcccagccccgcgtccctgattggataatgtttagggcgccaccccctaatgccctgagtgacagaatatgtgctcagcggctgggctgaacgtagaaagagtgaaatccaagctgcagggttctcagggaagggcttcctccctgaacggaccaggctcacaccagagagtatttgcatataaccctgcgtataaggtcgtatgcctttataaataatatattatgtggctattcacacatgaaaataatgcaataacaattatttaaaattttccaattttatgagctcctggcttcttgtcctttgagcgggtagcctgacatttttttttaaaaaggcagtcctctgaaattgaatgtgagccacgtgaattctaaattttctagaaggaaaattttaaaaagaaaaaaaaacaggaggaattcattgtagaaatttaattaacccaatatatccaaaatattatcattttaatatgtgaccagtatgtaattattaacaaagtatatatattttggaaaaaaaattaaaactatgtattttacctttctaccacatcgcagttcagaccagccacattccatgcacccagtagccacaggtggccaatagctgccacattgaagtgcagctctgatggcagaagatgaaatcctgaacatcccttttcttttttcttttcttttcttcctttctttttatttcctttctcttctcttcttttctttcttttcctttctcttctcttcttttcttttcaaacagagtcttgctcttatgtccaggctggagtgcagtggtgcaatctcggctcactgcaatctccacattccggattcaagcaattctcctgccttattttccccagagtagctgtgattacaggcatgtgccaccatgcctggcttatttttgtatttttagtagaaatggaattttgccatgtcagccaggctggactcaaacccctgaccttaagtaatccttctgtctcatcctcccaaagtgctgggattacagccatgagccaccacactgggcttgaacatccttttcctgccataaataaggggaaagtctttccctaccaacatctctcttcagttccaagggtagaacagatagtggccatagaaagagcagaggacagcaggaataaaataacaacaggaagaccacctgttgcccacctttcttccagagatcagacagtgaacaaaggacgatggggccacagaagaagaatgctctatgtctacagatccctccctggtctttctttttctttttttcttttttgagacagagttttgctcttgtcacccaggctggagtgcaatggcgtgatctcaactcactgcaacctctacctcccgggttcaagtgattctagtgcctcagcctcccgaatagctgggattacaggcatgtgccaccaaacctggctaattttgtatttttagtagagatggggtttctccatgttggtcagggttgtctcaaactcccaacctcaggtgatctgcccaccttggcctcccaaagtgctgggattacaggcatgagccaccacgctcggaaaacatttttatcttctaaacaaaactcaatacccctgaaacaactgcccaatttcctattatttatctttttcaaaatatcattttggtttctgtttctagctatctcatgtaagtggattcggacagtatctgttttttgtgattgtatactttatttatgttattaagattcacctcattttttaatgttacatttcctgattttgaaaagttgagtttaatatcttcacttatatcttattgtacacaggagaatttatactggagagaaaccctcaatcagttgttgacactttcttcaactttaggaaatttgtattttagacagaccctatgaataatataataaatagagaaaaaccatttgttctaagaagtataccttagaaaacaccagagtgttcacat

SEQ ID NO: 587195 - DNA, 4001 bp, Homo sapiens
cttccctcatccctacagtctcaatcagacttctcccttctcccagcacctgttgtatttgttgtcttttgcattcacagcagcatccaacattatgcatttctgaatattagttgtgtgatgtggattttaacaagccccccacgctgtgtgtggtggctcacacctgcaatcccagcacttcggcagggagaggtgggaggatggcttgagcccaggagtttgagaacagcttgggcaacatagtgaaaccttgtctctacaaaaaacaaaaaacaaaccaaaaaaatccccttcaatgagtttattggctacataaggataatgattatcacatataattggaatgatagaaatcctatctgaagcaattgagaccggtatctgatgtgttaagcaaaaaagatggctaaactagcgatccataaaagagatcttaaatattttattttaatttaaaatatataaatgtgcattcattttctcatctttggaaataaagctaagcctctttttttttttttttttgagatggagtctcgctctgttgcccaggctggagtgcagtggcacgatcttggcttactgcaacctctgcctaccaggttcaagtggttctcctgccttagcctcccgagtagctgggactacaggaacctgccaccacgcctggctaatttttgtatttttagtagagacagggtttcaccatattagtcaagctggtcttggaactcctgaccttgtgatctgcccacctcagcctcccaaagtgctgggattacaggcatgagcccctgcactcagccagctaagccttttctatgagtgattttaaagaatgggtgctcatacctataatgcaacagtttctgtttcatgaagcagtttcacaagtcaattacacaagcaactgacacgtggcaaatatttgtggaggaatcctgagagttttatgatttttcttcagtgaggtagtattgctaacacctaatttgatagcaatttttaaaaagtgacagcatttatcaactccttccaaagcattcgactagttttcatagaaacaactcttgttgcattcatactcaccagtttacataataccgaatcagattatagaatcgtaacagacttaggccgggcgtggtggctcacacctgtaatcccagcactttgggaggctgaggtgggtgcatcacgaggacagaagatcgagaccatcctggctaactcagtgaaagctcatctctactaaaaatacaaaaaattggccgggcgtggtggtgggcacctgtagtctcagctactcgggaggctgaggcaggagaatcacttgaacccaggaggcggaggttgcagtgaaccgagatcgtgccactgcactccagcctgggcaacagagcgagactttgtctcaaaaaaaaaaaaaaaaaaaaaaaaggaatcaaaacagatttaaacaggttttggaagagatacaacagatgcttgggaaacattaatttgtgatagatgttaccctcaggcattcttattaatcccattagctccaagcagtcctaggggcctcggcatcagtcactgtgtttacacagagaatgcaagcattgtttaaattttactgagctatttaaggacgattaaaagacagtccattgttttgttttcttcacagcgtccagaacaggcaggaatccatgaaattgagtctggtgaaaatgctggaaggagggaagagctagaaagagctacataggtgaatggaaaacatgctgtggagagtatatcatctgtcacatgaatctcctgggctctggatttttgtgactcagcacttctgagaaatgaaaaagtaaaagtgcccacattctgagaacactggcatttcagaggagaggaaaactgaacttacctgagatctcaccatctgtgagccatcattcatttcttcctcctccatgttcccctcctgagaaaaaacagcattctgagaaggcataactaggaaaaagagaagcatcttgttaatatatgacacgaaggttaaatttaaatcctggagattctgctttgtgtaggtatggcagacagtactgagaagccctctaagacataagcctaaaggttgtgacgtctctactcttctatgatgttcaggagttcgggaattcaatgcagaactgtctgtcttcgggggtgcaactccccttgttgtggcataggggagctcaggggctttcagccctggctaaatactgatggcaatttaaaaagaagccagtgttcagcccctacactcagagatttggatttaattgatctggcatgggtctgagcaacagcattttaaattgtaaagtctccaagtgactctaagtgtagatgagaactactgggatgaggcgatggagagcacatgggtgagggtccattcttactctttatccccacaaggaatgaattcaccccaaagtgaatactccagagatctgcctctcctctcccctaaggtgatccttccaatatgcaaaggagatgtcactattctgatttttccaagtgtttaccttcctttttgagtctctcgattcagtcttccactgggattacacctctctgcagttcttatgttgtaatgtcgccaaagctctgctatcttctacatgaaagtcagcagatgcaccaggaccagcagcttaaggagctggggctgctcttgaaagttgatgtccagtaccttatgggcaacagtcactcccctggtactaaaggtgccccatctctgattagagcctcaggagccaatggatagccacaagaataatttctgcttccaggggcggccactctcagaatcttgccttgtttatgccgagttgagatgaaggggctcttgaaggttgttattacctttttttttcctccctaaaagcatcatttcttcatgtacagacttcactatagtattcaaatctgcatcctggcaaggatcttgtaagatagaattttaggttgaagacctgtaatgagatgcaccagggtcagcagaagaaatccagcagtctcagccacctaggggcttacagagtctgtaaggagacatacaaactattcttcacacagacagagcacagtaaggtgtggcattcttgaatcaaaaagcacttttagaatttctcagattcacacattacaaaaggcagaggtgtacatgtgtcaataacaacaaattcagcctcagtccttttcttaccttttccagaacagagaacacatgctctctgcctcgagaaacaatgactgttttctttagaaagatggaaaaacacatgtttcaacaacaaagtaagattgtattattatttgctaataatcatgaaggaatacatctttttctgttcacaaaggttgacctgagaaatctattttaaaatgtgagtgatggaaataaagaaagaagccattctgaggagcaattttttaaaagagaaaactgcagttccagtgaaatggtcctgtgagataaggcagccattccaagcatggcaggaatctaacatttcaaaagtccttcattaacagtcagacctttcaggagtgatttaaaaacactttaagaaataggttcttcattccctaagcataagcttggaagaagccccacagtcaggagaagcagacgggtttttccccaagatgggcaactagagatggcagagccagttgtctgcagaaagaaccaaggttacaggtgagaatgaccgtggctggaggggaaggctgagggaagagtactggaacctgtcacagaacccatgggtagaagctggggcgcagtggagccaggcacggtggctcatgcctgtaatcccagcactttgggaggctgaggcaggcagatcacgtgaggccaggagtttgagaccagctagggcaacatgatgaggccctgtctctacaaaaaatacaaaaattagctgggtgtggtggcttgtgcc

SEQ ID NO: 587196 - DNA, 4001 bp, Homo sapiens
ttgacatttgggaatgtcacaaaaactgaaaatttaatattttattgcaagccagagttagtctgtgagaacagaatggttgacttaagaccctgcttaagacacagctgaggaagggcatggtggctcattcctgtaatcccagcactttgggaggccaagatggccagatcacctgaggtcaggaatttgagaccagcctggccaaaatggtgaaaccccatctctattaaaaatacaaaaattagccatgtatggtggtgtaggcctgtaatcccagctacctgggaggctgaggcaggagaatcacttgaacccaggaggtggaggttgtagtgaggcaagatcacgccactgcattccagcctgggccacagagtgagactccatctcaaaaaaaaaaaaaagaaagaaagagttgaaaaacgcaggctgggtgtgatagcctattcctgtaatcccagcactttgagagacaaaggtgggcagatcacttgaggccaggagtttgagaccagcctggccagcatggcaacactctatctctactaaaaatacaaaaattagccaggcatggtggcgggtgcatgtaatcccagctactcaggaggctgaggcaggcgaatcacttgaacccaggaggcggaagttgcagtgagctgagatcacaccactgaactccagcttgggcaacattgcgaggctctatctcaaaaaaaaaaaaaaaaaaaaaaaatccaagggaaaaccaatttcctgtggggtgtaaaaatatttaaacagcagccaattagactgaggtggattgattcttctcggctctcacttaaaaaaaaaaatctatctcaaatgtatctcttacagctgggcacggggggatcacgactgtaatcccagcactttcggaggccaaggcaggcggatcacttcaggtcaggatttcaagagcaccctggccaacatggtgaaaccacgtctctactaaaaaacaaaagccgggcgtggtggtggcagtctgtaatcccagctactccgcagcctgaggcgggagaatcgcctgaacccgggagggcggttgcattgagctgagatcgtgccattgcactccagcctgggcaacagagcgagactccctctcaaaaaaaaaaaaatgcatttcttggaaattactttcttgaagaaaaatattcaggcctagtcaaccacagactgccaattaatctctgatgacataaccaagccattttcacctggatcttacaaacaaggaaactacctaactgtaccaaaccaattatttaatcgggtttgcttcatcatgaaacttataacaaactttccttcaagtctctcccatggatcacaacccacaaaccatagctgggcgctctaagattcttgaatcacactttgattcaattctctgatatttttacagcgactccccatacatctctaaaagaaaaaatgaggaactagggaccccagggaacacagctctttccactcacgaatcctgcaccctaagtctggattcttccctgatgactttcccatccctgcacagtctgggtgagatgaggcgctgggagtgtagagctgcccagagagggctccagtccagggcaaagccactgcagaggaaaaagacagaactcccagggtcccagccgctggcccaggcagcatcttaacgctcgaggggactaagagccgagctgggacaaggaggatttgggtcctcagactccggagctgactgcgaggaagtttgggtcctgctacagccactttcagtcagttccaaccagcccccacccctctctcacggtgacagacccagcactcaccatttctcggcttccagggggtcccggtcttttagccataaatctgcgaatacttgcaggacacaaggccacagaggcttggcctccaggagcagaggacgcagagcagtgaagagaaggactggagctctgggcgcagagaagcaaaaagaacccgtaaccttacggaagcgtcctgttctctcccgctgcattcctgattggacagtttctatttcacggcccctgattggataaggtttgaggccccacccttcatgccctgagtgacggaaaatttgatcagacactgggctgaataaagcaaaagtaacaggttaggctgcagcctttacagccaaggcttcttccctgatctgagccaggccaaccccagaggatacttgcatttaaccttgtgtataatgtcatatgcatttataaatgatatataatatagttattcataaattgaaaaaatataaagaattattttacaatttcagattttatgaccttccttgctgcggatcctttgcagtgatatggtttggctctgtagctccacccaaatctcatctcaaattttaattcctggccgggcgcggtggctcacgactgtaatcccagcacttagggaggccgagcggggaaggcgaaggcgggagaggggagggcggggggcggggagggatcacttgaagtcaggagttcgagaccagcctggccaacatggtgaaaccccgtctctactaaaaatacaaaaattagccagggtggtggcgggcgcctatagggtcagctactcgggaagctaaggcagaaaaatcacttgaacccaggaggcggaggttgcagtgagccgagatcgcgccattgcactccagcctgggcgacagcagggagattctgtctcaaaaaaaaaaaaaaaaaaaaattgtaattcccacatgtcagggcaggcaccgggtgggaggtgactggatcttagagagggattatcctcatgctattcttgtgatagtaagggagctctcaagatatccgatggattaaaactgtggcacatccccctaccctccccatccccagttctctctctttttctacccagtaagatgtgccttgctttcccttcaccttccgtcatggtcatgattgtaattttcctgaggattcctcagccatgtagaactatgacttaattaaaccactttttaaaaacattacgtggtctgaggtatttgtttatagcagtgtgaaaatgacctaatccatgaaggcagcctgagatttcacgaaggaggcagtcctctgcagtaaaatgtgaaccacaagtaaattttgaattttctattaggcaaatattaaaaagtaaaaagaaaaaggtggggccgggcacagtggctcacacatgtaattccagcattttgagaggctgaggcagcagaaaacctgaggtcaggagttcgagaccagcctgtctaacatggcgaaatcctgtctctactaaaagtacaaaaattagccaggcatggtgacaggcacttgtaatctcagctactctggaggctgatgcaggagaatcgcttgaacctgggaggcagaggttgcagtgggccaagattgcaccactgcactccagcctggtgacagagtgactctgtctccaaataaaaaagaaagaaacagatggaataatggtagaattgattgtaacaatttaatcagcccaatatatcaaaaatattactattttaatatgtgattagtatgtaatggttaataaagcgtatacatttttgaagctaaatctttcaatgtaaccttgtattttacctttccagcacattgcagttcagaccaaccacattccagcaccctgtggccatgtcagaggtgtttgaaccagagcaaatgcatctggaataggtgttaggtaaaatggggctgagacctacaggactgcttttccatgaagtcaggcattctaagtcacaggataaataggagattggtgcaacatacagttcacaaagaccttgctgataaaacagtttgcagtaaagaagccacagaaatccaccaaaaccaagatgtgaataaaagtgacctctgattgtcctcacaaatcattacatgctaattacaatgcattagcacactaaagac

SEQ ID NO: 587197 - DNA, 4001 bp, Homo sapiens
atgagaggagatgcgcagagcgtcaggtgattactctctgctttcctgttatgtgaaatgttcacgaacagacgaaattaaaaagagccacctactgctctcttaaacaaaaataaacaattaaaatgccacgtccgttttgaaattaaataaaggactaatagttgataatgtgatctggacagggatagtcggcattggggaatgtgggaaagaaattggaaatgtagaattttctacagtccctataacagttaggctgggagaagttttggatttgagaccctgcttgccaaacatttgaaaattgcagacaaaaccaaggaccctgtagagcattaaaataactaaatagctggcaattaggctgaaatggccatgatgctctgggattctgcctaaggaaacctaactacgtcgaaagaatttcttacaaattactaactttgagaaaaaaaaaaaaaacacaaaacttaggcttaaccaaccacaagctgccaataaagctctaagtacataaccaggacatttccaccggatgggtgcaaatgcaatacataactgtaaccaatcaaatactgaatctggtttgcttcctcatacctcttacaaaagccttttgttccaagtctctcctttgagcccccaaaccatagttggatattctctgattcataaattgctgtttgtgcaaataaactgtttgtattaatcggttctggcattactataaatgcctcagactgggtaatttataagaaagaggattaactggctcatggttccacaggctgtacagaaagcataacaccagcatctgcttctgggggggccccacccaggaagcttaaaatcctggtgcaaggtgaagcaggagcttgaaaagaaggcaagggggttgctatacacttttaaataagaacttcagggaactcagtcactatcgagaggtcaataccaagaggaatggtgctaaactattcatgagaaattcacgcccataatccaaacactttccaccaggccccacctccaacatggggtattacatttaaataggagagttgggctggaaaacacttcgaaactatatcctaaagatgcctcaatttaggctacgacagtggctcatgcatgtaatcccggcactttaggaggcccgaggggggcggatcacctgagctccggagttcgagaccaggctgagcaacattgcaaaaacccgtctctaccaaacaaacaaaaaacaaaaccacaaaaccaggcgaggtggcggcgcatgtctccctagtcctagctacttggggagctggggtgggaggatcatctgagcccaggaggtggaggctgcagtgagccgaaatcttgccactgcactttagcctgggcacagagtgagacactgtctccaaaataaataaataaaataagccacaatttttaaaaggagaaaggagggactggggaccccaaggcccactgcttcttccacggaggaactccagaccctgaatgaggattctcgtcttatgacgtccccgcacaatctggaggagactcgggattgcgacacagagctgcccaaaaagtctctgggctggaaagaaattcgcgtttatggacaaaacaagacgctcgggttttggctgcaggctcagctcctaatctgcgacggagggaagtgaggactgaactgtgcccacggggactcggagctgctgcagagctgaccgcgaggccaagatcccaccgcagccagttccgaccggattcaaacagcctcttcccccttctcgggacacccactccgcgcactcaccatttcccagcctccggatgttccgccttcttccctatggatctcccagtacctgcaggtcacaggataacaggggctatggtggagtcaccgaggagctaatggagcggaagagatggaatagtacagacgggtactggactcagagcctagaagctaggagacgaaggccttgccatattgaagagcccgcctcttcctctctagctgcgcacctgattgggcagttttcacgctagcaccactgattggctggggttctccgccccacacatttagaccctgatcgacaggagatgtaatgagacactgggctgaatgaggaaagagtgacaggtttttgcctgcagcatgttcaggcagcgatttctccttgtgttgggggcctggccctgcctgagggacatttgtatttaacgttgtatataagattatatcactttctgattatatttacgtgtgtgtatatcaatttctgaattatagttatgtgtatgctgcaggccctgtctcagcatcctgtctttccctttagttgcaggagatcaaagtcctccaggagatgcagctgcaccagctggctgcagacaattatcaccttcagtctgtgaagcaattttgggtctgcttccaattaatggagtgtctcagtgagactgagaggtgagggcctagcagattggttagtgccactcacccagacctcccaaaacaccctgtttctttcccaccaaagctgagcctgcctgaggacctaaacaagcatggagaacgaagatgggaccctagtcagggatagtgctgggctgtggggtaaagtcagctgggtcagtgcctccaggtgtgggaaggagccggcctcttctctagggccctgggcaagtcactgccctctttgggcctctgttttcttatccaaaaaatgtagggatgatgagactgagaggggctaatgatgagcttcaaaggagaaaagaactttgagagtgcttgtgcctggctcttcctgagatgatgagaacaatggtgacagctacatataactgagtcctcacaaggcccagtgaggtaggtggttcccatcacactttcaagttgagaaaacagtctcagggaggcctggctgcatgcccaaggttccacatacagggagtgttggagcagggagtcaatctagaatcagaacttactggagatgacaggagcattggaccagcttactcacaccagttatccaggataccaggtcagtgtaactgggcataactgggtgaagggagcatagtatcactgaccttttctttgactctggcagatgaagacatccacgttggccaccctggagacgaaaccacagagaggccagatgaggctaaagcagcaaaaaggcagtgtccctgtgatggggaggagctccagggagtcagagggaagagctcctccctcacagccggaggcctccacatcaaaagagcaaggggcctttctcccgtagcccttccctcctgtggcaacagtccctgaaatgcctctataagacaaatctgagtaaaagcctggaagagctggatttgggaaatagtgggggcagggaccacataacattgtgacttgtaaaaatctcaccacagagttaacatgggaacatgggggttcatgtttttggaggccagctaggaggaggggagagagttggggagaggcagctgagtgtctttggctttttcaagtggaagatgtagataggagggtccaggagacaggggattatgagacttcaggggacaggccttgaatggacacccaaaattggatactcatccccatcaccacccgatggcacagggtgttgcctccatcctgggcacattttccagttatctggtgatgggagaccctgccagaaaggattatatggatgggagtgagcctgggatgggcagggctggaaccaggatcctgaggcttgggaaaagagaatccaggactacacccttagatctcagcacttggcaaacctcctctcatgagagcctcacggctgcctctgtgagctgaggcatcaggcccctcttccctatgaatgttgaagattccacatcagccgtcagtccctgttcccagagtggtgaagctgcagagctgcctgcttgcaaagctcagtgaggtttggcctgagctg

SEQ ID NO: 587198 - DNA, 4001 bp, Homo sapiens
gagaaattgaatgcttatacgctgctggtgagagtataaatttgtttaaccattgagaaaaacagtttggcattttttcaaaaacctgaaaacagaattaccattcccagtaccacaattgggaatacacccaataaatgtaagttattctaccatgaagacacatgcacgcatatgtttattacagaaaatgattcacaatagcaaaaaccagaaataaacctgtatgtcttcagtggtagactggataaagaaaatgtgttacataaacaccatgaaatatgatgcggctataagaaagaacaacatcatgtcctttgcagcaacatcgatggagctggagatttatttttagaaaactagtgcaggagcagaaaatcaaaaactgtatgttgtcacttgtaagtgggagtgaaataatgagaatacatggatgcaaataagagaacaacagacactgaggctcagttcagggtggagggtcagaagacgaagaaaatcagaaaacaaatctgttgagtactatgcttagtacgtgagtgataatataatctgtacacaaaaacttcatgatatgattttacctatataacaaacttgcacatgtactcctgaacctaaaataaaaggtaaaagaaaaaaaacttgactgagtgtggtggctcatgcctataacccaagcctgttgggaggctgaggcaggcagatcacctgaggtcaaaagttcgagaccaacctggccaacgtggtgaaatcccgtctctactaaaaatacaaaaattagttgggcgtggtggcctacacctgtaattccagctactcgggaggctgaggcaggacaatcatttgaaccaggaggcagaggttgtaaagaggtgagattgcaccactgcactccagcctggaggacagagtgagactccctctccaaaaaaaaaaaaaaaaaaaaaaaaaaaaaacatttattggagattactatcttgaagaaaatattcgggcctaggcaaccacaatctgccaatgaatctctgatgacataaccaataaattttcacctggatcttccaagtaaaaacactaaataactgtaccaaaccaattattgcatttggtttgcttcatcatgcaacttataacagacttttcttcaagtctctcccatggatcacaacccacaagccatagctgggcgctctatggttcttctttttttttttgaggtggagtcttgctttgtcgcccaggctggagtacaatggcgcgatctcggctcactgcaacctccgcctcccgggttcaggtgattctcctgtctcagactaccgagtagctgggactacaggcacgtgccaccacacccagctaatttttgtatttttagtagagatggggttttaccatgttggtcatgctggtctcgaacacctgacctcgtgatccgcccgcctcggcctcccaaagtgctgggattacaggcgtgagccaccgcgcctggcccgctctatgattcttgaatcacgttttgattaaattctctaatatttttacagtgactcccacacatctctaaaaggaaaaatgaggaactagggaccccagggaccacagctcttaccacttatgaatcctgcaccctgtgtcaggattctcccctgataactttcccaatccctgtacaatctggatgagatgaggcgctgggagtgcagagctgcccagagagggctccagcccagggcaaagccactgcagaggaaaaagacagaactcccagggtcccagccgctggcccaggcaccatcttagggctggagggggctaacagccgaactgggccaaggaggatttgggtcctcagactccggagctgactgcgaggaagtatgggtcctgctgcagccactttcagccggttccaaccacctcccacccctctctcacgatgacagacccagcactcaccatttctcggcttccagggggtcccggtcttttagccataaatctgcggatacctgcaggacacaaggccacagtggcttgacctctaagagcagaggacgcagagcagtgaagagaagaactggagctctggacgcagagaaacacaaaaggcccggtaaaattacggaggcgtcctgttctctccagctgcatgcctgattatacagtttctaatatatggcccctgatgggataaggtttcaggccccacccttcacgccctgagtgacggaatatttgatcagacgctaggctgaatgaagcaaaaataacagcctaagctgcaccctttacaggcagggcttcttccctgatctgagccaggccaacaccagaggatatttgcatttaaccttgtgtataacgtcatatgcatttataaatgatatataatatagttattcacaaattgaaataatataatgacaattattttaaaatttcggattttatgaccttccttgctgcggatcctttgcagtgatatggtttgactccgtggctccacccaaatctaatctcaaattgtaattcccgtccgtgcgcggtggctcacgcctgtaatcccaacactttgggaggccgagacaggcggatcacgagttccggagttccaaaccagcctggccaatacggtgaaaccccgtctctactaaaaatacaaaaattagccgggcgtggcagcgcgtgcctgtagtcccagctactcggtagcctgaggcaggagaatcgcttgaacccaggaggtggtggttgcagtgagccgacatggcaccattgcactacagcctgggcgacagagcgagactccgtctcaaagaaaaaaaaaattgtaattcccatgtgtcacggtagggactgtgtaagaggtgattggatcattggggtggattatcctcatcctgttcttgggataataagggagctctcaagatacccgatggtttaaaaatgtggcacatctcccctccccaccttcccggttctctctcgttttccaccgtgtgagatgtgccttgctttcccttcaccttctgtcatggtcatgattgtaattttcttgaggatttttcagccctgaaggactatgattcaattaaaccacttaaaaaaattacgcagtgtgaggtatttgtttatagcagtgtgaaaatggactaatacatgcaggcagcctgagatttcaaaaaggaggcaatcctctgcagtaaaatatgagccacatgtaaattttggattttctagtagccaaatgttaaaaagtaaaaagaaaaaggtggggctgggtacagtggctcacacctgtaatcccagcactttgagaggcctaggtggtgaacgacctgaggtcaggagttcgagaccagcctggctgacaaggcgaaaccccggctccaccaaaaatagaaaaattagctgggtgtggtgacaggcacttgcaatcccagctactagggaggctgagacaggagaattgtttgatcccgggaggcagagaatgcagggagctgagatcatgccacagcactccagcctagagacggagcgactctgtctcaaaataaaaaagaaagaaacaggtggaataacaggtggaattgactgtaacaatttaatcagcccaacatatccaaaatattattattttactatgtgattagtatgtaatggttaataaagcatatacatttttgaagctaaatctttgaatgtactcttgtattttacctttccagcacattgcagttcagaccagccatattccagcactctgtggccatatcagaggcgtttgaaccagagcaactgcatctggaataggtgctgggtaaaatggggctgagacctacaggactgcttttccatgaggtcaggcattctaaatcacagggtaaataggagattggcacaagatgcagttcacaaagaccttgctgataaaacagtttgcagtaaagaagccaaaaaatccaccaaatccaagatgggagtgaaag

SEQ ID NO: 587199 - DNA, 4001 bp, Homo sapiens
gccacatccgttttaaaattaaataaagaactgatagttcataatgtgatttggagagggatagttggcatttgggaatgtgggaaagaaattggaaatttagaattttatacagtccctagaacagttaggctgggagaacagttttagatttgagaccctgcttgccaaacatttgaaaaatgcagagaaaaccaacgaccctgtggagcattaaaataattaaatagctagcaattaggctgaagtggccatggtgccctgggattctgcctaaggaaacctaactacgtcgaaggaatttctggtaaattattaactttgagaaacaacaacaacaacaacaaaacaacttaggcttaaccaaccacaagctgccaataaaaagctctaattacataaccaggacatttccaccggagggctgcaaatgcaatacgtaactgtaaccaatcaaatattgaatctggtttgcttcctcatacctcttaaaaaaaaaaaacaaccttttgttccaagaccctcctttgagcccccaaacaacaaatcatagctgggtgttctctgattgataaattactgtttgtgcaagtaaactatttgtattaatcgcttctggcattactataaatacctcagactgggtaatttataagaggattaattggctcatggttccacaggctgcatagaaagcataacaccagcgtctgcttctggggaggccccacccagaaagcttaaaatcatggatgaaggtgaagcaagagcttgaaaaagaggcaaggtggggtgctgtacacttctaaatgatgaacttcagggaactcactcactattgagaggacaataccaagaggaatggtgctaaactattcgtgagaaatccgggcccacaatccttccaccaggccccacctccaacatgggggattacatttaaataggagatttgggctggaaaacacatccaaattatatcctaaagttgcctcaatttaggctagggtggtgggtcatgcacgtaatcccggcactttaggaggcccgaggcgggcggatcacctgagacctgagctcggggagttcgagaccagcctgagcaacatggcaaaagcctgtctctacaaaaacaaacaaaacaaaataggcgtggtggcgcacccctctagtcctagctacttggggggctggggtgagaggatcatctgagcccagtaggtggaggctgcagtgaaccgaaatgcactttagcctgggcaacagagtgagacactgtctcaaaaataaataaatttaaaaaagggccatgattttatttttaaaaggagaaaggagggactagggaccccacggcccactgcttcttccacggaggaactccagaccctaaatgagaattcccgtcttatgacactcccaacacccccacacaatctggaggagggagactcgaggttgcggcacagagctgcccaggaagggatctgagctggggagaaattcgagtttagggacaaaacaagacgtagcgttttggctgctggctcagcccctaatctgcgatggagggaaatgaggattgagctgtgcccgcggggactcggggatgcagactccagagcagaccgcgagaaggcccagataccaccgcagccggttccggccggattcaaacagcctcttccccattctcgggacacccactccacgcactcaccatttcccagcctccagatgttccgccgtcctccctatggatctcccagtacctgcaggtcacaggataacagaagctatagtagagtcaccgaggaactccaggaacggaggagatggaacagtggagacgcgaactaggatcagagcccggaagctaggagacaaaggccccgccatattgaagaggccgcctcttcctctgtagctgcgcacttgattggacagtttcacgctggcgccactgattggctagggctccaggccccacccgtttcaatcctaagtgacagaagatgtaatcagacactgggctgaatgaggcaagggtgacaggtttttgcctgcagcgttttcaggcgagtcctccctgtgctgggggcctggccctgcctgagagacatttgtatttaaccttgcatataagattatatcactttctgattatattttcgtgtgtgtgtatatattacattctgaattatagttatgtgtatgctgcaggccctgtctcagcatcctgtctttccctttagctgcaggagatcaaagtcctccaggagatgcagctgcttcagctggctgtagacaattatcaccttcagtctgtgaagcaattttgggtctgcttccaattaatggagtgtctcagtgagactgagaggtgagggcctagcagattggttagaggtgccactcgcccaggcctcccaaaacaccctgtctctttcccaccaaagctgagcctgcctgaggacctaaacaagcatggagaaccaagatgggaccctagtcagggatagtgctgggctgtggggtaaagtcagctaggtcagggcctccaggtgtggggaggagccggcctcttctgtagagccctgggcaagtcactgccctctttgggcctctgttttcttatctaaaaaatgtagggatgatgagcctcacagggtaatgaggagcttcaaaggagaaaaatttgagagtgcttgtgcctggctcttcctgagagagatgatgatgagaacaatggtgacggctacatataactgagtcctcacgaggcccagtgaggtaggtgtggttcccatcacactttcaagttgagaaacagtctcagggaggcctggctgcatgcccaaggttccacacacagtgagtgttgcagcagggagtgaatctagaatcagagtttactggaggtggcaggagcactggaccagcttgactcacaccagttatccagggtaccaggtcaatgtaactgggcataactgggtgaagggagcataatatcactgaccttgtccttgaccctggcagaggaagacacccaagttggccaccctagagaagaaaccacagaaagcccagatgaggctaaagcagcaaaaaggcaggtacctgtgatggggaagagctccagggattcagagggaagagctcctccctcccagctggaggcctccacatcaaaagagcaaggggcctttctccctcagcccttccctcctgtggcaacagtccctgaaatgcctctataagagaaatcagagtaaaggcctggaagagctgggctgagtggatttgggaaacggtggagctagggaccacataacattgtgacttgttaaaatctcaccacagagttaataagggagtgcttcatgtttttggaggccagctaggaagaggggagagagttggagagaggcagctgcgtgtctttggctttttcaagtaaaagatgtggataggagagtccaggagatgggggcttatgagatttcagggacaggccttgaatggacacccaaaagtggatactcatccccatcaccacctgatagcacagggtgttgctgactttcacctccccactctctcccaatgttgccccagctgctcaccttccttttctttctgggtgttacatttccctagaagtcagccaatggtcatcagaaaggccccttggaccctgactaggtcccctccccacactcttcatactgcattactgccagggccaccaggggcaggggatgtgcacaaagcaggacttgggtctgcagcaggttctggggttcaaaggggacaatgggagctgaggctcagggacctcccaccccaactctctttgatgacagacataaaaactgagggctcccatttaaaaaagtgctcagccaggccaggcacggtggctcacacctgtaatcccagtactttgggaggctgaggatggtggatcaccaggtcaggagttcaagaccagcctg

SEQ ID NO: 587200 - DNA, 4001 bp, Homo sapiens
tggaaggaagcaggacccaaagaaggtaggactctaaggggtcttcaaggctgggagattctggacaagctgaactgtttctaggcgaaaaccccaatgcgggtgggagtcttgctctcaaggagtaggtggtcctacagcacctgggtgggccagcgtggttctgggcttgagtccaccctccacctaaggccactgttccttccctcacctctcctttctcagatcaatccctgtcacgtgatcccagacgccaagagtttactccagaagcttcctttcaactggtcaccagctccttatccactgaaatcctacccatcctccacgtgcattattatgggctttgtgtggcatgaaagggacctctgctaaactactttattaagaaaatattagtcttttactcatggacaacaaggtgcatggttttcttacagttctgatggggccaggaaaccctgtgtaaggtcttcacactatgtggtgggaggtggcgactgtgcgctgctcactccagcccagcttcttactgacaagtggctggaatatgtggggctgtccttggactcctgccaggggagctgaaactctttgcttgagaggagctgatggtaagaggagccggatccctcatccactgcccacccgcaggatgaagtccaggcatgcaaaccccttcttagtctctctctgcagactcctttcccactgcctccaaaccaaaaccatcttctccaggctcatggactcctttctgtgcctgcacacgccctgcactgtcccgtctctctgcgcctttgcccaggcactcctccctccctgaaagcaccaccggtctagctgggcctgaaatcctagccttccctaaaagcccggctcaaatcacagaggcgcagagcatcaggccaggaggggtggacagcggtaccaagaggccccctgacactccttcccccggagcccaccgcaagcttccacctgggcgccagcactcacccctttctgttttgcacgattattgcccgcgtacctgcctgcctggtccttgaacacacagccactgtgtgtcttttcacactttccagctgggtaagcctgggcaagttaagttctctaggccccgggtttttcttttgtatgacagagattaacaccagtacccatcccacaggcttgctgtgaggacagactaacgcctcaacagggcttgtggaagtgcgtggctctatattcccttccgcgccgaccccgggaagctgggcacgtagtgggagtcggtgtatgcggattcgaagccggacacctcccaggtgccaccaggccgctgcgggggagatggagagggacctacaggccgagcgccaggcagagaaaggagccgcgggtgggggggcacccagaaggaggggacagcggctggggcgggggcaggaagccccggagggcccaaagaacttggcgtggggcggcccggggcggggacaaccgttccgccagcgctcgggttcggctcggagtgggggcccggccgacgggcgcagtaggccccggcggaccccgcgccccattcgcgggagccccaggcccggtggtccggcccggaccccggaacccctccccagggcctgcggcgccgtgtgccggggccgggccgcctggggcccccaggccgcgagtccctgcgcgcgcgggtcgcccttaccggagccgcgaccgcctcggccatggccctgcgctgtcccgcccggcccggaggaagtcgtcgtcgccgccgccgcgcgcggcaccacgcaggcccggccgcccggtgctctccgcaggcggcgcctgcctggcctttcctctgccgccgctcctcgctggctgcccctgcgccgcgccgcccgcagtcgcgccgcctccgtcagcgcccggccggtccacactgcatcctgggagccggcgccgcggcccggcagacgaaggcccgtgaggcttcctggaggcagcgcggccgcacagccccacctgcagcctgagaggcgaacggcaggcgctgcgcccgcctgcccgcggccccgccccgccccgcccagccccgcccgcggggcccgacgggaggacctagcgaccccgggccgaccccgcgaccccgcgaccccgcgaccccggccggactgccgagcgcggggggagtcactgcgctggccccgcggcccagcccgaggactcggttattgaaagggtccccctcatgggacccgcctggccgcgcccgcgggcgagcacgggcttccgggcagggcgtcccccgggtgaccgcggccagggcggccccctcgccctgggatgcccggctccccttcccccgccccacgggcacttctgctgcccgaggtcctgggtctggaggtttaggctattttggggaggacagatgtaactcatgcccacctgtgtttgaaatggaataaatacttccaacaacaggaatatagttcggtaaaccccggtaggcaaccacttagcattttctgtaatgggtttattacagtaaatttttttaatggcatgagcaatgggacgcaataccatcatttaaaatgatttcggtgaaggtcttggtaggaacagatgttcatgatgttttaagagaaaaagcctgtccaggacgatcctgtctttgttttaaaaataacattttaaaacaatataggacatatgtagcgtcatatactgcgtacatgtataattacagttttgaaaagtttggaagcatatatatcaacatggcctcagtagttctattaaaggtctattcctttaatagaccacgggccgtttttatgccttttctaattttttccaattcatgtttttatttttccatgacaaggatagtatttttaaacaaggagagaaaaataaaaatttaaatgttctcaaagaggccaaccagagcaggggaaggagggcgccttggacgggcccccacgtagtttcagaggctcattgcctttcaggaacacgacttgctcatctgtgtattccccaagactaactagccaactgcctagcacacactgataagaaaatatgtgagagatctgtaatctttttcaaagaaggcagaccttacagaatagataaaatttgagctggatcttgaagaattggcaaaatattgataggcagagagcatttcagaccagagggtggtagtagaggtgtgagctggatgacagcccaaaaaaaaattgatgtaggaagatataaagcattttagggccgggcgcagtggctcacgcccgtaattctaacactttgggaggccaagatgggtggattgcctgagctcaggagtttgataccagcctgagcaacatgacaaaaccccgtctctactaaaaatagaaaaaattagcgaggcgtggtggcacgcacctgtaatcccaactactggggaggctgaggtacgagaatcgcttgaacccgggaggcagaggttgcagtgagtggagatcacaccactgggtgacagaaatacagtgcattagaaataaagagacatttttagtgtgcaatttaaaaagttcccttttgacaggctgagtcggatatgccagggtcatctctaggtagtaatttccaagcctggctctcagagcagctgcatcagtctctggggaagcttgtgaaggatatggatttctggatcccatctcatatctactgaatcaaaatgtctttgggatgggtcctgagtaatgtggagaaaacttattttaaaagaaggtctctttttaacaagttccttgtaggggttgaggtaagggtgaagctggggctctgcagacagccaagttagggtaatgatgacttgctctgtcctccactgaagacaggcatctattgcagagcatctctggtgctggttttccagcctctatttgtaaaaagaacgaagataaacctccttggattgatatatgaggcttccaaagcctttccctccattt

SEQ ID NO: 587201 - DNA, 4001 bp, Homo sapiens
gcccacctcccagaggtccccaattcaaccccagccatgatcctgaggtacctccttccaagacttccttcaccggccagaggtaaacacgcttgctggaactgtcccacccacacctcccctgcgccacacccctggccccctcctcctcacccacctcccttcagaggcgagagctgcacttacattcctcggccccaattctaatattcaggaacctgtcagggcctgcatctgagctgaaggccgaggataaacccagctgctaacaatctctgaagaggtgtcacattttaattaataaacacgtttgcatcccttgctgcattcaaaggaccttgggaaagcaaagtgagatggagcagggaccccttcaggcacctgctgtgccctccaatcatgaaaataaaggaaaatcttgagttctttccagggaaattccaggcacctagctggtcctgagaagtaaatgtgcaacctgataagaaggtaatcgtagctaaaataatagcaaggaagtcagaccacacgaaacgtgtggttgcctaaagaaactaaaggtaacatcttagcatatgtccttgagttgtttttcagaaacccagacccccaccaaatggacttgctggcacgcacacctcggataagagggaactgagaactcaactctgctcatctttccccattgcaccccgacacgccccatcctctcgtggctcttgaactcaccgtgtcctcgcaccctgtgaccaaccttggaaggcccttgctcagttctccccttcccagcccagattagggatcgctttgaccaggaagcctttttggacacaccaggcacagccaggaatcccttctctgtttaacctgtgcacctaggaccatctacatggaatcatcattgtcatcaatttgttagtctgcacaagactacatgcatcttaacacagggtccttctctctcccctgcacccagtacaggctccacacacagtaatccattaataaaaactgtcataagggaacacttaaataaaagaaatttcagtacaaaacagatttgaagcacggaagcatgaaccttcaagctgaaaggagacaactgccatctaatctcttcattttacagatgaacatgggaacagttagctgtgaagccttgggctgtcgtccgcctccaacccctggggctctgaccacacccagccccagctcagatcatcttgctcaaagggccgaaggaggacccatctccacaccttccacatgtagatatcctcaacgttcttcacagaggggatgcccgcaccccgccccaccgagttcgcggctgctgtgcccatcttcctagagaggagttctccgccacacccgacaccacacacttccaacttctgcggtgcttccctctcacttatctccacccccaatccttatccccgctcgtttaatcacacatttattggtcacctactatgtgtctgtcactctgcagcgagcattggggttcctgcccccagaaactgatctatcagggaggcgaacagggacggggaactcggaacaacgggacagcccaggagagaccgcccgcgggcgacccctctactcgccaccgcgtcctccctccattctcactagcctccctcctaacctcgctgccctggcctggcgccctccccaccctcggccgcgcccctttcccctcggctgtgtcggggcagagggaacgcttgagacccggggctcggggggcgcgcggggctcggggcaccccaggcccccgccccatccctccgccccagcccgggccgggcggaggcagcacgggaggagcggggccgggcgctggtccatccctcgcaccgcccctccccgcccaaaatgcagagggactcggagggaggcgacggggaaataaatacctttgactttgtggctaaggttaacgggaactgccaccccgagggcgacttgggcaccgggctcccggccctggccattcccggggcaggcggggcgggcacgggtgcctgattggctggcgggcctggccatccccggggccgcccagccactccattggctgcgccgctcagatgacccgcccggccctatcggagcagcccgcggggcggctcctttgttctctggagccaatagccgaggggggagggctgacctcgcccccggcgggcgcgcaaggcccgggcgccgtgagcgcgctagccgccggccgcggggaggagaccttgggaggtcgggccccagatggccggcggcgtcctggcacccctgccaggcctggactccgcgtgcgaccccgttgtaacgcctgaactcagcgcacgttcgccgagcgccacagcgcgccggacgctgtttctccctgctggggacccatcagggcccggacagaaaccccggctgaggctgtggctgccctcaagccgcgatagccccaccgtggggtgtgataacttttagggttcactacgagggaccttagaaatcattatacccgaccccttcgttttctgtttcagggaggtggtctcgctcagaccccagtggcgcgatcatggctcagtgcaacctcgaacccgtggctcaaccgaacctcccaacctgctaactttttaaatattttgtagagatgggggtctcgccatgttgcccaggctggtctcgaactcttgagcttaagtgaccctgcggcctcggcctcccaaagtgctgggattacaaacccgcgcccggcctaatccctttgttttctagctgaggaacggctctgaggttacgttactaggtcgggttactaggtagggttcccgtgagcggaatcatctccgcccagttgccaccccggtccagactgccagaccttcaggaaggagtatcttcgcaactccccaccccattgtaaggaaattcctcacacttctccctcaaagggggcgcagctgggtcaactcccactggcaggatgctctccggagctgctagaagctgcctctggggcatgaggtagatacagacagaagctgggcctctgagactctacaaacggttgctgttgggcaggcggaccttattttcttcagtcaacagctgattaaacatttgccacaggcccggctgcggtttagcctcagtagcacagcaggaactggggactgagattcgattttgtcactaacttcatgtgtactttttataaaagatacttttctgtttctggactttgacttattcgtctataaaatagggttaataattttctagttgcctgcataccttactgagtttttaccgttaatttggttatattatctatagaaggatttgtaaaatacaaaatcatacacaccctataaagaggccacacatcactagctatcaacactttggagtctcattctcctgtttatttttttaaagacggggtcttgctatgtttcccaggttaaagtacagtggctattcacaggcacaatcataacgcacttcagcctcaaactcctggcctcaagggatcctcccacctgaactacacctgagactactggcatgcaccaccacacctagcttattttctagaagagtacctagaagaggttctacgaaggcttgtggaatacattcctgttgctgagaccagtattctagttccagatttgccactggctacaagtgttgagacagagcaggaacctctcttaggggtctgccaccagccccccattcaatgcacgaaaataaagaaacatttgagtcccttcaagggaaattccaggcacctagctagccctgcaaccagcaattagggaagtgaatgaatgacctgctaagcaagaaagtagtaatagtttaaacaatagtacccaaataagagtcacaaaacgttagcttccttatagaaactgaagatgacatcttgacatatgtccttgagttgtttttcagaaattaggacccccaccggtgggggtcacttc

SEQ ID NO: 587202 - DNA, 4001 bp, Homo sapiens
cattagcagaagcatccataaccacagtatctgacttattaagaaagtcatggcatttttttgaatgacccagtatggttcacccagcattatataccattcaagggccccgaaggcctgagcccagagtaaggcatgtaaacatcttcgtttgattttattttctcatgagtttttttttgattaaagaattgggatgctttttagaaagctatatatcctgcctccttcctgtgtacacaataggaaactgaggctcaaaggcactgactcccatgcagtaatcctctcactagcacggccagggcgtctcaaagagcaggtctgcgggaggatctgagggatgattttttaagagtgtcttcctgaagaggaacatcagcccccaacccctgagaagcttactccccagacaccatctgtcagggcactcaaagtttagcctacgaccttccagacgcagaggccggaggcagaggctggagctcagagggtcacctgctcccaccgcggagatgcccagctgggcgctgcccggcctcccccgccgcccccgacgggccgcgtccgctgccagggcggcccagcccctcacccaggggcggccgccgccagagccaccccctccccgtccaggcccgcagccctctgggcaggcctttctggggctgccgcaccgtgccacggatgccttgctacgtgaccttggggccggcagggcgggtcgccgccaggtgtctgtgcctcagtgtctccgttctgcgaaatgggagagccgcgtcagcgccgcgcccgggccggggaaggctccgcggggccgagctctgcggaaaacgtgccggcggctaccccgacggacgcagcgcgggccccgcagggagcgagcgcgcctccgggcgccccacctcggggccgcgtgtgtgccgggccgggcgtgagagcagcctccctcgcacggacggcggcgaggcccgtagccctcccccaccgcccgggtcaagacgcgcgggccccctccagggcgcccccaccccccgcgccaacgtcgtagcgtttctgccccttaccgagatcccaggccgggccgccgagcccgggacacgcaggccgtccccggggccccgaggccgcgcgtccgtgcgcgcgcgggccgccctcacaggagccggggccgcctcggccatggccctgcgctgtccggcccgggcccccggagtcgccgccgctactgccgccgccgctactgcgcgcggccccacgcaggcccggccgcccggcgctctccgcaggcggcgccggcccagccctgtcttccccgccggggctcgcgcgcggccgtcgggccccggcctgctcggggcgcgcggggcgagcgggcgcggggtcgcggagcccgagcggcggcgtcggagctgggcgcgcggctgtgcgggcggcccggccggctgcgtcccggcggcgagctgggccccggccctcaacggcggcccccggcccgcgcgccgcccctctgcggccgcggctgggaccccagctccggccccggccccggctgcgagctgcgctgccgtcccggcgcctctttagcaggggagctgcacagcagctgccatgttgctacaaactgcatcctgggaggcatgtccctctcaggccgtttaaagagaaacactccgaggctcgtcggaggctgccggaacccagacagctccatctacagccggtaggagcgaacagtgtcgagcgagccgcccggcggcgacggacacgccctgagcccgggccagcccgtcgtggagcccgggccgaaccgccggggcctcccaccctccaggaccctccggcctctcacctggggtcctcgcctgcccaggcaccctcgggcgaggccgggaggcgcgcgggcggaggcgcagtcggagcgcgcagcccaggcgacgtgctggggtctggaggcggcttgattggctccgacagccttcctcccgccgatcccctgcgcctctcacacccagaacccggggtcgttccctttcaaaacctgcgctcacaaagggatctaagaaacccgtcacaccagagaaagcccggagttcatgtgaccagctcagtgcagcccgggttccagggacgcgggctgtgcttccaaggggagccagggggttgggtgcttttgtgaaatgcccgagtgttgttttcgacatgaaaggaccgaattcctagaatcagaccctgctggggctggaagtggccagacgggtcatttaggaggaaactgaggccgagtgggcagcgacttgtttaccctcagtcacagtatgaatgaatgctctttgtaaccatgagaagtcccaaaagaaatgcaggagcttagagttgagaactccccttcctggacaggtccacttaaacatgtattaattgaatacctacgaggtggcgagaactggggatgaattgaaaaggaaaaaaaaagaagaaactataggcaggcgtcctggttactagcgatgaagcccaactggaactaacttaagtgagggaagacggcgggggggagcagaggacattgtgtttacctaatggaaccccaggagtggagctggtcttggaaggcaacaggactcagtatgctggcagctcagataatggaaagttatggccagacgtggtggctcatgcctgtaatcccagcactttgggaggctgaggtgggcagatcacgaggtcaagagatcgagaccaacctggctaacgtgatgaaaccctgtctctactaaaaataccaaaattagctggacgtggtggcgcggccctgtagtcccagctacttgggaggctgaggcaggagaatctcttgaacccgggaggcagaggttgcagtgagccgagatcgccccactgcactccagcctaggggacagatcaagactccgtctcaaaaaacaaaaaaaaggaaagttacagatagaggtaaggccagagctatgcatcctgtcccctcccttcccggaggctagagttctcacccaggtctttatgcattaactaacatgtgtgcattcgtaaacaatgcacactactggttttggtatttttacattttatgtgaatgatattatccagtccctatcctgttgcaacttgcttttttccatgggtcattttgtttttgagatacagacatgtttaaacaagaatatctggttcattcattttacccacaatatagtatttcattgaatacataaactacagtttacgttccattccccctagaggaatgagaacaaacctgctgccagcgacatctgcatgcatgtctcattgtgcactgctaaagtgcgtctctagagacgcctagacatgggactctggatggcaagagcaccttcatctttccccggcttcccgaactgctcactgaagggatggtgcctacttacacacccactatcgtgtgattttctctttccccatcctggctcatacttactgataatggactcagaacgtttgccgacatgatgactgtgaaatggtagctcattattttaatttgtatttgtatttccctgattaatgaagttggacatcttttcatgtttactgacatttggtttcttcctctgtgaatttcctcttcatatcatttgccaatgtttctgttgtgagatctttttcttattggcttataggtatttcattaaaaatctattctggatcttaatcatatcaccaaacatttaatgtgattactaatacgattgcatttaaatctaccatcttactagttattttctgtgtgttccaggtgttcagtgatacctctctctctctctctctctctccccaactgcctgctttgaggttgaggtttttttttttaattctatttttatattagtattctatttcttagtaatttctatttttcaccattctcttactagttacatataattttaaatggttgtcctcagttttacaatatacatctt

SEQ ID NO: 587203 - DNA, 4001 bp, Homo sapiens
ccttctccaggagaaaaattctgtataggaatacttataaacaacaacagtgtgataggatgggctaacaagagtccagggcaaatctgtcccttttggggagttttttgggatctcaagtgctgcaagaagggaggagcaggtggacaggagtgatctgaaaggtagtgaagcagtgagccccaggctagggggagtggatgatgtcaccttctagggccccctcttcccagggaacaggactataaacctgcagaatcctcaacgctttttctctcccttgcactcagggaacccaaaaagaagctcagcacactcactaagaggagggagaggaagttatactttaataaaagtatccagaaaaatcaaggtttcaaaaccttcactgaggtgtattaataatagtaggtatcatctattgagcctttacaagcgttttccagtatgtcaaaaatggccaaaggattataatctcccaattggacatactgcactatatcaaaccaagattctaaaatctgctaaactggcctaacttatatagatgaagatgccaaaaaaactgatgtgattcttccttctccaggagaaaaattctgtataggaatacttatagtgtattcttatgaataaacttattcatatagatatgtatctggacagatagatagatagatataaatgagacaggcacctgcgcctgtaatcccagctacttgggattgggaggctgaggcaggagaataccttgaacccgggaggcagaggcagaggttgcagtgagatgagatcccgccactacactccaccctgggtgagagtgagactgtgtctaaaaaaaaaatatatatatatatatatatacacacacacacacacacacacacacacacacacacacacgtatatatatatacttttttaattaaaaaattttaaaatggccgggcgcggtagctctcgtctgtaatcccagcactttgggaggccggggcgggcagatcacgaggtcaggggttcgagaccagcctggccaacatagtgaaacccagtctctaccaaaaatagaaaaattagccaggcgtggtagcaggcgcctgtagtcccagctacttgggaggctgaggcaggagaatcccttgaagccgggaggcggagcttgcagtgagccgagatcgtgccactgcactccatccagcatgcgcaacagagcgagactccctctcaaaaaaaaaaattaaataaaatctgctacagtaatcttttttaaaaaaatctactatctctcttgtaaacgacacaatctttctctttggcaaaagtagaatatgaggcgttttaaagtgtctaattccaaaatccctgccccggcgtgaggctcccgcctctaatagatgcgtgaccctgggcctgtcccttcccatctcagcctccgctactgtcccgtggggctggcggcccctgcccgcccagcctgctgtagggggggccgcgaggcctcaaatgggacaatactcctaaggcgcggcctcctcgtcgccgagcgtgactctggggcccggcctggctgaggccgcagatgggccggatcgtcagccgctgacgtcggggccccgcccgccgggcctggcatttgggccgcccggtcaatgccttcgacgcgggctgggcgatgggccgggggcaacgagcgcggaggctgcgcgcaaggccctctcaccccgcggcctcgcgcggccagagtccctcgcgcgggctcacgcggcggcggcctgggccttccgggcgtccgcggggccgagggcgcttacccgggcaggcgccgcttcggccatggctgcccgcgtccctcgctgggttgcagtccctggacccggcctgtcgggcccggggcggcgcggcagcgacggcggaagcggagcgggacccgcctaacctgagagctactgccgggcggcagcgaactgcgtcccgagccacgtgccccgctggccctttaaaaaagagctgcgctcggcggccgagcttgaggacgcgcacagcgccccctgcagcccgtaggaccgcacgcccgcggccgccgccccgcgccctcccgaggccttcagcgcccgcggcgtccgggacccaggcgcggccacccaccctcacccggggcgcgggagttgacgccagggcgggcgtgccacggcctccagcggggctacgtcaggcgtaagccactcccgggccagcgcggcgcccaacctctctctgcgtcccacgcgggagccgggagggctgcgggaaggaaccgcgctggaaagtgcgaaacctcgcgagggaaagctgcgtggggaacggggtcggccctcgccggggctccagtccggaccgagactctgttgcagcgcctcccacgcaccacagaactgagttggggaaagtaaaaaggatacgtgtgtacccagggagaagccagggaaacttacatgaacgtttttaaagtctcttttaaatttgacagaacaaacgtgaagatggtaggattttttttttttttttcctaagcctgccctcccctcctgaggactctggggtcccttcctcctcccggggcccgcctggtgaaagtcctcagccacccacgaggacccttctgtagctttggtccaggctgagatcacagcaagtgtgaatcagtccatccctcatttaggccctgaggcatcttgaataaaccgcaggacccattttcctcggcctgtgctgaggcatattgaactaaatgtgctgtatgcagttgaagctttgttttctgtcttttctgcatttcccattcatctcacagtctttgtccaacaagctggcaaactcttcccgctagaaatctgcagttttgtttctttctgtgtttgggtttgtttggggttttttggttttggttttgttttttcttttttggggggggggggtgagggtgagaagttattttcacaaatatttgagccaagcaaaagcgtggtcaactatcagaaaaaacacaaactgatatcctaagtaaggtgaaccccaaaatttgcggaaaggttaggacgtgttactttaaggtaacaaatcaaataaatatttggcattattcattttggaaattcttgttgaactatcccaatctaaaacacaaactgcaagtatgcactaaagacattaagagcatccctaggatcttatcagggatcagtccaatctattcaggattataaaataccagtaaatggtgacgttatagaataacagttaaggtccaatgcaaacagaaagggtcaggaaaatgggccaggagccgtggctcatgcctgtaatcccagcagtttgggaggctgaggcggatggatcacctgaggtcaggagttcgagaccagcctggccaacatgatgaaaccccatctctactaatacaaaaaattagctgggtgtggtggtgaggtactctggaggctgaggcaggataatcgcttgaacccgggaagcagaggttgcagtaagccgagatcatgccattgcactccagcctgggcaacaagagcaaaaccccatctcaaaaaaaaaaaaaaagaaaaagaaagaaagaaagggtcaggaaaatgggctggagacaaaaatgctaggatttaatgagctctgttgaggaaagagtgctataatgtttgacagctagtcttcgttttttagaaaaaaagtttctctaagtcagtggtactcaaacttcagtgtgcatcatgttcactgagggttcttgttaaaaatacaggatgctaggcacaaacctcaacatttctaggtctgaaacaggaggggatgaaagtgatgcgaatttgcaattctaactagttcccaagaaatgctgattctattggtctggtgatcacagttcgaaaaccttggcactgtttatcagggtcccacagctacctcccattcccatgctcagattttataaatatatttaataaacgaac

SEQ ID NO: 587204 - DNA, 4001 bp, Homo sapiens
tcacattctccttcctttgtaaaggcaaacattataaataatatgggaactttccagttcattttaatacatatatgtatctgtaaatattcagtattactttgtgtcttttatacgtaaatactttattatacttgtattcttccctcaacattttgggatctggccctgttgagtttcttttttttttttttttggagacagagtcttgctctgtcgcccaggctggagtgcagtggcgcgatctcggctcgctgcaagctccgcctcccgggttctcccgcctcagcctcccgagcagctgggactacaggctcccgcccacacgcccagctaatttttgtttttgtatttttagtagagacggggtttcaccgtgttagctaggatggtctcgatctcctgatctcgtgatccgcccgccttggcctcccaaagtgctgggattagaggcgtgagccaccacgcccggccctgttgatcatatatgtagctaatttattttaattttgtatagtgttccaccgtctgaatgtcacaagtttgtttgtttttgagatagagtctcgctctgtcgcccaggctggagtgcagtggcgccatctcagttcgctgcaacctccacctcccgagttcaagcaattctccctacctcagcctcccgaggagctgggattacaggcgtccgccaccacactcagctaattttcgtattttttagtagagacagtttttcgccatgttggccaggctggtcttgaactcctgacgtcaagtgatctgcccacctcggcctctcaaagtgctgggattacaggcgtaaaccacggcgcctggcctgaatgtcacaagttttaaaatccattcttttactcattaataatttattttcaggtctgtgatttggctgtttatatcctttccccatatatataggtatgtatatatttttggagacggagtttcgctcttgttgcccaggctggagtgcaatggtgcagtctcggctcactgcaacctccgtctcccgggttcaaacaattctcctgcctgagcctcccgagtagctgggattacaggcgcccgccatcatgccaggctaattttttgtatttttagtagagttggggtttcaccatgttggccaggctggtctcgaactcccgacctcacgtgatccacccgcctcggcctcccaaagtgctgggattacaggcgtgagccaccgcgcccggcctaattcatttaataatcagcaaaaatcctcaacattaaagtttacaagataaaaataccctctaaacctcgattttaagaaaccactaacttaattttttgtatcctcttctactcttcccaacgtatcatcttacactcaacccaaatcacgctagacaataaattctgacattgaagcccccgccaaacaccatttcaaccattcggaatcttaaactttttggaacagttgttctgatttcggtgactatgatgtaaaactggttgacctgtaacatccacctctggccccaaacctttctatcctttccaccgtccgctccccgtccgcccggcatcctcgcccaggctccgccccgctcctaggtcggcctcggtccacgctcggctttgtccaggggtttggccacggacaagccgcgggagcggaggccacctgctcaccgcagggcccggaatccacatccccagcagaagcagcctgcagactccgtcctacccgtgcaccgcgcgcactcacggggaccccaggacacgggcgagcccggaacccgaggacccaccacgaccccgaaaccgggcgtccaaacaggctagcccgcttacccgaggcggctccgccatggtccccgcggtcccgcccggccctggcaaacccgaccgtctccggcggctccgcaggaacctgccctgctgcgcactgactcccctccgctccgccccaacccgactcccacgcacagcccgggtggcccccaaacgcagcgccggccgggcgcggtgcatgctgggacccggcgcccggccgcggctgccgctcagtcctacagcgcctcctgcgggaggaagaagcggcgctgcctgagcgtcggtcctcagaggagggacccaggggcccgggcgccctcagagcaggccgcagcacgccggtctttgagggaccctcggattcccgggatctggggagggaagcggtcagagacaagctgaggagctggccggaggggaaacggaggggcaggacatggagagatcagggacagggacagggagagatcagggacagggacagggagacgcgctccacagaaacccagactgagaggcagcgagaggggaacctccggtgcggttcctcccaaagccgcccccgagacaggcttcgtctgtgagggggtcccgggaatccagcgaggccggaaagtgggtggggggcgcgcgctgcccgcggtggcccggggcatccgtcccgccgggggcgcggaggccgtgggggccccatgcttgtcccgccggggacgcggaggcggggtccgcccaccaggtccggtcgccgtgggtctagagccctccgggctccccgggcggccacgctccttccttagcagagaacggccttgggcagagaccccatgcggaagccaccccggcctcagggccgcctgcagggactcagggtggcccaaggctgcggtcgggcaccccgggccccggcaggagacagagacagagtaggaggagaagacggaggaggccatgacacagggcgtgagaaacacgagaacgcaagaacaggggagaggtggggaaaccaggaagagacagaaaggagagagggcgaggaagggggtggcgattgtctccagaaaatcaacctcgcattctgtcttagtcatgtcttaggtgtcaggctgaagtagcaaaggaaaagtgtgtagtttggagaggatgtgcataagaaataaaatagtccctgcgtaggctgaggagcatatacgcatctgtgtttgccacagaatcgtgaaatgtacatgcaccttactgtttaacgttttttatttttacaactgttatacagtacaattttttttttttggagacaaagtctcactcttgtcacccaggctggagtgctgtggcgcaatctcggctcactgcaacctctgtctcctggattcaagcaattctcctgcctcagcctcccgagtagctgggattacaggcatttgccaccacgcccggctaatttttgtatttttagtagagacgaggtttcaccatgttggtcaggctggcctcaaactcctgaccttgtgatctacctgcctcggcctccccaagtgttgggattacaggcgtgagccaccgcgcctggcttttttttttttttttttttttttttttttgagacagagtcttgctctgtcgccaggctggagtgcagtggtgggatgtcggctcactgcaacctccgcctcccgggttcaagctattctcctgccgcagcctcccgagtagctgggactacaggcacgcgccaccatgcccggctaattttttgtattttagtagagacggggtttcgccatgttggtcaggctggtctcgaactcccaacctcaggtgatccacccgcctcggcctcccgaagtgtatacagtacaattttttaatgtatactgctatgaactttttttttttttttttagacgaagtcttgcccttgttgcccaggttggagtgcagtggcacgatctcagctcattgcagcctctgggttcaagtgattctcctgctggccgggcgcggtggctcaggcctgtaatcccagcactttgggaggccgaggcgggcggatcacgaggtcaggagatcgagaccatcctggctaacacggtgaaaccccgtctctactaaaaatacaaaaaattagccgggcgaggtggcgggcgcctgtagttccagctactctagaggctgag

SEQ ID NO: 587205 - DNA, 4001 bp, Homo sapiens
ctgcctcagtctcctaagcagatgggactgcaagagtgcaccaccacgcccagttgtttgtagttcttttgtaggtggggccttgctatgttgcccagggtggaccctctgccttttaagcaaagaggtacactctaaaaactatcctgatcaatggctccaaggctggagcaaaggcctcatccctttcattctctacaccaaacttgtccaaacctcagcctgtggaccgcatatggcccaggacgactttgaatccaacccaacacaaattcgtaaactttcttttttttttttttgaggtggagtctcgctctgtcgcccaggctggagtgcagtggcgcgatctcggctcactgcaagctccgcctcccgggttcacgccattctcctgcctcagcttcccgagtagctgggactacaggcgcccgccaccacgccccgctaattttttgtatttttagtagagacggggtttcaccgtgttagccaggatggtcttgatctcctgacctcgtgatcctcccgccttggcctcccaaagtgctgggattacaggcgtgagccaccgcgcccggctcgtaaactttcttaaaaccttatgaaattgttttgcgatttttttttagctcatgagctatttttagtgtttgtgtattttatgtgtagtccaagacaattcttcttccaatgtggcccagggaagccaagagattggacacccctgcactatatttactgaatgtgtttgtgaaggctgtgcatctgaatgtcagacttgctaatgaaaaattaaatggagtccatgttttgggtacggccctaggccaaccacccacagccatgtaaggcatttaaaatacattgatttctcccttgagttcaggagttggagactgcaatgagctatgatggcaccactacactccaccctgggtgacagagcaagaccctgtctctcttaaaaacaacaggccgggcgtggtggctcacacctgtaaatcccagcactttgggaggccgaggcgggcggatcatgaggtcaggagttcaagaccagcctggccaacatagtgaaacccagtctccactaaaaatacaaaaattagccgggcatggtggcgcgtgcctgtagtccccgctactcgagaggctgaggcaggagaatcgcttgaacccgggagttggaggttgcagtgagtcgagattggcccattgtactccaaactgggcaacagagtaacacttcgtctcaaacacaacagcaacaacaattccttatttccctgaaaagtgtgcgctgaccaggaaagaagcttttttctcgtccgcatgataaactgaaccaatcagctacagatgcgaggctgatccagctcgacttaccctagaaggaatgcaagttgataatggccaattacaatcaagatcactgcacttcctcatttagctttccaagctgccattggaacaatttgccagctgttcctctgcatgcacaataaactcttaaaactttaactggaggggactgttaacttttgacaaaatccaaaatgccgcttcacaatcacgtgaacaccttccactaacaaccacggctcatctcccactctaacaaaaccaagtccaggcgttcaccatccattcattcttcggactttgctcctctcgctgccgaagacttgacaccgccaaaaatactcaaaagctggtgccacaggccccgagagccgccgcacaaacccggagcgtcccctgcgagccgggggtgtgcgcagtggcctaccccccgcacccacgccccccacaacactcgtttccttctccccaaacctgctgacggctccgaatctccgccaagccgcctccaccaggggctgggctctcctctcggggttcccgggcctgacccgaggtctgtctggtccgcgcccctcggcgaatcaccccttaccggaggaacagacacaaccactctggcagcctcagagcctctcgctggctccacctgcgcgcgccgagcgaagcgtcccagccagcggcccctctaggaccgcggaggcttcacgactctcttgtcagacaaagagagtggcgcccgcgcgagtgggcccgaaccaatcaacggccgccctccccgcccaggccaatcaacggccggagacagcaccgagagagtcacgtgatggacagggccccgcccctcctgtttaatcgtaacataatttagaattattctatgattcaagagcgacacaattcgtttctttggctgtgtgtttgtggaggggagtaaggttatcagataaaagaagaaaaatgggccaggcgcggtggcttacgcctgtaatcccagcactttgggaggcagaggccggcggatcaggtcaagagatttagatcatcctggccaacatggtgaaaccccttctctactaaaaatacaaaaaaattgccgggcgcggtggctcacgcctgtaatcccagcactctgggaggccgaggcgggtggatcacctgaggtcgggagttcgataccagcctgaccaacaatggagaaacccgtctctactaaaaatacaaataaaattagccgggcatggtggtgcctgcctgtaaccccggctactcgggaggctgaggcaggagaagcgcttgaacccgggaggcggaggttgcggtgagccgagattgcgccaccgcactccagcctgggtgacagagcgagactccgtctcaaaaaaaaaaaaaaaaaaaaaaaaattagctgggcatggtggcggcgtgcctgtagtgccagctactcgggaggctgaggcaggagaatcacttgaactcgggaggcggagcttgcagtgagccgagatcccaccactgcactccagactggcgacagagcgagactctgtctcaaaaaaaaaaaaaagaatattagatcttaattaaaaggataattgtgtggcttatgtaaattacccccaaaatacagttttaatgtgagtaaggggttaattttttttcttttttttttgagacagtctcgctctcgcccaggctggagtgcagtggcgcgatctcggctcactgcaagctccgcctcccgggttcacgccattctcctgcgtcagcctcctgagtagctgggactacaggcgcccgctaccactcccggctaattttttttgtgtgtgtgtttttagtagagacggggtttcaccattttggccaggctggtctcgaactcctgacctcaagtgatccgcctgccttggcctcccaagttttgtttgttttttatttcttctaaacaaaacaaaacaaacaggatacacgtgcagaacgtgcaggtttgttacatgtgccatggtggtttgctgcacctattgacccatcctctaagttccctccccttacccccgactccccaaaaggcccaggtgtgtgttgttcccctctctgtgtccatgcgttctcaatattcaattcccacttatgaatgagaacatgctgtgtttggttttctgttcctgtgttagtttgctgaggctgatggccaccagcttcatccatgtccctgcaaaggacaggatctcattcctttttgtggctgcttagtattccatggtgtatttgtaccacattttctttatccagtctaccactgatgggcatttgggttggttccatgtctttgctattgtaaatagtgttgcaataaacatatgtgtgttggctgagtgcagtggctcacgcctgcaattccagcactttgggaggtcaaggcaggcagattacctgagatcaggagttcgagaccagcctggccaacatggtgaaaccccgtcactactaaaaatacaaaaattagccgggctcggtggcaggagtatgtaatcccagctactcgggaggctgaggcaggagaatcgcttgaacccaggaggcggaggtggcagggagccgagattgtgccattgtactccagcctgggtgacaga

SEQ ID NO: 587206 - DNA, 4001 bp, Homo sapiens
gtatgcattcaatgattcccttttaagttataccttttaatgattgtcacaaagcatatcaaagttctaagtagaactgtcaacagtatatcaagtttatcaaattaaagtttgctagtattcttcatgagactccgaaaaactttttcatatgataaattcaactaaagcaagtttcattccataaaataccctggaaataattatgtattctacctaaataaaaaaagagatttctcttttatttcgcaatataatatgttctgcccaagatatttttttaaaggttgcgcttagcaaaacctgattctcccaatgagttcaacaaacttttaaaacccaaactaaactcacttttagactttcagaactacttgctgattaaaatgcctaagaaacttttaatttttaaagtttcagtgaaacaatttcacgacaacaaatctagtattctatgttttcctttctcttcaattttaaacatttacagaccataggagtatattaactgcaggatgccttgaaaaagaaagaaaaaagactgagcgactgatcttgtggaaatgatttaaggtgacacttgcagtacttttttttaagggatcaagcaggggagacctcttgtttgtacaagcttttagcttcataactggcttatgctagggaatatcatagcctgcttaagaatgactactggggcaggaggaaaaaaagctagaaaaaaagagaaggcagagtggctctgatggagggcaaagcaactgcggacgaagaggggtctacctggttcacagcatccgtgatgatggtggtcagtctgacagtatttgtcccttaaaggcattttcagtggactcgacctactttgctttcactgtaagaagctcttcattgcggcgtggctgttgaaagaagcacaaacccgtcactcgccctgaacttcctggggggcactggctgcattttccagatacgttcccatcatcagctctccgctttccctccacggacccgcacctccctctcgaaaagaaaacagaaagacgcacaaaccctcctgcagcccaaactccccacacaggttcatcgccctacccggaaacgcagcctcgggtgcgcagcgcagggcgaaggcctggccggcagcgcgggcggctgcggcctcgccgtcccgggcgggcgcgcggaaacggagcgcagagcgcggcgggcaccgccgggctccgggactacggaggtgccgctcccgccggctgctggcccacgccgcgccctcccgctacgcacgtgcgttggggtctccctggcggagaccccgtccccacaaccaagtgcgcccaacttactcaactcttagggcgggccggcgggcgggcggaaggaaggaaggcaggccgggcggccgcggggacagcctggcgtgggaggcggctgcgggccccacctggcgcagcctccgctgaccacgcgggggaacccggactcgggcccgacgcgctcccaaagagtccccgccggcgctgacgcggaagcgccacagctcaccacgtccctccgcgggccgagacgactgcggcggcggctcacggcgtcctccgcgctgtgtggctaggcgggaggcgcgcgggcggaggcagttgacaggaggaaccgcccggcagcagctgccgccgccaccaccgaaggagccggaaccggagcgggcaggacctgaggcttccctcgccggggcaacggctgccgccgcaacccgggtcccaccagcgccgctccacctgcaacggtccctcaggctttaggagaggggcggagaaaaatgggggtctcccccaaccttgggccttttcggtggtagttgttgtttcaggaaactttattaagtcagcctctcttttactctgtcgccccctcctccggagagcccgagctaccgccgcggagcgcgtaggaagggggaagcagagactctccggcagcgacagggagcgactgactgaccccggacggagatggggcgagggcaggaagtgacaagctcaccgagtgggtggggggagtgtggccggcacgcccgggagcgccgcgcgcatgcgcccggccggcgcccccgcctgtgggtaggcgacgcgctgtgcccgccgcggccggtggggaggggaccggggccgccggcgcgagggccgtgtccgaggggagggaaccggggcgggggacaccagggccgcggccggagtctcgggccgaccgagagccgaagcccaaagtgaggtgtgaggcccgcgatgcggcgtgcgcgcccacggagacgggctgctcggccaccaaactgttgctctcgctgttctctgttcagtggaactgaaactcggggagggttgggagaggacttaggaagcggtgggcagatgtatgagccataagtagtgatgatccccaaaaggctgtcagtgcattgctaaatggcaaaagttgaacatttttttcctgccaacaattttcgaagcatgcctcccggaacttggggattcttttatcaggcccaagggagggaaagcatctattggtagcagatgggtatttatcctggcagctccgcttctcaaacttgaaagtggagttgggtcacgtgggctcacgcactttccctcctcttctgcgccccgatcctgcttggaaaatcctcgaagatcccagtcatctgtcaaattctgccaaccaagggccgcttcttgggggcgagagagccgcctccgttgtttcctcccagctcctggaacgtaattcttgctcttggtgacatcaagcaaatatgtgtccaccgcccgtcaggaaattttaagagaataaagcccattcgccttgtctccgatcctccccaagatccactgaaaacctttccagttggtccaacttaagctgccattgtgcggggtcctgaaaaaactgaagttcagtagatagactttgtttagaagagaaaaagttcagttttcaaaatccaaaggaaagtttgtaaattgatacatttgttactttaaaaatgttgggccaggcgcagtggctggtgtttgtaatcccagcacttcgggaggtcaaagcgggaggatcgcttaagcccaggagttagagaccagcctggcaacatggcaaaacgccctctcaaccaaataaaaaaaaattagccgggcaggatggcgcgtgcctgtggtcccagctacgggagaggcgggggcggggggcgggatggcttgggtccaggaggtgaagcgtttgcattaggtctccggggattgcagcagcttgattctaggggatgacaagaaagggatagaaacgtgatctttaactagtcacataagtggtatgatcatatatatctgtcccatagttaagaggcatcacccaacgtgaaactaaaatatgaaatgccacagtttataaattaatgtaaaataagttatgatacttctgtgatagtgtttgttatgcagccaataaaaatcacattttatataaaatttagttgtatggaatatgcttaagcaacaaaaaagaagtattttgaaatgtgatattttaacagtgggctgtaacagtgcaattatgaatgatttttattttattcttttgtatactttgcaaaatttgtaaattaagtatataaaactttaataagcagaaaaattttgaaacgcagtaagaaggctgtaataatatgaaaatggtatacactaataaagctcaatgtcactccaaaaaatgcagtgaaaaaagactgaaagaaacatgcaaatatctacactggagacctctgcgtggtaaaatgtgaggtaaaatattttctgcattttcagaggatcttttcctacttttatgtaataaacatatttatcataggcttaaaaatgaatatgcaagtctaaattgttctaaccctgaaaaagctttgcttcagatatatcagttgtttgctgaccaggtgtgagtaaaaaaaaaaaaaa

SEQ ID NO: 587207 - DNA, 4001 bp, Homo sapiens
gggactgaatgtgggctttattaaactagaactctgcaagtgcctgctaaccctgtgagtttaattgttaagtacttatacaaacagtattttccatctaacagttctgactcagtactgtatacagttgttggggggagcagttgcaacaacccactttttatagtacataaaagcatgtgaaggaatagtttgtcatgaggaatcctagtgatatctctgggcacctgtactttctgatcttagatttctcatgtaaattacatatagcatttattaataatcaaaggcttttataatatgttgcagttttgaataattcatgctaaagaagcattaaaccatgatggaaaatatcaaacataaaaaaattaaagttgggcaatttcagttttccctcttgatatcatacagacttaaatactgttttttatatgaaacctcaaaagttggtctttaagtttggatacttagtcactagtagtccaaaactaatatatatatatatttattatatatatatttattatatatatatttattatatatatatataaattacacacacatacacattcacacacattttcttgaaacatatttggagccttaaaacataatagcatgtaccaagaaatgaattaataatgtatttaactcatataatctggatgaaattattttataaaaagaatgtgaataaactgaatagtaactaaattgaatagtttactaagttaaaaagcaatcacgttaattgcatgttaatatatttgtatattatacaataaattatccaactcagatttccataaagaattctcttacttccccttaaagaatgtgcatagttgagcattagatataatcaagttttcactacctataactttccttttgccaatgatttgagggaaaatctttgagtttttctcacaaagtaacagtagcattattaaactaatctcaactgatgactttacaaaagcacattataacgtgccactcaaactttctacactgctcaaatcagcagattcgtaagttgacatagcacagaggagctaccttctgagccctgcagttgactgcattcagtaagtatttacatccgtagcactatagatcctactgactgaattgaaaatacacatgtaaatacacacccctctctgtgtcacagtctgtcaataaattgtataaacggacacgatgtatctccatacctatggataaggtatacgttttagatgtccaccacctactcattgtatcaggatactatctctcaatatctttttgtttgtgttgagttggaacgtttgtgtatgtatgtgtgtgcgcgcgcacattaccggagagggagatccgttcttgcacaggggtcccctgaagactcctttaatgccccggtagtgcccattgctgagatgtctcgaactgatgaccaggtaacaagccatgtgggtccgggcggaggcgcagagtctcaactcctcaccaggcgaccagccgtggaaagcgggcgggtttctcagcggcaacagcgactaccacctcccgagaagacgcggccagcaggacgcagggggaggcggtggcagcgcgtccctgctccgcgccccgtgcggggctcctgctgccgacagctgctgctctgacagaggcggcggcggcgacagcacagagcacggaggggacccggcgagccagtccacatgctgctctgacgaggtggctgctcaaccgcgggccagcgatatatttatttaaggacaacttccagggtccaccagggaatcaggaattcccccgcccctttcctcccgccccctgccttcgcgcctggcgcctgcccgggggatgctcaggcgcgggtacccatcgtccggccgggggcgtcctgggctgctggctgcagtgtgaagatccagcagcagccgccgccaccgccgctgctttgtggggagagtggcggggagtccttgggagcgccaaagcgctgcccccgctgcagtcgggagagggcggaggaggagacgggcgggccggggtgaggacagggagttggggacgcggcgacctgtgcttgaggagggcagttagcgcctctgctgggagctgtgggctcggggctgcccaggaggctcaggtgtgctgtggggcgaggccaggaggtgacagctgccgctgcagccgcggggggctctcggggctgcaggacccgcctctcccacctcccggcctcagccgcccagccccccggttcttctgccctatctctgagccaactttctactgtttgggagtcacctgggaggactggggaggctgtggtggaggagatgggcaggaggagggcgttttctttactctttcgttgcctgctggccttcagcttttcttcagcgctctggctgacggcggcgttggcagaagcaacagctccccagccggttgcaagaatgagctgtgcagccacaaatagggcagacagattagatgcgccgtggtagggaacgcacggacgaggaaagttttgggcagaaaacttatataaggtatagaaacgagacatgcatacgtatatgtgcatatacatgcacgtacccagagttatgaagattcacttacaagcctttctgtatcttagcgaggcacatatttttggtctctataagacctctgtgctttcaaaacccccaataatcacccctctcagaagtggtttttaacggaccttatttcgtttaccgtaatttaagccaccagggagcgagctgcactgagaataaaaagacctgggcagaaatgtgctctgaaaggagaagatagccctcccagggtttggagacaccctgcactctcctccaccccgcggttgcttaatgcggttctgcaatccatctctgcctcacctcgccttgtctgtgcctgggagaaggtaaaggttcacctcctctcagtctgttgcttcagcgctggaattgaaaggctaccgccaatgcgctaattctccccagtattgtcctctcctgtctcccacaatgccccattcgcatcccggttgacattgacacaaaagcagaaacaggttaaaaggaaaaaaaaactgttaatttaatttttcctattcaggcaactcataaaattcttaagcaaaaaaggaacaaaaaagaatctaattataacttttgtaactacccaataaaagcttgactttttgtttacatcattacaatggcttaatatccttaatattttatttaaaaaatacatagatgtacttctcattttaaaggttttatatagtcttttaaagtgtttgcaaagcttctgagtatataagggaaaaatgccaattccttgcaaaccttcagaataaaaattactgaaactgggatagtgcaatgtaaatctcaggaattgtttattttaaataaattgttggtaagaacttttgaaataaaaataaatttatagagcagtggcagcagatgcaacagatccatcttctcctttctattgatgtatttaacaccacaacaatggcatgtttaacaacgtagtgtttgttcaacttacagctgtaaagtgtttcctgaagctgagaacaagtaatattactagtgtatagacattagatgtattttatacaaagaaaacaatgtatttgcaaatagtaaaacttcaaaaataggtgaaatattgaccaaaaaatgaataaagtggaatttttgaagaagatagtgtggctcagttgatagttactatttcactctggataaataaatgtaggtagcaaacagcattgaggaccaacgcataagcaacttagaatggattagaaagatgaatgatgtcatttctgtaaataacagcccaagggtactatgtcttcttcattgagcaaatatacttcctaatactgcttaattatttttacgaatcagccatatttttataaaatggaaggatggataagagtaatcaaaatataa

SEQ ID NO: 587208 - DNA, 4001 bp, Homo sapiens
aaactggctctcatgagtgtggccaccagagaaggtttgcccagagtgggtcccagaggaagaggtcttggaaggttctgcagtaccacatctgcccctgggcatcaggtagagaaaaacagatgcaagcagaggtcaagctaaagtggaaaaggttacgaggccacaggggagaagaagccagggagccaacatctggggcaggaggggcagaggaagagagcctattagtacctgaatcggatccgggaaattgagtggaaattgactcaggagctggggccaggtgggaggatggtggaggccctctggctgccaggaaacacagcaatgagttccagccagcagcgcgtgtgagtgttaagtccagtcagcacccatgtggggagcggggagcccctcaccagcctggcctcagcctgcctgacacagccaccttggaaaatctcaagggagagctgctggtgttactcaatgcagctgaggttggctggtgtgagtctgtgcaggctgcccgccacccttgagcctctttctgccacagcaggcaggcatgaggctctgtcaagggatcccccgaggccctcacctgagagggtgtcaggccctgggcccccatcctcaagacattgaagttccagcacgaaggtctcggtggctggccccacttccatcctggcggtcagaccccgattcccgggagtcggctgtgctgaaaggaaggaagcagtttagccaggctggagtgctttgacccccgccaggtgcccacaggcccccaaaggccctccacctctgcctcgggccacccagagcggtcagctccatacctgctgcaactataggactgtcccccgcaacggggaacggggagtgccggcggcctggaggctcaggactggggagttggcagacagcaccagaggctgtcacctgcatagaggcaggactgcctctcctgacttttcacagcgggatggagagtggggtagccccacagagacacaactgtgggtatcagcccttcacaagggaggaaagctagagtcaccaaagggacattcagggcggggagctctggggccaaagagagactgtccatcaacatcctccctgcctccttcaattctttttttattaaatacttttttttttttttcttgatacggattctcactctgtcacccaggctggagtgcagtggtgcgatctggactcactgcaacctccgtctccccagttcaagcgattctcctgcctccgcctcctgagtagctggggctacaggtgcgtgccatcacccccagctaatttttatgtttttttatattgtagatgatgttgcccaaggctggtctcgaactcctggcctcaggcgatcctcctgcctcggcctcctaaagtgttgggattataggagtgagccactgcgcctggcgcccttccattctattgccttcctggcctgctctgagaaggccgccagcaggccacgtgtgtcagctgccaccccagctcccgggcaaggcaggtgtccagagcactgtcacccacggcctggccctgtgcccaggcgctcctgagagtccaccctggcccgtgcagagctggcccctctcccctaaacaggccgactcgtgccatccagtccaaactctctcaagggacgcgtccccggttgcccagcgccaacgaccccctgggcctcacctggtggagcatttcctgctcccgggcagcctctgcgctagggaggtgtggtcagcagaggctgcgaggtgaaggccacggcgtgcagccggctccttccggaggcgcctccatccagaaagagccaggaggcgcagggccaccccgggggctttctgggcactccggagggtccacgccctctgggctgccgaggtcgccctgggccaagggaaggggctgagaggagcggccgagcagaagttggtggagactctccggcgggggctggggcgggaggcagggccccgaatcccgcgcggggctcagggccggccccccgggaccatcgcgggcagcgggatccaggccggcgcccggggtcggcaccacggggtggccccgcctggggtcggcggcggccaggcgacgcgggtcctcgggggctacaggtgcccggagcctgcgggcggcctgggccgggccgcgcgggggccggggcgggggcggggcgggcgccgcggcaaggccgggtccccctgggctcgcccgcccgcccgggagtgcgtccgtgcgggccgctggccgggccgggggcgggggcgcgggggccggcacaggaagtccccccggcatccgcatcctgtcccccgcccctgcccgcccgccgcgcccccgcgccccggcccccgccgccgccgccgccgtcgccgccgccgctctaggcagccgcagctcggtgggcttaaccattcccggcccggccactcacccggcccgggggacacgatgcggcggcccctggggcgtcccgggctggccggtgccgagcgcagcgcgcgctgtgccgcatccctgctgcgcgtgtcctcgcgccacggggttggcgactgtcactgcctgggtgtctgggtggggggtacccaacccgatccctgccaccccctagagggcaggcgtggcctcggggcgcccctgccgcggtgcaaattgtggctaattagcacacaattcgatggcactcggagagggagtaggcgccatccgggcccggcccgagcgggccctggagaggccaccccggtccgcaccgtggagccctcctcctagaccccggggctggggagggcaggccagtagggagtgtgtgcctccctcccccgatcagggactgtgacctgcatagatcaaatgaggccaccgtggagaactggcagagctggaatcctcccgcccagcgcccctgcggcctttcgctgaccacaaggctggtggtcaggcctcccacctccctcaccctctcctctcctctttccctacttggcaagtggattcctgcctgggtcaggggtcttctccaagggaggccttccctaaccccgtcttaatgttgcaccacctaactttcctgttctcggtgcacaaacctctctaacctggagaattcaaattcaaattgggatgctcaaattctttagaaaaaaccaaagatctgggggcagggcatggtacttcacgcctgtaaacccagcatttcgggaggatcacttgaggctggtagtttgagaccagcctagccaacatagcaagaccccatctctacaaaagaggtttttaaaaaattagctgggctactgaaaagtagcctgtaatcccaactactttggaggccaaggtgggtggaccacttgagcccgggaggaggtcgaggctgcagtgaactatgatcgcgccactgcaccccagcctgggtgatagagtgagaccctgtctccatctaaaaacaagcaaacatgctgggcgcggtggctcacgcctataatcccagcactttgggaggccgaggcgggcagatcacctgaggtctggagttggagaccagcctggccaacatggagaaactccatctctactaaagatacaaaattggccgggcatggtggcacatgcctgtaacgccagctactctggaggctgaggcaggagaatcgcttgaatctgggaggtgctcctggggtgcagcaggaatgcccccctggtgggggacaagagccctcagggttcacagccccctcccttcctcctgtccctgggctcacactgctgtggcacaggtggccaccttgtcctgtttttggaatctctctggcccccacaggcactggagtttcaggcttcctttctggcccttgcctgaaaagcctgcactctggtggcttctgccccaggctagaaaaagtgcagcaagagcctggctttggagacagagtcatctagggtcatgggaccttttgcagccaggtaactgcagg

SEQ ID NO: 587209 - DNA, 4001 bp, Homo sapiens
ttattgtaactgttttactttataaacttaattttttaaacttttgactcttttgtaataacacttagcttaacacacattgtacacctgtacaatatttttctttaaatatttttgtatttttattttccagcaaaccattccatcaacaaaaagtatttttctttatattctaattctatgaggttttgtatttttaaattttttttttttttttttttttttttttttttactttttaagctttcttaaaacctaagacacaaacacacacattagcctaagcctacacagggtcaggatcatgaagatgtcaccaggtgataggaatttctcagccccactgtagtctcaggggattgtacgtgagagcggtgttgatggaaaccttgttatacagcgcatgaccgtatttctcttctcccgttaaaggctaagaaagcctctgactgaacagaatagcttggaaatcaacttcaaatcactgataccaatatcaatcccaatattttataatccttcttccccctacattttgcttctctttattcaaattcaggttcaatctaaaccaatctggggatatttccaaagggtaagggccataagctccatctttgcttgggttttgttgagctttattggcttggaccacgtactctgtaggtgccgtgtctgctacatgcatcactgtagcttgtggagggagggaggatggaagagatgctcatgcgagaaatcacctcttttgaaattcagagtccttcctagtcttcccaggaaaaactacagcatcaaaagaacctcattatccttttctctcttttcgtgtgggacaaccctttcaggcgtgtccaagttattgaagtgaaaactgcaggagagctccttgagaaaggtgatcatttcctatttatcctcatacttccagcatctcgttcaatgcaaatcacagatcacaaatgtttattaaatggacagttttttaagggactcaataaacagtcgaaaacgtttgttgagagaattctcctctgtgccaaataagaaacaatactcaagaactggcagcaaacaacatccagaaagatgttagtcccaagaggctgccactgtctccaagctaatgtgcccacaaccacactggtcttggatgacacggcctggaagcgctggcaatcccgtcaaatccctgaactccgcccccaagcactttctttccaccttttcttccaactcaaagcctcttgcccaaagccaatttatgacacaggtttctaagcaatgcccagatattccatgaagtacataacctagaaacagaagtggcaaaaagcatgccagatgccctctcttttcagccctttcttggtaaggaggatctaggcagggtcaagccctcaagcgtcccaccctgcagctcccactggcgtccgatccagactccaagccttagcagggcctcttcaaaacgccgaaggtggtggggaaaacaggaagcaccttcgcatcgctccactcgggggtcacccaacccagcatcgacccagcggacgctcggcagctcggggaggatgcgcggacaccgaacggaagcgtccgctcctctccgccaccctcccggggtcgggcgccgaagtgcgggaagagagggcgggccggcgagtccttccctgcaagcctggctcatctgcggggcctccgcccgagccgccccgcctcgcccgagcccggctcggggatcctcgggagggagcgggcggcccccgggccttccagtcctaccttccccgactctctgggctccatggccccgctttcggaggcccgtgccgccccctccccccgcggcctggcctgaggatgcagccgccgcgaccgccccggggacccaggctcccggagggggagggcacccaggtagggagggagcgcggcccaagaacttcgctctctcacgtcggggggcggtagcgccggtggacccaggataagcgcgctgagctgagacttgcgtcgcaccgagcgaacagctttacggtcactgcccagccccaggcggcggggcgtgacgggaagtgtagtccgctctaggtgagcggctctcgaagctgctattggctcccggaacgcaggtcctgattggacgccggcggcgcgcttgcgaccctccccgcctccctccggcgacagttactaggcaacggcggcgtggcgtcctttagtcctctgcagcaagggcaaagcgctctgattgggctacgcgaaggccaatgtcagccttgaagttctaggttttcttttattaaggagggcaatactttttgttctattcactcaaaaagtatcattggttgcctaccatgggtcaggccgtgttctagggtttgggagaacacagttgaatgagacaaaggccttgccttcaaggaactcacgatctattagggaatcagaccagaaacagataattacaaaacagagacaagggctatgaaagaggtaagcacaaaacatgaattaaagcccgcgttgtcaccttagagtgaagcggtgggggatatgaggtgcttagtcaaggatttcctgcggaagtgatgcctcagcagaattaaagcaagaggtagggtctgccaggtaaaggaggtgcaatggactgaccggtgttcccctcccaggagatggggcgtttgggaggtttagatgaagtcgtgagggtcaggcccttatggtgggattagtgtccttataagaagttttgtccaagtgcggtggctcacacctctaatcccaactctttgggaggctgagacaggaggatcacttgagcccagtagtttgagaccagcctgtgcaacacagtgagagatcccatctctataaaaataaaataattttgtgaggtggaaggatcacttgagcctgggtggtcgaggctgcagtaagccgggatggcgcttctgcactccagcctgggtgacagagcaagaccatgtctcaaaaaaaaaaaagacttttagggggccagggcagggatgtgccttcatgaaggtgttagtgaccacatgcgtgctgggggaactagctaggccctttgcccttctgcccctctgccttctgccatgtgaggacagagcaaaaaggtgccctcctggaagcagagaccaggctctcaccagacacagacactgctggtgctttgatcttggatttcccagcctccagaatcataagaaataagtatccataatttataaattacctagttccagggattttgttacagaagcacatagagattaagacaatggtcaactaatttttttgtatttttagtagagacagggtttcaccatgttacacaggcttcaagtaagcgttttccattatccagctctgctcttctggccaaggttgaatagacctaaattccgttcgaggagtgtaggggagtctgcattactgaaaaaaagaatgagacacaagaaatgtggaggagaaggcagagagtgaggactctgtggattccaagtggcctgccactcaccacctcgactatatcactaccttgaagagctatatttctgcccatgagttatccatgtctttataacagattctcttttaggggttaaaaaactggaggacagctagggtaaatcattcttttgacacatttttccataaaaggttttccatctttccaagaaaaatggagcagtatctagggggaaatggggaatcaaagcagtaggactaagatatgagtcacaagatcttgtttctgtgttgatgggaaggaaactgatgattcaaagggggatagtgcaaggaaccaagtccttgagaaatcaggagggtctaggaacagggtatcgagggcccttcctagggataggaacacttttttttttttttttttttttgagatggagtctctctctgtcacccaggctggagtgcagtggctcaatcttggctcactgcaacctccacctccc

SEQ ID NO: 587210 - DNA, 4001 bp, Homo sapiens
cttggctcactgcaatctccctctcccgggttcaagcgattcccctgcctcagcctcccgagtagctgggattacaggcatgcaccaccatgcctggctaattttttgtattttagtagaaaccggctttcaccatattggccaggatggtctcgatctccaggtcaggttttgttgtatcttttggaatactttttttttttccacaaatcttagagaatcctggggacagaaataattttggtgttttcctcccagtaccagcatctgattggctgaccagcaatgtttctccaagaaatgaaagctgggttgagtgaagacaatcttaatatctcaaggggtaagcttttcaaaggaagagtagcccaggagatgcttctcagccccagggcatccacctgctcccttgagaagctacattccatacttcaggttattctacgagagaaaatgacccaggagctgatatttactagacactctagcgacattgccatggtaggtatcttgccccagacagtactaaaacccaggaccagaaaaagaactgaagggtggctgagaacacatcaccccataaagtttccaaagggaaagcaaccatgacccaaaaacattctgataagatctctgtgcctaaggaagataaaaagaaaagaggcacagagatttacaatacaatgttaggggattattctttgctttcttctcataggaaatatttacaaacaggaaacaaatcttttaaaacgtgccatccaatgctttgccaaaaatgattaattaaaatatgccatcgaaaatgtacactaaaggaaacacacttgctaatgcgaattagggagggtaagttggcatttgggaatgtcagaaggaactggaaatttagtattttactgcaagccagaattaagctggaggaatgagggatggggggtagacttgagaccctgcttgggacacatgtgaaaactgcaggggaaaatcagtcccctgtggatgtgaaaataattaagtggcaggcaattagattgaggtggctctagtccctgggttcctactttaaaaaaaatataattcaaatgcatttttggcggggggaggggagggtaaataacaccgagggaacaaaattcaggcttaaccaactataaactgacaatctctgattacatgaccaggaaatttctaccttaatcatacaaattaaaaaacgacgtaactgtacctaaccaattattaaacttgttttttttcattatgcatcttataaaagtgtttccttcaagcccctcccacggaccacaaactacaaatcatagctgggtgctctaaaattcctgaatcgctctttgattaaattcttcaatatttttaccttgactcccataaatttttaataggaaaaaagaggacctgagaaccacacggaccaaagctcttcccattcataaaccccgcaccccgagtcaggattcttctctttactattctcccgtcgtccctgcacactcggcgagagatgcgacgctgcgggtgcagagctgcccagggagggctccaggccaaagcacagtcactgcgcagggaggagacaggacgcccggggtcccggctgtcagcccagccgccatcttatggctgaaggagactgagggccgagctgcgccaaggagaactcgggccgcggatctcggagccgactgcgggaaggcccgaggcccgccacagccacttccaatcggttccagccagaccctccccctctctcgggatgtgggacccagcaggctcaccatttctaggcttccagggggtcctggcgtcttagctgtgaacctccaagttcttgcaggtaacagggtcacagcggcgagcctttatcagcacaggacgcagagcagtgaagactagacgtggagcgccggctgcagcgagagacaaaggccccgccaaatcccggaagctgtgctgtccgctccagttgcgtgcctgattggatggttcccagcccagcgttcctgattggataacgtttaaggccccgccccttcgggccctgagtgacgggagatgtgatcagatgctggactgaaggaagagtgacagcctaagctgcagccttttcagacggggcttcctccctgagctgagtcaggcccaccccagacagtatttgcatttaaccttgtgaataaggccatatgcatttataaatagtatattatatgtctattcacaaatgcaaagaatataataccaattattcaaaattttcagattttatgaccttcctggcttctggttttgttgttttgttttgtttttggtttttgttttttgagacagagtctagctctgtcgccaggctggagtgcagtggcacgagctcaactcgctgcaacctccgcctcccaggttcaagcgattctcctgtctcagcctcccgaggaactgggactacaggcgcacgccaccacacccagctaatttttgtatttttagtagagacggggtttcaccatgttggccaggatggtcttgatctcttgatcttgtgatccgcccgcctcggtctcccaaagtgctgggattacaggtgtgagccacagagcccggccaacttctgtttttttaagcaggcagcctgaaattttaaaaagaaggcaatcctctaaaataaaatgtgggcgacacgtgaattgtacattttttagcagccaaactttaaaaagaaacaagaaacaggtgaaattgattgtaacaatttaacccaatatatctaaaaccttattctaatatgtgagtgatatgtaattattaataaagtatatatatttatttggaactgaatctttgaaattaactctattttacctttctagcacattgcaattcagaccagccacattccaggcagccagtagctacacatggccaatagctgccacattgaaatgcagccctgacatcaggagggtgaagggtctgaacaccccttttctgccagaagtgaggggacagcctctctttaccaacatctttctacagttttgagggtggaacaagatagtcaccatagaaagagcagagggcagcaagaataaaataaccacaggtacaccactgctggccacctgttgcccacctttcttccagagatcagacagtaaccaaaagatgatggggccacaggagattaaacgctatgtcttcagatctctccacagtcatcacttccagtgtttaagtatagagaaaacagattaaaggtaaacttattttgctatttggcctggccctagtggccagagtgtgtttatctgttttctcctgtggcgtggggattgtgtgagtacaagtaccaatcccatgcaaacatgcctacatatttttctgcattactcaatattatcttacaaaacatccaactttagagcagaaaaaaaaatcagcacttttagggtgccaactgttggaaggtaactataacaaccagtaatcaacctgtcattaaatcctggcatcctatctgcactgtgtgcacgtattagttaggtattgcagcataacaaaccaaccaaggcttttttttttttttaaatacagagtttcgctcttgttgcccaaactagagtgcaatggcacgatctcagctcaccgcaacctccgcctcctgggttcaagtgattctcctgcctcagcctcctgagtagctgagattacaggtatgcgccaccacgcctggctaattttgtatttttagtagagatggggtttctccttgttggtcaggctggtctcaaactgctgacctcaggtaatccgcccaccccggcctcccaaagtgctgggattacaggcgtgagccactgcgcccaacccagctaaggcttcttagctcacaattgagatggtcagtcatttaagctgggctcagtggagcaattcttctgatctcagctgagctccttcagacatgtgttatcagctgcttg

SEQ ID NO: 587211 - DNA, 4001 bp, Homo sapiens
cctgtaattctagcattttggggggccgaggcgggtggatcacgaggtcaggagatcaagaccatcctggctaacatggtgaaaccctgtctctactaaaaatacaaaagataagctgggtgtggtggcgggcgcctgtagtcccagctactccagaagctgaggccagagaatggtgtgaacccgggaggcagagcttgcagtgaaccgagattgcgccactgcactccagcctgggggacagagcaagactccgtctcaaaaagaaaaaaaaagaaagaaagaaaaactaaaagggccaagcgcagtggctcatacttgtaatcctagcattttggaaggccgaggcaggaggatcacatgagctcaggagttcaagaccagcctgggcaacatagtgagacacccatctcaacaaaaaatataaaaactagcccagcatggtggcctgcacccacctgtagttccacctactcaggtggctgaggtggaagaatcacttgagcatgggaggttgaggctgcagtgagttatatagaaccactgcattccagcctgggtgacagagcaagactctgtctaaaaaaaaaaagtctttgctggctctccagtgtttccctacagagttcaaactcctgggcagtgtgtataatgcctttcaaaatgtaacctttccccagccttcgatcctttcttattactctgtaagatccaaactgtgaacttggcttcctaagcgacttgctttttcttgcttcactgcctttgcacgtgaggttcccactgagagaaaccctaactagactttcaagactcaattcaagctttttcatttttccttcaagctttcacagtcccctgcctcccagaacctgggctagatgccacgtctccctgttcccaggcgctgtgcttccctctgccatagcacaaatcacaaatcacagtaaaatacagtgttaggtctgcgtttctgccccccttccagaaaaagccaatgcttggataagaggggtctttctcctcttcatccccagcgcccggcttggagcaggcaccaataaaacgtgaatgaagggtcaacgccaggacccgagggctgaggaagggatttacgaggaatagctggggccgggcgcggcagctcacgcctgtaatcccagcactttggaaggcccacgcaggaggatcgctttgaggccaagagttggagaccaacctgggcaacatagcgagagcccgtcaccacataacaaattaaaaattaaccaggcgtggggcctcatgcttgcagttccagccactccggaggctgaggtgggaggatggtttgatcccaggaaatcgaggctgcagtgagctatgactatgccactgcactccagcctaggcgaaagagcgagaccaaaaaagaggaatgactaggtaagaaaattctaggactgacttgggaaggggaagggggcgaaccgcgggggctcacatacccgaagttttcttctccaccattggcacaacacaactgtcggaagaaactgctgcgcacgcgtactaaccccaaggctttagtaggggcgccatcacttccggtagcttgtacttctgcgcgtgcgccacagctttgactcattacgtggcgtttccttggagacaagaaagcttttcgccatgttttataggggcaaaaccacttccggcctcagtgtggaggtgtaaatcttgtgggagccacgaaatgggtcattttaaagatgtggtcacggtgttcttacaagaaatcttattttcctttggtccttgtgaagatgctgtgatcacaaaggcagcccctggagcttctccgggcagaagaggaggtgggctggactgtcaaagaaagtggctggcttccgtgggcaatccgaggttcctagtggccctctgcagaaagctgaactcccagttcccccaggcctccgtcccgcggcggactcctaggcttcctccctccctgtcgccgccagcctctcgctctccccgtcttccgcccgcactctctgggcagggctgcggccaggacccgcccccgcgtcccgcccgaccctccgccaggggtcacttcccctgtccaggtttcagcttccacatgtgtcaagcggctggctcagcccagagtccctgtctcccgcccgccggcccgagccgccgcccctcccccgcctcccgtgcgcccgggacaatcctcgccttgtctgtggcgccggcatctggagctttctgtagcctccggatacgcctttttttcagggcgtagccccagccaagctgctccccgcggcggccgcacagcagcccgagcgccccctttccagagctcccctccggagctgggatccaggcgcgtagcggagatcccaggatcctgggtgctgtctgggcccgctccccaccatgacctcctcggggcctggaccccggttcctgctgctgctgccgctgctgctgccccctgcggcctcagcctccgaccggccccggggccgagacccggtcaacccaggtgagatcccggggaggcccggcacggccgagggggcagaggctggcgtgcctgccagcctggcccggagagggtcggaggctcgaggaggtgtctggcccgtcccccgcccagcgtgctcttgaggctgagtcgcgccaagcccctcgcccatcactaccctgaactggggtttccagcctccctatgcaaagggactcggaattcctgggcaccactcccaccctgccctccttggggtcagagtgttcctgggtgagaagagtttaagaatgggaaggaagaaagggagggaagtcgagtgagagggaggacagcaaagcacgtgaggcccggagctgggcggtggatctcaagtgccatttccctctggtaacagagaagctgctggtgatcactgtggccacagctgaaaccgaggggtacctgcgtttcctgcgctctgcggagttcttcaactacactgtgcgggtgaggagagggaaaggcccctgggagggggtcccagcaggaggggtgggctgaagtctggatgcccaggtccccacggtaagcctggtcaggagttccccccacaactccccaccccttgcctggcacggggcaatcttctccacagaccctgggcctgggagaggagtggcgagggggtgatgtggctcgaacagttggtggaggacagaaggtccggtggttaaagaaggaaatggagaaatacgctgaccgggaggatatgatcatcatgtttgtggataggtaacggggctggggatagggagcggggtaaggatgctgaggttcccagtggacccctgcccatcctccccttcctcacccagctacgacgtgattctggccggcagccccacagagctgctgaagaagttcgtccagagtggcagccgcctgctcttctctgcagagagcttctgctggcccgagtgggggctggcggagcagtaccctgaggtgggcacggggaagcgcttcctcaattctggtggtgagtggcagagtgcccaaggcagaggggccaagagcggtgggacacagagtgttaaaggcgcctgagggctggagacagcctgggggacaggccctgggaccctgggagtctcgaggtcaacactccccctccccgccaggattcatcggttttgccaccaccatccaccaaatcgtgcgccagtggaagtacaaggatgatgacgacgaccagctgttctacacacggctctacctggacccaggactgagggtagggaaggcagaggagtgggcgcatcccgcagctctgtgggagtggaggcctcaggctgaatgggatttggggagcaaagggggttgcaaagagaaaaatgtgtgcctgggcgtggtggctcacgcctgtcatccaagacttttgggaggcttaggcaggaggattgcttgagtccaggaatttaagaccagcctggacaac

SEQ ID NO: 587212 - DNA, 4001 bp, Homo sapiens
ctttatactaaaagtcggtccaaacatggtaactcagtgttcatttgagacgctttgacttttggcctttaaaaactgttccccactcgagtccccagatagaactacatttagcaactggtctcctcctgacttcctggtactaaaaaccacaaccacaagggctgtttcgtcggtttgttgtaaaacaacatttgctccagtcatctcactggaaaatagactttctctactgggcagccgctgaggtgagggtgctcaggatgtttaaaaacaaaaccacgcgtctatgcggtagcggcaccgccggtgttaagcgccgggtttcttccaggatggagaccgacgcgggctggtccgggaggcagcccccggcgccccggcagaaggagaaaaggagaagggtaaaaatagccggcggccacggcccacgtgcagccgcgggaggaccgagcgcgggtgcgcggagaggggtccgtacctccaaacatgtgcggcgagaggtgagctggtaaggagccgatcaccaggcgcggcccgccggggctcccgcccaccggccggtcccggccgccgccgccgtcctcagggctgctgtgcaccgagtcctgcgagccgtacgggccgctgctgctgttcgggatgctgaagggggactgcgccgcgcgggcccccgacgccacgctccccacggccccgccgagggagcggctgcgcggggccgccggggctgccggggccgccgcggccgccgcggcgccgccggaggcgctgggctggtgcgcgctgggcacctgagccgggaacctccccgcggcggcggcccgagcgcccccgccgccgcccgcggtcccattggcgcctccgctgctactggaaggtagatccgagcccgagtacgcgcgcgtgcggccgttagcggcggccgggccgctctgtttggcgcccatgtccgccctgccccgggccgggcccgcgcgctgcgccccgagagccgggagggcgggagcgagcgcgggagctagagggcagggcccaggcgccgcggccggcccagagaggcccccgcacgtccagggccgccgcccggcgtccagaggggcagtcggcgcccggcgcgctcttcttggggcggcgggcgaggccgacggcctgacgcgggcgcgggagacgaggagacgcggagaggaaggggtcccggctgcaggcacccctcgctggctccagcaggaaggggcggctcaagtggccgtgcggctgccgctggtttcggttctggtgcgccacgacgggccgctaccgctctctgctgccgcgctcggcgcccccgatctcggcaccgcctcctctcgggcggccgctgctaccgccgccatcctccggctcccacggcggctggcggctgagtgggaggcgcccgcccagactccgccggggccaccttccctcctcccccagccacccagctgttattaacggagaaagaggaaaaacgggtggcgcgcgaggggagaacgaaaaatgggagggagaggtggcgcgcgcttcccggcaaccgtcgcctcgctccccctgcgaaggaggggccgggctggcgggaggatctgggccgcgaaggcggggggtgcgcagatggggaggaggttccccggccccgcgccggaaggccgcggagcggcgcggctgcagggtgcgcccggcccgtgtgtttgggtcgcgcgcgttgaccccgcccccgccccctcgtgccgccaggccgattggctcccgccggccttgctccgcctcccccttccgcgacctgcctgcccctgctccgcctcgccaaggtactgcggtgtggtaggtgctgccactcgtggactcggtgatggacaggtctctggccacgccctcccagccagggcgcgcccttgtcttcctcgcggggcctacgccgataggaggaacggacaccgggcgccaaccagaaggcggcccctcctcccgcacgtggcccgccgacgctgtaggagcctgtgtcagctgcagcttttcctggcagggggcgtgaatggctgtgtcctctgcccagagccgtttggtttcggtgggtgttggtgttacacactgattaaaaaaaaaaacagaagctcaaaagccagcttgatctcagacttactcatgaaacaccaacctgggaggaagcgcagagttggaagaactcgggataatccaggttgaccctctgtggtagggcaaatactgtggtgccaggaacgctgcacctgactcacaaaacctagaatctaggcccaacaccaaactaaattatctgtagtgagcaaattattttacttttttggactttaggtttatttttgtttttgtttttgagacggagtctcgctcagtcacccaggctggagtgcaatggtgtgatctcggctcactgcaacctccgcctcccgagttcgagcgattctcctgcctcatcctccagagtagctgggattacaggcacgtgccaccacgcctggctaatttttgtatttttagtagagacggtctttcaccatgttggccaggctagtcttgaactcctgtcctcaagtgatccacctgcctcggccttccaaagtgctgggattacaggcgtgacgtaccgcaccaggccgactttaggtttcttacctgaactgtttgtgttaaatcctagggcacctgcctctttaaaatcctataacttctctaaaatgtaataaaattctcctcagtgccttcctcagtgttggtgtggtctcttcacggcagagcagggtctggatacccagggaacagcctgctctgagactcccattatgaaaatgtctagtctctacttgaaaataataatagcaagtggtgttttataaaactacagaaatactttgtcatcttttcactatttgcaataagtcatttatgtaatgattttcatcactcttagggtatgggaatcaagtttttaaacaaatggagaatatatgtatacatataaagacgtgtatctgtgtacacaaacacacatatatacatggaaaaacaaaggtacccagtgctttatatgcagtatcatgttaagatatggtcatcattttggttaagtgccctctccttatagatgtttcctgccacctcctcccccatcccagcatcacagactgacttcagtgttcccactcagtgctgtacaatacctccttcatagctctgatcatgttattattattattagatatcttgcttgtcactactcaattggctccatgataaacttcatgtctgtacctccagtgtttaacacagtgtctggtcttgccatggtgcaataaatgttttgtgaatgaatgaatgaatgagtgagtgaatacatgtatcctcaccagttgtactaaaacgattctttcttgaatgtcactcattaacttatcatgttcttattctccttgacatttcgcttgtggtgggtgccccttccacctcctctctggtgagccttgtttctttccccacgaaggttctggagataaaatgctggccttctatgttctttccttggccttctttcctctctcctcacccctctcatctctctccagtcaccagcatgaagctgtcaatgtgtgttattgtcaaccaaacagttctgacttcgttgaaaatgtgtcgcttatttatttatttatttatttgagacagagtctcgctctgtcaccaggctggagtgcagtggtgcgatctgggctcactgcaacctctgcctcccaggttcaagcaattctcctgcctcagcctccagagtagctgggttacaggcacgtgccaccatgcccagctcattttttcgtacttttagtagagacagggtttcaccatgttggccaggatggtctctaactccagaacttgtgatccacccgcctcggcttcccaaaatgctgggattacaggcgtgagccaccatgcctggccatcacgtc

SEQ ID NO: 587213 - DNA, 4001 bp, Homo sapiens
agcctcccaagtagctgagactaaaggcaggcgccaccacaccctattgtgtgtgtgtgtgtgtgtgtgtgtgtgtgtgtggtgtttggtagagaagggggtctcattatgttgcccagggtggccttaaactcccgggcccaagtgatcctcccatctcagcctcccaaagtgctgggattataggcgccattgcactccagcctgggcaataagagcaaaactgtctcaaaaaacaaaaacaacaacaaaaaaataccacttatcagcttctaacctattaaagcccatttcacagaaggggggggagccaggcacctggctccccaagtaaatctaagacatgtttgtgagcctctaaactggaataattcctcaagtaactcctgcagctctctggcctccctccccaggaaaacaagggcctcgagtcctcaaagagagcccaggagaccacagttaagaccagagctctggccggagggctccaggggctggacttgcccccatcccaggcaagctactgggtctaggcccaggtgaggaggagccaggttcccctgaggcgggagaggacaggccctccatgggaccacaggaacttggtccagggatcagggtttagctggggagctgtgtgcccagccctgccctgccgtaaggcctctccttgcagcctctttccccactggctagggaaagggaggtctggcctggatttcttggtcttttcctgcatgtaccacaggttaagcctctcccccttggagctgcccccagggacccactgatgcttttaaggtctttaacaccaaggttatgatgcccccgcccccataccacttatctatgtggaattttttttttttttttgagccagagtctcgctctgttgcctaggctggagtgcagtggcacaatctcagctcactgcaacctttgcctcctgggttcaagcgattctcctgcctcagcctcctgagtagctgggattacagacacgcaccaccatgcctggctaatttttgtattattagtagagatggggtttcaccatgttggccaggctggtctcaaactcctcagcctcccaaagtgctggaattacaggcgtgagccaccacaccaggccccagttagtttttttaaaggcttaagagatggggtctcactatgttgcccaggctggcctcaaactcctggcctcaagtgatcctccagtcttggcctcccatagtgctgggactacaggcatgagccactgcacccggcccacttgttgtttttaagataatgtatactttgggtctcttcaggatgagttcctaatgcccccagccttagaaacagccccttaggctacccacagggctatcctatcacgcaggcctgtgtgtgtcacaaacccacctgagagagagtggcgtggcttgggccagcctgaagtgcacggccacctctggctccaccccatcgacccaatgtcgggcatcagaggcaggagctgccctgggtccggtgacctcagtgccagcttcaggcctcaactgggccacctccccacctacaagtgagagggatccacccaaccccacctcccaccgatggtggccacagtccccatacccggctgcctcgaacatcctcccaccaaagccagggcccccagcctctcttacctgcatgctgttgccacactcgtggagtccaacctcaaacctgaccacatcttctgtgtccatggagaccagaggctcacaggcctctgggcccaaggtgaggtcagcagccctgatgagcttcccggtgccaaaaaggtctttgctgaccatgaccatcagagtggcctcctgacactccaccagtacgggctgtacggacgtctcaggatggctggctccaccctgcaagagccagaggggttgggggtagcacagctcagtactaccccagagcaggaggcagatgaagagcctatagctcagctccatggtacctgcagagcagcaggcagccgcctctggccatcttatacccgtgggatgctggctgctgccacctgggctctcagcttctcagctgcctcccttccctagccagctgggcccttgttgcataaagtggtctccatccagaagcatcagtaacacctgggagcttgttagaactgcaaactctcagccttcaccccagcatgaccacagcagaatttggtttttagcttggaaatcccccacgtgtatccacattaaagtttttttttgctgtgtgtgtgtgtgtttgtggtttgtttgtttttgttgtgttttgttttgttttgagacagagtctcactctgttgtccaggctggagtgcagtggtatgatctcgtttcactgcatcctccacttctcagccaggttcaagtgattctcctgcctcagactcccaaatagctgggattacaggaaggcatgcgccaccgcgcctggctaatttttgtatttttggtagagacagggtttcactatgttgggcaggctggtcttgaagtcctgacctccagtgatcctcctgcctcagcctcccaaagtgctgggatgacaggtgtgagccaccgcgcccgccccagcccacttgaaagtttttagcttgtaaatccccatgtgtattcatgtaaaagtttgcaaagagtgtgctgcctgcctggtgcaccacaatgtatcacagcttccctccgatcccctgctggccctgcccttaggaagctcgcagcccggcaagggagctgtcccaggtctgtgggggacacaggagaaagcccttgattgaagagtcagggggattagatctgagacataaggagctcattccaagtgtgagaaaaaggaggcggtatcaattaggagacaggaggaatttcatgggtctctgccttattttatgggaggccggggggtaggtcagttcaggcagaggcagctgtgtgaagagaggtggagaaggggccctgcgttcttcattcctgggtgaatcccccggagttcatactgagacacagcagaagcggggcttggcttcagctcaccccgaccagggcattcttttttttttttgagacaatctcactctgttgcccaggctggagtgtagtggtgcaatctcagctcactgcagcctccgcctcccaggttcaagcaattcttctgccttactctcccgagtaactgggattacaggcttgttccaccatgcccagctcctcaccacaagggatccgcccacctcagtctcccaaagtgctgggattacagacatgagccaccacacctggcccaaccactgcattctttcctgcattcccagtgatcaccagacccataccacgatttcactgacatcatcatgtggaaacatgcctattacttaagagaatcccaggaactgaccttaggagattcaaatatcaaaccaaggttgtggagtgtcccacctcaggaaggaatgctgaactgattgacagccttgttgccaccagccagactaccaggtggcccataactcaagataaccatggcaaccagataatgccaacctgcataccttcacgtgctttgcccagcacagccggcatgccctatccctgatgtaaattcccatgctttgcctaataaaaaagccctcctggctctttttggagagtcagatagaaaaatctctatatctttccctctctctctctctttccctctctctctctctttccctctctctccctctctctttccctctctctccctctctctctcatgctgcctcctttatgtctgggcataagctccaatgaagctttgtctaggaaaactcgtttagcctcctgtcaatttcttttctttctttctttctttctttctttctttctttctttctttctttctttctttctttctctctctctctctctctctttctttcttttgagacaggatctcattctgtcgcccaggctggagtgcagtgg

SEQ ID NO: 587214 - DNA, 4001 bp, Homo sapiens
ggtcacactggccatgcgctccacgtggcatagagctgcagcggaaactgagagcagtgcttctagttttcaagaaaatcagggggtctcatgaaaacacagattgaggcccaatcccagagtttctgattctgcaggtctggatggggcctgagaatctgcatcgctaacagttcccaagggaggtgaactgctttaagaactgtgcttcaggctgggcacggtggctcatgcctgtaattccagcactttgggaagccgaggcaggtgtatcacctgaggtcaggagttcaagaccagcctgaccaacatggtgaaaccccatctctactaaaaatacaaaaaattagctgggcatggtggcaggcacctgtaatcccagctactcaggaggctgaggcaggcaaattgctttaaccagggaggcggaggttgcagcaagctgagattgcaccattgcactccagcctgagcgacagagcaagactccatctcaaaaaataaaataaaataaaaaacaacaacaaaaaccgtgctttagaggagtccaggactctggtgtggaccctctcctctcataccccagtgttcctggctgtgactctttgtgtggccagaggctctggcggcaagcaccttatgggtccatcctcctgccccttaaacaccccgtggtgtgaggatggagaacagaaagacccctgtatccacttcacttcctttccagaattcttgccaacgcagcccccaacaaggaagatgttaaccagtagagcacctcctacgacactgccgaatggaaaaagtacgtaagcataatgtgggcaccacctgggttttgggagaggagtctctcacaccctaccctaggcagtgggaagacagggattacaaattgaagatgtaaagttagagaaaatggctgggcatggtggctcacacctgtaatcccagcactttgggaggccgaggccagcggatcacttgaggttgggagctccagaccagactggccaacatggtgaaaccctgtctctacaaaaaatacaaaaattagccaggcgtggtggcatattcctgtagtcccagctacttgggaggctgaggcagggggatcacttgaacccgggaggcagaggttgcagtaagatcatgccactgtactctagcctgggggacacagtgagaccctgtctcaaaaaaaaaaaaaaaaaatagaaaatgaatgggcggtgagactggagcttaatctcacaggaaggtcagatgagcccaagaatgatgatcatgactagaagaagaaaatgaaaagtgctctaaaagagggacagtgaaagaggcaaagaagtccagaggtggaagagggtcccgttcctcaggagatcagggaaggcttcctggaggaagaggtgtggggctgtatcttgaggatgtcatttgcagtagatgagaaggcagcacgtcccaggctgccaggagacagggagcagggtaggggggttggttttaggcagaaatgatactatgatcccacaagctacccccagtctggaccaaggaggcggtaccctgggcagcggggtgagcagatgcccaagggttgtagatcctgggacaccgggctgcccttgcggtgcggacgggggcagaggccagtgggagatgcgccctgacccccgcccccatccccaggtgagggcagcgtacgcctggtagggggcgcgaacctgtgtcagggccgagtggagatcctgcacagtggcctgtggggcaccgtgtgtgacgacgactgggggctgccggatgccgctgtggtctgtcgtcagctgggctgcggggcggccatggccgccaccaccaacgccttcttcggctatggcaccggacacatcctgctggacaacgtgcactgcgaaggcggcgagccccgcctggcagcctgccagagcctgggctggggtgtgcacaactgcggccaccacgaggacgcgggcgcgctctgcgcaggtgcgggctctaggggcgatgggcggggccggggcaggtgggcggggccctgtggcaatgctggaggaggaggcttcggtggggaggtggatggggagggtgttttggctgtcttgatgctccccagagctctccaggcagcatccaaaattacttctatctcagtcctgttctagaagtgcctccgaatatcccagaactccttgtggtacactccatggctatgaaacaatattgcactaatccagtctggccaacatggcaaaaattagccgggcgtggtggtgcatgcttgtaatcccagagactcgggaggctgaggcaggagaatcgcttgaacccaggaggtggaggttgcagtgagccgagctgacgccactgcactccagccagggtgacagagacagactccatctcaaaacaaacaaacaaaaaaactgtactattgcttcaccaatactcgagaattctatagcaatatcccaagaatgcctccagaatgttccagcaagtactgttcctggaccactttagagtaacactctaggataacactcggagtaacactctagaattgccccagagatattccagcattctctgatgctcacagcattacctagcacacccctctgtcatcctgatgctctaataatagtattttctccccacctaggccctctccaatttgggagggtttctcagcaaagaggaataatagggccaataatgctatttcacagatggactctgctctgtaagagataaagtggttgcccacaactcataactcatagcaaactaagggctatcattcccagtgtataggtgggaaagctgaggcccagagagtcagagccttgcccatggtcacacagttaatgcaaggcaggcaagcccccaaatcgaggcttagtccaggagggtttttggcttccctcagcaaagaatttaagggccagctggtgttagcagctttcattgacgcggcaatgcacagcagcagcagaggtcctgctccttgctgagcagggctaccccataggcagtgtgcccagagtagcagctgagaggcaggtctgcagtcgtaattctatttactttcaagtatatgcaaattagggggtggattatgcagatattttaagaactagaatagtaatttttgggttgtctgcgttgccatggaaaggtaactccaggtgttgccacggcaatggtaaactgacatggcatacgagtgggcgtatctcatggagaggcactcccaccccatccctgttttagctagtcctcaatttggcccggtatctgagctccacctcctgagtcgagtgagtcctccctcctgccccattccccactcaagagattagttgtttttttgttttttgttttttcactttaagaggggctgtaggagggcagaagtctgtctcagtgagccctgacagagcccctgctaaccctgggcatggcccttgccctgctagccctgttttctctgtaagagggggataatgggctgggcgcggtggctcacgcctataatcccagcactttgggaggccgagatgggcggatcgcctgaggtcgggtgtttgagaccagcctagccagcatggtgaaaccccatctctactaaaaaaaatacaaaaattagccaggcgtgctggcaggcgcctgtaatcccagctactcaggaagctgaggcaggggaatcgcttgaacctgggaggcggaggttgcagtgagcggagatcgcaccattgcactccagcctgggtaacaagagcgaaactccatctcaaaaaaaagaaaagaggaggataatgagaactcaggcctgtgtatggtcctccctgatgggcaaggccttctgtactccatgtctgttggacacagaggacttctgatgagaacatgggacattagagagaaatgaaagcgtgtctgttgacagccctgtataaactgaagtgtacacctcacag

SEQ ID NO: 587215 - DNA, 4001 bp, Homo sapiens
tcccattctgtgggttgtctgtttactctgctgactgttccgtttgctgtgcaaaagctctttagtttaattaagtccgacatatttgtccttgtttttgttgcatttgcttttgggttcttggacatgaaatctttgcctaaatggtgctgggataattggaaagccacatgcagaagaatgaaactggatcctcatctctcaccttacataaaaatcaactcaagatgaattaaggacttaaatctaggacctgaaactataaaaattctagaagataatatcagaaaaacccttgtagacatcggcttatactatagttcttgatacacacataccattttccttattagattataagctccattgatagtgggatcaatgtttatgttaacttatcaagaatcagtatcaaacactataccttgcacattgtaaatattaaataataattgtgaaacatattctgatagtcttcattgttaaatgagcaaatgtgatgggcataatagtgtgaggggcagtataaaaatgcaataaagcattatacccaaatagcctttagcagacaggaatagcaaagtgcaaagaaaaggatgtggtatcaaagccagaggacttgagtttaaatcctaattctgccacttactggttttaggaaaatcactttaaactctaggagcttcagttttcttatatgtaaaatgggactaataataattccatccttacagttactgtagaaaatgagaatactgtataaattgtaaaatgctatataagaggccttcactattcatcacttacaagatactaactgcttattctatttcttatatctcataggtctaatcttattatttcatcaaaagatcaccaggtaaaaatttaaaataaaaaccctttcacacctaatacacgaccacgacccatatccaagaagcatctttctcctacatggcaattgatggctatcggctattcatatacttatagaagaataatctttggattcctgatgcctggactttgatttttaaatctctattcactccatttgtttcctttctcctcccctatcccctacctacctccacaaaccttttacatttatattcttggaggacttctttttttcattattccttatttgaacaacttttttcatttgaagcaaatctctgtgattttatcaattttgggtctagaattttgagtctagaatgcagccaaaacctttctagttaaataacagttcaattaaactttcacatccttcgtcagtgtttgttcatcagtatcttacatgtatttttaaaacagtatagaaaagtacttcaattctttagaggtcaaaactttaaaatcgcattatttcctgtatttcacagctaaaaccaatagatggcgctccaccatcacggataatttgaaagcagcaggttgcctatttgaaagacactgatctcatcattacagagttcacacactgaaatgcaaacctggcagatgacccatggactgaattggggagtttatcaacaaagcaatttaattgtaaaacttcaactgtgggtgacgtagtgatccatctataccttaatttcctgtcattcactcctctatgcaaatgcagagtgactttgtacgacttccataaaaaataagcctttcttgtcacgtattagtgagcaaggtgtctctatataaaacggatgcacgtgacacaagaaaaggcaattcgaagagtgggggaagctgcggttgtccctgcggagccggcagggcggcgcggaccctcacctgatgagggcacccgcaccaggaaggcggagataaagaggaggatggcggcccgagagagcagggagccggcggcccgggtccgccgcctgccccgccgcgctgggccaagggcgaaggcctccatccacacgccgccgtcgcctgcccaccgtccgcgcggaaggtcgttaggcaacgcgcgcccacctgcagccggaagttggcgggcggaggaccggaacaacggacctgatggacgtgctcccacttccgccggggtggtagactaggggtcagcctgtgtctccacatagctggtggggcctacacgcgccaactgtgctgtgcagcccccgggccttcaggacaacacagccacgcagggcatcctcaagaacatcagtgatttgtccaagatcctagagctgagagagaatcgttgggccccaaatcccgtgcttttacctttgcatagcgtttatgatcgaaaagccctttttatgagccaggtggtagatgtggggcccagtttcgaacaacagatagtgagaatgcatgagttaagacgtgtaaagccctcagtggactgctttgatctagtaatgtcagcagatagtattttatggatgtgtggaacttaattgggagataaatgcaatacacacttagtgggaattaaaggtaagtaaggcctttagcctcagaaagaagcttgatggaaggacagaggaaataaccatagatgaaatttactttctaaaatagaccggaagatcatcttatagtgtcacctaaattcagcaaaacatacaaaaccatctatcctgtgtgggagaccagaatataccttctcaaatatgaaggattgctgccctgaagacaagaaccagcagatgcaggagagctgtccacctgccctctttttacccagaagcaagacatagattagaaagagaaaaggtatcctgccccactcctttaccagggagaacaaaggttaaccactgaagacagcgtcagaccctcattagccttgaaatgatatcagaggaattaatattagctttttttaaaccatcttttgtctgctatttgtttgcttagcccaagttactgcctgtagagactcagagtccttttcctttgtcacatctctaaaaatttcctagtctttgttgaagatgctatacaagctggaattcaaagacgcttctttgagaactactcattctctgggtgttcctcatatataaatgaaatatattaataaacatctgtttttctcttgttaatctgtctcttgtaaaggatccattctaagtacaaagttatgggggttattattttcccatacacagcctaagaggccatttatagctagaacttgttttagagaaattgaaagagactcatgcctctacttttctgctgctggaaggatttacttaatgggagcagagctgtgatagaaataaatcttaagcagttggtttaaatacattgaagaatgaagtttgagcaactaaatgtagaatgcctaattacaagtgagttatcacttttgatatgaagaaatgagtgatcatgggtggactaaaaactgtcacttgatatgctatgatctggatgaaggatttaaaactgacagcctaaccacctaatttaatctcacttgtttaatagtatatctcaaaattgtaaagactttcaatggggcataggcattctgattgtaccaaacatatcacccttgacagttggcctgattaacgattatgtgcctgactcttcaaagctagaatcttgcctgttttaacatttttgctgcagtaaggatgatgtgaacttttaccccaaattctaatatttgcatttcctcttatagtagttcatgcaagatgaaattatccaggtgaaagagcttttaagtgaaccaatacattagtgatttaaatgatattttgtgtgtagacagttaactgatacccattgtggtttcctaaaatgaacttaaaactcttactgttcttactctggacaccatggcaaatttaagggaagtaaagataatttagggcatgtaaagatgtacctgtactttcattataattttctgtttttcttaaaaattagatatactagggctgggcacagtggctcacacctgtaatcccagcactttgggaggccgaggcgggcagatcacaaggtcagga

SEQ ID NO: 587216 - DNA, 4001 bp, Homo sapiens
cttgttctgtgtccattttccctcctcctttatgccaatctcccacagcttatatgcccttatgaaagcgccccaagtccattctgtaacaagatgaggcataaaaaaatcaaattaccatagattctaaaagtagaacagcacttacccacttgtgctaaaatgcttcacactcagtccgtacctgaaaatccctagggggcccggcgccgtggctcacacctgtaattccagcactttgggaggcccgaggcgggcagatcacgaggtcaggagatcgagaccattctggctaacacggtgaaaccccgtctctactaaaaaatacaaaaaattagccaggcgttgtggcgggcgcctgtagtcccagctacttgggaggctgaggcaggagaatggctagaacccgggaggcggagcttgcagtgagccgagatcgcgccactgcattccaacctaggcgacagagcgagactccatctcaaaaaaaaaaaaaaaaaaaaaaaaaaaaagaaaatccctagatccctaggcagccaaattagataattcttgagccacagaattccactaattgttacaagttcttcctttttttttttttttttttttttttgagacgtagtttcactcttgtttcccaggctggagtgcaatggcgcgatctcggctcaccgcaacctctgcctcccaggttcaagcgattctcctgcctcagcctccttacaggcatgtgccaccacgcccgcctaattttgtatttgtagtagagacggggtttctccatgttggtcaggctggtctcgaactcccgacctcaggtgatgcactcgcctcggcctcccaaagtgctggattacaggcatgagccaccgcgcccggccacacaaattctttaacctgaatcaaattccgcatcatttcaaaaatcctaggttagtccaagaccaatactcactttctccatagcagccttccaacacttgaaaacaattatcttgcctcttaattcttttcctctccacagctcaactgttccttagatttcgtgggtttccaagtacctcacccatcaaatcaacgttctttttttttgtgagaccaagtgttgctctgtcgcccaggctggagtgcagtggcgtgatctcggttcagtgcaacctccacctggtgggttcaagcgattctcctgcctcagcctcctgagtagctgggattacaggcgcgctccaccacacccagctaatttttgtatttttcgtggggacagggtttggccaggctggtctcgaactcctgacctcaagtgatccgccggcctcggcctcccgaactgctgggattacaggcgtgagccaccgcgcctggcccaaatcaactttgtcctgacactcttttatttatacatggttctttaagactgtttttctaaaccatgagcagatccctattctgtgtgtgtgttctagcccgaacaaagcccgaggggactatttcttcccttggatttgattctacccaacacttctaatgaggttcggcttcccacaggtttccaacaccttgggcgtattgccatcaatgagccttgcgttcggacctccagttcagagaaagggaaaaaaggcggccacggtcagactgatagacggcttggcttggggaacgcacaaaaaaaactattctggaacgcgaaagaacttccaaaacatctgttcttccagctttcatttgttaaagccccaagtggaagaaaaggctttccaggcagccagcgcccccaccagctggtcctgggcggggacgaggagctcctccccacagccctgctaggaccggtctaggtggggtcctcggaagccacagctgctaaacccactcctccctccccagaccattcagccacggctccctctcctgtccgcctcgctaacccgcgaccagcaggctcaccatgaatcagagccgctccgggtaccgggagaccgcaccgcgtacctcgggaccgcgcacccggaagtgcgtcatagccccgcccccgcggaaaagtagtgcggggccgtagcggcccctctagaaattcgggaggtcctctctgtgtctctggcccttgggacatcagggaggagttgagtccaccccgaaaatgaaaagccagggactctttctgtttttaccgaagacggtcagaccagatgaaggctgcggcggttctctcacccaaccccgacgccctggggcagggagggcatgggctgaggcagccacctcggtcaccctcgtggacttcagagcccaaggtccctgagtacccttgggataagcacagggttccttgtccataaacctggatcgaggtcactggatacccttgggcccagctcctcggtccaggtttatggacatggaacgctgtgcttggcccgtgaagccagagattgagttaatacttcgttgatgaaaacaatcaaactgtaaaatatttgaagacatttattttgagacaaatatgagtgaccaatggcccaaggtacagtctcaagaggtcctaagaacatgtacctatgatggtcgggctacagcttgggtttatacaatttagggagacataagacaccaatcaagacatgtaagatgaacattggttctgtgggaaaggcaggacaattccaagcggggatgttccaagtcataggtgaactcaaggatcttctaatgggcaactggctgaaagttattgtctaaagacctataatcaatagaaaggaatgtctgggatgactaaggcaggggtccccaacccttggggcacagacagataccagtccatggcctgttaggaactgggccgttactgcaggaggtgagctgcaggagcaaagcttcacctgtatctacagccactccccattgctctaattactgcctgagctccgcctcctgtcagatcagccatagcattagattcttacaggagcacaaaccctattgtggacagtgcatgcgagggatctaggttgtgcactctttatgagaatctaatacctgatgatctgtcgctgtctcccataattccccaatggaaccctctaattacaggaaaacaaactcagggctcccactaattctatgttatgatgagttgtacaattatttcatgatatattacaatgtaataataatagaaataaagtacacaataaatgtaatgtgcttgaatcatcctgaaaccacgaaaccatccatccccctcctgccatccatggaaaaaactgtcttccacaaaactggttcctggtgccaaaaaaggttggggaccgctgaactaaggggttgtggagaccagggttcccattatgcagatggagcctccaggcagccggcttcagaaagaacagactgcaaatatttcttatcagactttaaaaagtgccagacgcccagttgattctctcctggatcaggaaaaaggcctggaaagggaaggggattctctaccaagtgtagattttccccacgagaagacagcttggtagggttatttcaagatatggcaaaaaaacatatttggggtggaaatattttcgtttccttctttatctgccatgtgatgttatgccagagcctggttgaaaagtcagccaggttatataaagttaaataaaacctgtctgatgaggctttatggtttgaagggggtgactctccaggccccttagatagtaatttgggcaaaagaagaaaacagtcagagtttagtcctcaactttgcagaccagggtcatggtgacatcaatcagaagtagccttgcccttctgtgggtcctaaacttcctgagcagaagacctaggggctgaactccttccaatgctgcaggactcgatgaagatgtctttgcctgccttttcctcctgctgctctggctcagctgcaggtttccagactgaagagtctgtattttccacctcagcactactccatcgggccccctgtgagtttg

SEQ ID NO: 587217 - DNA, 4001 bp, Homo sapiens
tgagtcagtcattctaagagcattccaggcaaaagccctgaggctaagaaattactctgggtgtccaagaacaagccatatcccagtgtggcttcagcagtgacgagcagagctgcaccagaagaggtggcagaggcagacagaaaccagatcacccagagcctgcgccacagaaagaattatgaactttattcttatttcttactttagcgaggaactacatgttttataaaagtcattctgcctgtgtgttgacagggaataggctagaggtggcaagagggaaatggcacttacagtgattcaagcagatgataagggcttagatcagggtggtggcaaagagtcagacaaaatcaagacgtattttggagattaaaaccaacaaacttgctgatggcttagatgtgatggtgcgctcaacctgaaaaagacaatggagcaacatatataccattatgacaaatgacctaaagatttctaacttgtacaggctttactctttagaaagcatgtgaacacatatttcatctaatacttaaaacacttctgtaggatgagtgctactcctcctacttctcagaagaaaaaaaagagactagatgataactgcctcccaaaatacatggtacagattgaaaaaaaaatgtgaagtcaaaaagagagaaaactaatctaagtccaagtactcaaggaaaagaagaggcttgaagtagactggagaatgagtcctatttacctccaagtggattatgcggaagacctagactgggaagacagacttggaagtccaaagcaccaggggaaggagatcctgcttgtcagaaaacggaaagatcacctgactggagcagagaatgggcagctggcaggaggcacaccccaaagcttctgctaaatattctattgtgagtttgtgtatttatctacccccacttaaaccaagtttatattttcagtctattcattgactctgcaacattgagatttctctttcattcctttctagctattgcattggttcactccactagtgcatttaatgcactacagtgcaaatgtttacccatgtgtctccctctaacagattccctggaggcaagaaagatcctcattcatcttttatctctgccatttgacaaatagaaattgccccattgctattctttatctccccccacccattgtgactcttttgttttgtttctgagacaggatctcagggttttatcaccccagctggagaccagtggtgcgatcactgcagcctttgcctcctaggatcaagcgatcctcccacctcagcctcccgagtagctgggactactggcgagtgccaccatgaccagctaattatttatttttgtagagacagggtctccccatgttgcccaggctggagtgcagcggcatgaatgtaagtcagtgcaaccttgaactcctgggctcaggcgatcctcctgcctcagcctcccgagtagctgggacctcaggcgcgtgccaccacgcccggctacttttcaatttttgtagagacagggtctcgctatgttgaccaggctggctcatcactattctttaaataagtgtcctatgtgattactttcactttgcacagagttctgctttggttcaagatctcttcgggttcgtggccagccctgcactaagccaagcctggcagagcgggatcagcctcgctcctacctgagcctacagcgcggcggcccctcagcgtccagacccgcagggcctcggggccgctgaaggcagctcctgagagacttgccgccctcagccggggctgagcggagggagacgggctctactgcaaccccgctgccgccgagccccgtagcggcaccaaaacccgtccccgcgcccgtttaccacttcgcccgccacccgctgcggccctgaagaggctctcacccgccgcggccctgaagggcctctcacccgctagggtcgccagtgctatccgcggtccggaagtgagctgcggacgctgttagacaggtgcgtaaggaaagactcgcttccgtgtcctctctaggatgctcggaggtctcggcggatgcgtctcgatggttgctgatcccagcctgctgttccgaacccggcgaggcgaagaccaccagggcttccccaggattgactgcccagctcgaggcgctctgtggctaggccccttccacttccgtgccatttcacctgcttgccctccgtggaaaggactcggtgcatcgccagatacactactggacacagcacctgccccaaggggctttagagtccagtcggtcaatgcgcgactattccggctgcgagggccttgcgcgaggcgtaggggcagaggagatagggggcgcactggatctaaccggctcacttaagaggctcctgaccccgggtagtgtgcgtgcgtgtgtgtatgtgtagtcagggaaggcttcctggaggagccagcatcggagctgttttttgtggggggtttttgtttgtttgtttgtttgtgttttttgagaaagagagagagaagtcttgttctgtctcccaggatggagtgcagtggtgagatcatagctcactgcaacctcgaagccctgagttcaagcaatcctcccacctcagtctcctgggtagctgggactttttttcaattttttgcagagagggggatctctctatgttgcccaatctggtctccaacttctggactcaagcgatcttccccccttggcctcccaaagtgctaggactgcaggcgcaagccaccgcgtccagcctgaaggcagtctgtctcaactgggtggcccagtgttactccagaatccactcaggaaacaggaaaccctcttgtcttactcttctccagcactttgcaaagtgtctggtacaatatttgctaaaaatatacacttatagagtaaatgaactcctagaatataacataggtgttagaccatctcactttatcctccatgtctctgtcccactttcatatttttcttgtctgcccatatttgacttgggtttatgtcttcacctttttattaataatccacttttcagctgtttctaatgtgctacaaaatccacagttgttgtttttttgttttgttttgttttgttttttaagagacgaggtcttgctgtgtcacctaggctggagtacagcggtgctatcatagctcactacagcttccaactcctgggttcaagcaatccacctcagcttcccaaatagctgggactacaggcatgagccaccacacccagctaatctttaaaaaatgttttgtaaggacagggtctcactatgttgcccaggctagtcttaaactcctgggctcgagcaatcctccccacttggccacccatatttttgttttaattaatatattttttccatttctagaatttctatttgattttttccaaatattctagatcgatcttttaaaagaatttaccgatatgtttaagcttttctttgtacatagtaaatatagttgagcctgataattctgagatctgaagtcccctcagatatctttctgtgatctgctatttccactgtttttgatggtgccacttccaccagcagtacctaacagcatccatttcccatatctcatcatctctgccattatccagctttaatttttgccaattgacaggtgaagtaaatgttacctcattttttaatttgcatgttcttcattataagtgaggtcagtcattattcctactttcattaacttcttgccttcccttttctgtgaacggacttttctttgtgtttctattaagctgtttatctctttcttattgatttatgagttctggggacattatataatgtccctagagcattaaataatgtccccaggacattaattgggggcattcctcaaacataccttcctcgaacataccacagtaccttgtttccttgtgtgacaggctgctcattttccttggaaacatttttgtga

SEQ ID NO: 587218 - DNA, 4001 bp, Homo sapiens
ggcttctccctctgctgggcataggtgaagctgggaggttgaggggagcctgtgccagcagaaagagcttcggggtgccccaatttttgatttggttgtgacccagatccacctggggctccaggactgaacttggaagccacaggagtaaacttaggagtcactggagaaaacttaggggctggagccggagatgaggctgggggccctcggggctgggtgttagccaaagacacaggctgggtctgggactggacatggagttggacctgaggcttgggctggggctggggctgaacatggaactgtgtctggctctgagccggagccggaacctggggcagaggctgggagctggaaggggacttccaaggaggcaggggtgctgtgcccccggctgcaggcttggtactggacttggaactgaatggagtggccactggtgggggcacatatccagatgacacctgcaaggggtgggagagggaagagagatgcagtcaggaggacaccatcctccttagttctatgcccagtctctctggccctgagccctgcttttcctactctccggtcccttacccgggctttgaaaggatcattcttggtcatgtcatccagcagtgaggacagagagtcgatctccaaatcaatactgctcaccttctccctgggctagagggtcagaggtcagagcacctattccatgcctctatccccccacccccaaggcagaggtgcaggggaggtaagaagaaagggccctcttctcctctccttgggggtgtccagtgcagccgcccctcccaggcctccgtacctgtggtgggggcggtatgggggcctcaggccctccctcctcctccggaggaggcggcggggaagggaagatctcctcctccagaggcgcagggggaaatgattcctcgatcgggggagggggcggcgggaaggcacctcccagagcaccctctgcatcgtcgccatccccagcaaggggaggtggaggcaggggaaagtctggggtaggaaggagaaagacgtcggccggggtccctctacccctcacccaagctcccctcagttaaccgctctaacccctaacccaagaactctctcaggggtcccagagcgtgtggggaagcaaaggaggggcgcagggcgccctgggagtaccaggtcaggaaaggccgggcgcactgccgaggagtggtgcagctcccgttacacttcggaaaacggacccggaggggaagattcgtgccccacattcccgactcccactcccaggcgggggacttggaacggtcccaggagccctggctcccagccacgagctccacgatgaggtaagaacatctgctcgggacagggtggctgcgcccagccccctcggcaacaacctttccagacatccccaaattcccgaaacgactgccccccaccccggctcctgccggggtacattccccaagccccgccgcataccttccgggggcggcgggggaatctcgcccacccggcccatctgtgcgcgctgggccccgggtgccgggggaggctcgctgtccccgggccggaagggattcactttgggctttggggccaccacagggccgaacttcttctgcggggcgtaaaaagccggagccgagaccgaaacggagatcgcgggagacgggcggggggccgccatggccgggccgggctgctggggtgggtcgccgggttacgcagcgcggagccgggctcaggagccccaggcggtcccagctccccttggtgacccccactcgccccctcccggcgccccgcgccccctccccgtggggccgccctgccgctccccgcgcctcaccgcaggccggagcgtgcgcgccgcgtctcgggtggccgcctcggcgccgggtccgcagactctgcgtcccggtccggagcagcctccagccgggcggggagggacacacggaaggaggagggagggagaagagagggggcggggagagagcggcgcccagaccatacaaggagcggcccggagagggggcggggagagcggggaagggcggaccaggcaggaaactcccccaggaaggggccctgatcctgcctcaggccggaggctccgccgaggtccgctcgcccccaccccactcactgccgcccccgccgccccagcccggctcagacccccactccctgagcacaggcctctgatgtcatttcctgacctgcctccccctccccgcccgacccgcgggtgcccgagatctgactcaccgtccccctccgggcttagccggcggaggtggggcgggtgccgccgaggtagccacgcagcccctgtgcgcctccggcccggcccagcgacctcctctcgggcctgccgttacccggtcccctcctgccaccacccgctacccggccaccccgagtccgcctggggtggccgaacgtatggagctgggctccagggtgcacggggatggggggtgaggagcggggcgttctccctcccagcaccccccagctgactctgtgcccggagggggtgtgtgagccggaacctccagcattcttggggatacgaacttccaacgctgggcagcctcttaaggcttctaggaattcgcatccccagcgccccagccagcagatcggttgcgagagggaccgttcgggtccgcggggccgggaatggaggtgggagggcggggccgaggcggcggccgcctgcggactggagacccgggaggacggacgcggacgcgggctgctcgtcttttacggcccttcaacgcccaccacgacccactcctcttggagaccccgggcgacggtggggctcttgggcattctgagactgcgcttggtggagaccccgggcgacggtggagctcttgggcattctgagactgcgcttggtggagccccctactggccagactggatttctcagcctgcgactcagccccaggctacacgaaagaagccagacctgggtaattcttctagttctttttttttttttttttaattgcactgggaaacttccccaatctcggccccagttctttctccaaactaaggagtcatggcctttcgcccgctagtccagtatgcacccgtaggcgcttcattttctctcctcttgtcagcttttactgcctcctgaggccttcgtcttgttcacactgagtgtccagtccctccaaatccggctacactctactggcaaggagcacctgggccatgttttagagatcatccgaggactaaccccaaaagtttatgaagagaaagcagaggccgagctgaagagatggacccgggtcacacccaggtaaaggcaggatctaaactgaaactggtgtcagatctggttgccttgcacccctgatatcaggtgaagcaacactgggcaggatagagcagagtgaggtcagagtgtgaagatccagcctgatgcccaaactgacgcctcttcattctcccctgctccatctgtaaacgtcacggttaatccatctactttattgcattatatagagaaataaatgaaatgtcatagctgtatgcgctatatgactcagtattattattcaaattccagttctgcccagaatgaaaattctgacctggttacactaaggcgttttcccccatatgtccctttctgggttgccaggcagatctctcaggggcctcggtatgtgcaatgtcctctctttccttcaaccttattaagtctttaattatacctaggacgacatcttaatcacttttgcaaaccccactgatctttttctctggcatctcattgtctttgtcaccaccagtatttctcacagccacaggcatgtgtggccatgtatgatgggtagtacgcagtgcacacctctctgacacgctcaagccagccctgggcctgtctctgaagacatgttagaaatttgatactggatttcctgtgcatgttggagattgtgtcttgggcttca

SEQ ID NO: 587219 - DNA, 4001 bp, Homo sapiens
gggtaaacaaactcaaactggctaagtaacgatcccaaagttgtaaggccaacaagtgttagcagaacctgtaaatggtaatgttggtatttgagccctcatctgtttagattttattgccaccagcggtctacagccataccaccctgaacgcacccgatctcgtgagattttattgccacccccaacatattgcttgtctaaagctcctaacaagcaacttattaaaatgttatgattgaaagctgtctctgagcttattcagtgtaatctcctcatctgatttaaatatgagtcccctgaggctcaggaaggagtaccggcagatcccaagactacaatgcagagatggctgcgccaggtttcagccttccagtttagcatcctggcccatagcacaggcctccagtggccgaatgaggtggctccggctaccctgcagctcagactcactgcttagactcagggtgaaaaccaggtgtttctttgacattgttggataagatagtaaatctggtagtaaatctaatgtaacccatgttaacaatctgaatctgacacggaatttaggatattgtcctttttttgtttttgagacgttgtttcactcatgtctcccaggctggagtgcaatggcgcaatctcagcccactgcagcctctgcctcccaggttcaagcgattctcctgcatcagcctctggagtagttgggattacaggtgccagccaccatacctggctaatttttgtatttttagtagagacaggacttcaccattttggccaggctggtctcgaactcctggcctcaggtgatccacttgcctcggcctcccaaagagctaggattacaggcatgagccacagctccggcctaatactgttcttcttaaacttagaaatgcgataacattcttaaataagacaatttactaatggttggctcagttctaaagtagtggttaattgtattagtaatcagtgcaaaagagaagaattttccaagtcaagtctccactgcacactttcctaggcagcaccattttaaagtctgattgctcctattcattgtgtccttttcaagttgtgactaatttccagttttttgaattaaaaaaaatcagtcagctaaaatatttacctatacaccctcctgtttaatattcggatgtaacctgtgtaatgttcgaaatggtgcaattttacaaaataccttatcacttccagttttctaaattattacccacgggaaagataagaataaaacttgcggggcataaagaaagagttactgatggacacactccatcaatcgcaagagagagtttatttcatggaaatttcctcctccgcgagccatacatacacatagtcacagttccctacagggcagaaaactatagaaacgggttggggaggagacatcttgggtatgtcactggtagaccaggcacccccgcccccaccccccaccatgggtcctgcagggcccttttccttcccaacgatgctggggaggcgggggcgtcaacgccgtgtccagacctgaggggccccccaaggcgtcgggtgggctacgcggccagcggctctgcagctggaggagaggacccgggagagggagccctgggagccgtccgcctagcccgctctctcaccagctccgcccgcagcctggccagggtggcctcaacgcccgtccagctctgctcctcccgcgccgccgccgccgccgccgcctcctgcacgcgcctcgagatcgcgcgctgcaccgcccactggaaggcgcgcgtcagccgtcgtctgaggtcctccagcagcgggctggcggcgagggcctcctcctggatgtccgtgctcctgccgtccccgaagaagtcgcacgcgggacgaggtgggaaccaaagctccgctctacctgggagtccctggagcccctgggaaattctctctctgcagcggcggaagtccccggggcccatcgcggagacgcctggtcactgctctaccgctgctgctgaaagatgagtttctaagtttgatgtttagggcggggtcagggcgggggcggaggtaattcaaggacccttgccaagtgggatgctgcaactgccccgccattcagagacgctcctttgctcccagtcccatcttagtcctccattagcgacagaggaaggaggcggttcccataactccaggagaagtttaagctgagtcgcttttttctgctgcttgcattgaaaggaagtctttctaaggagaaggcttggtaactgagcagtcagcctatgtaagtggaagttgaggtacaggtggaaggtttatgaccaaaggttagaatatttcaacccaaagccttcctggttgccttgatcgtctaatacgtcattccttaaaaacaattttttttcttcctactctgccaggcactttgccaagtttggggaatgcaaaggcttaattagacccctcacctttccccaggtattgcccgcagtcaagggggagagccttggccctgcttgctagttagaatgtaccttctacaggttcagtaaggcatacctggaagtctgagtctccatgctcctttctattttgactcctgtctgccatgtccacgtttatgaaggggttaaaatgaaaaatcaaaattccccttagcccaaagtgtgtgtgtttaattcccaactaataaggtttggctctgtgtcatcaccaaattccagtggaattgtaatccccagtgttggagatgaagcctggtgggaggtgattggatcatggaggtagagttctcatgaatgggtttagccccattcccgcctggtactttatagtgaatgagttcttaccagatctggttgtttaaagtgtatggcacctcctctctctctctcactcctgctctgccatgtaagacacttgctctcgctttgccttccactatgagtaaaagctccctgaggcctccccagaagcagatgctgccatgctttctgtatagcatacagaaccatgagccaattaaacctcttttctttccaaattacccagtctccggtatttctttatagcagtgagaggacagactaatacaccaactccaggtaatcatgtgccaatattacctgtatatcctttatcaaagaacatattctgcctctttttgatctaatagggaatttctaaaaaggagtgaacaatcaaaacttttgtatgatcaaagaatgcaattacaaaaaaaaacaaaacatagtttagacacaactctcatcttattcatcattcattcattcattcattcaaaagttacaagtcacttgcaatgttccagggtccatggtaggcattgaaggcaataacaactgatttttattcatgcttagtatgtgccaggcaatttttatgtattaatcttcacagcaaccttgtgaggtaagtactattagtttctgcattttacaattgaggaaactaaggcaagagattaagacgtacaccaaagatctcaaagctggtaagggatccactggaaatttgcacctaggaagtctggcttgtgctccaaaccactgggatacaccctggatacgctttatctcccaaagaggaagagagttgctcagtttatatgttgcatgagtgagtgagtaagagtgaataagtgtttaaattcactatgttcataaaattcggctctattgaaatggcttaaggctcaactggataaggaacaatacaggttactcagcctgtgcagataatctactaaattgaacagcttgcaatagtttacaacccaagcacagtaaaattcctaccattgtatattgcttcataaagattccctagaaacatctgaagatgtgttgtcttggtagaaattataaaaatccatgtggtctgccatgcagcaatggagtgtgaatttagggttttttgtttgttggttggtgataggttgatggggcttgaaaaccaccactagtcaatgt

SEQ ID NO: 587220 - DNA, 4001 bp, Homo sapiens
ttttcttatattttgataccctggcattgtggaataagaaatcctgactttctaccatgtggagttactgtcttgaaataaagcacgtgtttcttgtctatatacatgtttcagtttgagtaaatgtgtatgtgagtgtatgtatgtgtatttaccatctagatattttaattattgctgtatttgtttacaaataggacaaactgtttttgaaaatttgaaaagttgcaaagtaaccaaatctatgtgaataataatagttttcgtgtattgagcatatgtgacaagctctgtgtttggtagccctaatctcatttacgtttcccaatacaatagaacttctcccaaaagcttactgttgctgtcattttacaaatgaggaaatctgctttttttaatttttatgtgaaacagagtcttgctgtgttgcccaggctggagtacagtggcatgatcttggctcactccgacatcagcctcatgggttaaagccattctcatgcctcagcctcccgggtagctgggattacagatgcacaacactgtgcctagctatttttgtgtgttttttggtagatatggggtttcaccaatgttggtcaggctggtctcaaactcctggcctcaagtgatccgccctcctcagcctcccaaagtgctgagattacaggctgagccactgcgcccagctgatgaaatcacctttaaaaatgactagttaggggcagaactaggatttgaacttgggtctgtctgacttcattcagagcctgctttcaaattagacagcagcctccacctgtttagagtcagagatttgtattccatgggtgttattgaagcagacgtatctcctgataatagcatagacatttgggacaaggtaaaagtttccccaatgagtctatcagaaaccactcttatctctaaagaaataagccaatttgttactcattatagaactgacttaaagaattcacgaaaaacaggcttccctctctgatggcttcatctttgttgaggctaagacttgagtgttcagttcaaaacaaaaacgagaaacaaaatagcgcaggccctgaccaaaaggtccatgtctaaggttggcactgaccttcagcccagggacatccctcctctacagtactcactgcctgtccagtctttgagattctcactctaaccctggcaggacttcatctgctgcctggattcccagacttggttggggctcaatagtgatcctgacacaaggagtgggagaatgcattcacttactgggagggcaaggggcgcttgatcctgaccacagccacctgcactccatcctgctcgggcctctcctcagcctctcctccatagccgctgtcctctgtgtctacgctgtcactcctccatgtgggctcctcctgctccatcactctccagcccttggttagctcagacaccaggttggcacattttctcctccgcgttggggagccgtggctgtggaggattctgtcaatgtcattctctggctgcccaggttcaagcacaccagcatccctctcgtacctgtggctgaggtggctcacgtcccctcctctctcataagtcttgctgaccaccgttttggacacctctttctttttgatgtgagaaacctcaggggctttctctgagctttgtccatctccatgtccttctggcaggcggggtggcgactttggggcactctgagctttctggtgtgaagtagggggtgtgattggtttaggagcttgaggtgagtcctgggtccctcccggcagccagcctgtaggctcctgggcctgcctgatgctgttctcattcgcccactgctgccaacctcgggccaagctgatgaccagggtggctgtgcgtatcttccggagggcgctcttggctgggccctccccgctttccttttcgcccggagccatgctgcccacctgtctttctctgctgatagcctggacactggctaaaatgagtgtggtccagtggagtgcctgggatttaaatagaagcagggtgcggggtgggaaggagagcttagtgacgatggaaactatgtgaagcatttcttgccaagatgtggcgcctttgccctgatggtgttctttttataaatcatgacagctccagtttcatcacggcagagggacatctctgctggtaaggaacagtgatatgctcactctcttctccaagtgccagagtggaaattactagatcaagtcatgtgctcagccttacgtttgtctgaccttaatatggtcctaccatttataggtgcatacatattatcctgggaacattataggattgttcccacttaaaccccagcagccctcagtacagctcctaattagttccactttatagctaagtaaaataaaatctaacttccagcagctaataaaatatgagattcaaatccatctctgtgtaattcaaagcgtgtgcctccttttattccagttatcaaagatcctaagttgcctttttctttttcattcaactccattagaaatagaccttagaaaatcaactcatccaatcttcattttccaaatgagaaaattgaagcccagatacgagaaagaccaaagtccagatagtcaaagactaattactttctagtcccaactttgaactattgtatagataactcatattaaaatacaaaaagggagtcaaaattttggtccaatcattaaaaaatgtttttaaaacctgtatacacattggattttagaaattattattggaggccgggcgaggtggctcacgcctgtaatcccagcactttgggaggccgaggcgggcagatcacgaggtcaggagatcgagaccatcctggctaacatggtgaaaccccgtctctactaaaaatacaaaaaattagccgggcgtagtggcgggcgcctgtagtcccagctactcgggaggctgaggcagaagaatcctgtgaacccgggaggcggagcttgcagtgagcggagatcgagccactgcactccagcctgggtgacgagcgagactccgtctcaaaaaaaagaaagaaagaaagaaagaaattattgttggaatacatattttgaaatactttgtttgaaaagatcatctaaggacagaattctaaggacagaataaatgaaagctatcggtagctcacttcttatccccatcccgcctacccttaccgtttggtttgtggttgttgttttgttttgttttttgagataaggtcttgctgtgtccccaggctggagtgcagtggtgtgatgatggctcactgcagccttgacctcctgtgctcaatcagtcctcctgcctcagtctcccaagcagctgggaatacaagcatgagccaccatgcctagctaattgtttttgtttttgttttatatagacggagtctcgctatgttgcccaggctggtctcaaactcctgagcttgtgcagtcttcccaccttggcctcccaaagtgctgggatgacagatgtgagcccccacgtctggccccttttgtttttagtaacacaatcttccttagcaggactttatgttcatgtaggcaaagacagtttttcaactctcacaagagggactgaaatataatatttttttaaaaggactggaaagacaagcatgtggacagaaagagaaacatctatgcagtgtattaaaccagataaaaatgtccagggctcagcaatgaataatttcttaaagtaagacggaattttttttcattcaacaggtctgttggctttaaaactatatcctttccttcagtcttgcatgcaagtaaccatactgattgaaaactgctgtttaagagcacaaaaaggtataaaagttaattatttcagagagtgagacatttattttggaaaaaagttggtattagttttttgttgttgttgttgttttgtttttttgtttgagacggagtctcgctctgtcgccgaggctggagtgcagtggc

SEQ ID NO: 587221 - DNA, 4001 bp, Homo sapiens
gtagagatggggtctcaccaacttgcccaagccagcctcaaactcctaggctcaagcgatcctccaaccttgggatcccaaagtgttgggatgggattgtgttggcagaaaataacttatgcaaataattcttcaacagaaagcagcttactgtagtggaaatggagttaaaaattaaagattagactctacatgctaacacagatttgatgccattaatattttttaatcctctgtcttttaaaaagaatatatgtaataaataatcctatttcagaaggataatgtgataaataagatttatatatgaaaatcctttccaacttctctaaaagaaagtattcattttattgtgattcccaaacataatttgacatatactttattataattgttcactagtagaacatagccatggtaggtcccaatattgtgtgccaaaatagaattaatagattaatcttttccttactcataattttaaaatcactctttcaacctgaaacattttcagagttgacatatattgtgcccattttgactgcatagaaatataaacccctatattgtgacttccagtttgtaaaataaaacattttaaatctgtcaatttcaggtgtttcaatcaagaaaacatgcaagactgaatgccttcagtttaatcagtttttaatctagcaggcaggttagtaattttccaacttctttttccagttaatatttacttattgtaatatttttcatcataatagggcaaatgtgatatttttattttttctttgcttttttaaaatttctttgtacattacgtgctattaagactgatgcttgtgggtcaaattttgcatgtctaaattttacttatgacaaatttctacatcatttactggacaataaaaaatttgttaatttgttggctgaaccatggtcatgaatattttatattgatttctttttcccaccagtttgattgctgagcatttcttggaaattgtgaacaagtagtatgttaagaagagatgaagagaaaagacagggaaataagcagcagaaatgggggaacaagaggatcaaaacacggtaggagacaaaatagcacaggcaaaatattatgatttggcaatgaatacaaattagtatgatctgacttaatataagggtaaataaaaattgccataaagctttaaatatagaataaatattcctcatcatttaccttcctctctgaaacttcactgtcatttgacttaatcttccgtggaactgtgacatgcagaaatattccttcagaacctgcagtaagaaaatgtgtttgtttttgtctttgttttgcatcaacaatcgtctcagtcaagcacgggttcttatcccggactgcatggtggcgcctaaaattttaagtagaagttctctcatgtgctcacactctttctagtccacaaatttcactacataatcaacagcacattgaaaatggctaagacacaaaaaaagaaaaaaaaattagacattgcagttctacaggcccctctggttcccttttagaatcgatgagagacttgcttcctcaggactctgaggagttcgctgaaggcagttagtactccaccacctccaccctccttcacagagtgggaagatgccagaagacgcactgcgtgtgggccactgagaccatgggcgctgatgcagagcgctaacaggtcctccgctaaggcctttagttccccctggcctggcgtggaaaggtgtccctgacacaccagaagcaccagcatgggatcccagaagggagagggggagggtcccagaatgacaagaaactgctcccagtaagagcccagcccagctataaagtcgaagaagaaaggggaggctcccatggacttaccttcgtgggcttgcagtcttccaagctcagtgaggagggcgaggagaaggaacatggctcagccagagcgcaggagccacagccaaggacagagaccgttgagcagcgttgagctcgcgggcaggctctcggccaccgggcgcctgggccagggaggaccctgtgctgccccaggaccctgggggtgaggtctgaggagctctgagagctgggccacttccgcagggcggggaggggaaatgccagatgcaagcataggtgtttgcacaaaatttgttgcagagacgtttaagttgtttaaagccctcagtagttacattggggtaaataagctagattttcctttttagtgaggttttctttagtgaggttggtaattttgtttctccatatcacagttttatggcaggttttatttactaaggtggaggagaaagaggaaaagggaaataacagctattattattagctattattactagcaattttctacatgctactgctgacttaaatatctttgcaaatacggaaaaatcaagaaaattgaactttttaatgctggtacgatttcaccgttattcatgataaccaagatatggaatcaacctaagtgtcaatgaggaatgagtaaataaagaaaatgtggtaaatatacacagtggaatagtatacagccttaacgaaggaaattcatttgcaacaacagggatggaaccagagaacgttatgctaagggaaatatgccaggcacagaaagacaaatactgtatgatctcatttgaatgtggaatctaataaagtctatcttatagaaggatgattactagaggccagggaaggtgggatgagggatggggaaagggaaaatgttgatctaaaggtacaaaatatgagtcagactgaaagaataagttttaatgatctcttgcactacatggtgatcacagttaataataatgcatatttcaaaattgctaaaatttattttcaatgttctcaccacaaagaaaagataaattgatgaggagatgggtatattaactagcttgactgaagcattctataatgtatagatagatcaaaacatcacgctgtaccctataaatacacaaaattatttgaaataaatttgcagaaaagaaaatggagttgatcccactaagaccatcaaaaagcacatttcttcaacagtgtatttttctcataaaactatattataatcagtggaggaaagagaaaggaaagctttaatatttagtgttatttttgcaaataaagagaattcaagaaaatggaactttatcttgaaaagacaatcagaaagcactttacttcaactgtgtaccttgcttactacacaagattataatatagtgttctaagggaaaagaaaacctttacaatgcaatctgactgttttgttaacagtgactctaagctctaagtaagaaactgtggagacaggaagggcagcaaggcaaggggagagagaaaaattgagaccactgtagaagactatgcaactgcctcccttaactttttgacaaatatcttaaatggcacatgtccaaaacccaacccatctatcacactcaagccttttactccagtaccccctatttcagggatgaattgtgtcaaaatatgtgtgcaaaaattgtgtgcaaaattgtgtgcaaaaataaaactgatcagggccgggagtggtggctcatgcctgtaatcccagcactttgggagaccaagatgggtggatcacctgaggtcaggagttcgagaccagcctggccaacatggtgaaactccatctctactaaaaatataaaattaccctggtgtggtggtgggcgcctgtaatcccaggtacttggaaggctgaggcaggagaattgcttgaaccccaaaggcagaggttgcagtgagccaagatcgtgccattgcactccagcgtgggcaacaagagcaaaactccatctcaaaaaataaaaaacaaataaaataaataagactgatcaggactaaaacttggatctgctaagtgctggtacgcctgaacagatagctcaaaaattattattgacaagaagcaggccattgagcacaatgaccc

SEQ ID NO: 587222 - DNA, 4001 bp, Homo sapiens
cttattttctactattattaacatctccataataattttacattaaaaatgtttcataaaatattgttaaaagcctcactgcttttttctatttaaatgatttgttttagtaatagatatatagatatgcattcctttaaaaatgatttaaataacatcttaagctataatgtctgtattaggatgacaaatggatatatgctaaggaaatgtttgcatttaaattaccagaacatctgctaccaaaccaaaaaaaaaaaattgatgtctcaagaaaccacattccacttcagaaatggattctagaacttagtgaaaatgataagaagattttaaattcaaattttaaaaagagagtaataattctgaactaaaataatctaaaatagcatgaaagaaagagttctaatcattaacatattcgcaatcagggctaaaaaaatcattaatataacacatcattaattcaagtgatcatcatcccatataagcaagccaaggcttacttagcaacaatgacaaaaaattcctccaaatacagcctgaacggtgagtgagaacagaatctctagaacaatcaagccaatgattattcaaagacatccaagaggaagacagattcagaaaatggacttggggctttgataaccagcatcactgcaccattatttctgtgaaacattgttgatcctggttcattttcaaaagggcttttccattcagggaaaatttggtataaatataaaattcaacaggtgtgcatgaatgaaaaatggcagattaacttcttagaaacaaaatctttacatcattttaaatttgtaaatactgttagtgattcattacctgcgattcaattccttcctttattattgaccgtattttctccggaactgtaatttgcacaggtaaactatcaaaatctgcaaaatgtgcaaaatgttttattagaacaatgcccatcatttcagagcgtgttttatgagtttttcatctaaatctctaatctctattctatacgctgcttctcatttttattatcttcccatttctttctaaaaatacaaggaggtttttttttctgtttttctgtttttttttttgtttttgagacgaagtctcactctgtcgcccaggcccaggctggagtgcagtggtgagatctctgctcactgcaacctccgcctcccggtttcaagcgattcccctgcctcagcctccccagcagctgggactacaggcacgcactaccacccccagctaattttctatatttttagtagagggggatttcaccatgttggccgggatggtctcgatctcctgacctcgtgatacgccttcctcagcctcccaaagtgctgggattacaggcatgagccaccgtgcccggccatatttttttaaaaaagaagtaggtgtattgctttaggagtattgccctgtaggtaggatctggtaaccttgggtcaataggttcaagcccctcaggacaaattaactcactctggactcttcaactagagagtacagaagttgggtctcaactttcactgtcgtgaaaaatgcaaagcaggatctgaaactacaattttgaagcaacctcttaaggcctaggacctcctatcttatctttcctaggtttccaggacgtgtgggaaagcccttattctacgtggattttgggtggggaaggcggcaatgtcggggatgagcttggaattgctgagttggaaacccctcaggaaagcatcctcccagggatgtcaatgtaacttggaggcaaagggagagtagcgctgagggtcccaaaaggccagaggaggggtttttctgcttactactgtccatccgcagcccgccgagcccgctgagcagaaacaagacgcgccacatggcttgaagtcctgggtcccagccggaataatggcagttggtggttacagggcagttggaagcgcgagatgacgccccggccacgcagcctggaagaggtaggcggctgggagagcccaggtgggctgaggttgggtgtggtgcgctgtggaacgtgcgagctcctgagccctgtctcttgcaggacaagcactccactggacgtgatgcctaattaaggcaacagcaacaacaaaatcacttccaacagctgaggaacaggaagatttataaacacttcttaagtaaaatttcaattgaatatatataaacacgtatcaggagttcgagaccagtttccgcaacatggtgaaaccccgtctgtactaaaaatacaaaaaaaaattagccaggcatggtggcgggtgcctgaaatcccagctactcgggaagctgaggcaggagaatcgcttgaacctaggaggcagaggttgcagtgagcagaaagaccttaccactgcactccagcctgggtgagagagcgaaattccgtcaaaaaaaaaaaaaaaaaaaaaaaaaagaacgaaacaaaaaacgaaaaaaagtatataataaatcataagttcacaggtcaattaatattcaagtggaaaaaaaaaacagcgtaactagtaccacgatgaagaaatgaaaaagaaccacccaaatccccagattccaacctcacaaccatgacttctaaacaaccaaagattcgttttgtctgtttttgaacttttcgcaagtagaagcaatcaccatctactctttcatgtctgggttcttttaataggatgattgtaaggttcatacaaagcaatagttctgttttatcctcattggtgtatattacaaattcattaaatataacaccacttgtgtttccattttactgttaatgaatattttgtttgtttattgttccagctattaaaaataatatttagctataaacattcttctacatgccttttggtgtaataagtaaggatttctactgtgtatatttctagagtgaagttgtcggatcacagggtatgtgttggtagatacttccgacaagttttccaagactgtactaatttatactctcaccagaagtatatgaaaattccacttcgtacacatcaatgccttgttgtgttgttgtgttgtctgtaatgttccttcattgtaatgaacttaccaacttttatatcaagacatgctgccctcataaaagaaattaagaaatgttatctcttcgtttaatctttgaaatagtgtaatgctgtgaatatttattcttttaatgtttcttagcatttagaaatggagtgattatgacctggagttttcttcatgagaagatttatttacttttttatctaatttctttaaaatattcatatttttttcttttcgtgttggtttgagaaagttatgtttctgaaggaatttgtccatttctttggggttgttaaattattgacaaaagttgttcataatgacttcctctcctctagcaactttttaaggtctatagcacctgcagacatatctcttcttccattctcaatgttgataatttgtgatgtttctctttatactgggtaaataggtcttggaatgtataatttttattaagttttacaggaactcggttttggatttctttatttttttctgttgtatgttttctgctttgttgattttgttcttgggttcttttccttttttctactttgggcataatgttccttttctagcttctaagattggaagtttatattatttattttaaacatttcttcttttaacctatgcctttaaactacaaatttccatgtatttccaaatttctatctattcattgctttaacttcaccattgtattcttatactttattttgatatactttactttcattaatattcaattctaaatgttttctaattttcatcatgatttctttttgccccacatgtttattggtgttatttaaatgccacatatttaagcatgtattaattacttttttattgatgtctaactcaattccattgtgatcatagattgtattttgaataatttcaagtcattgcaa

SEQ ID NO: 587223 - DNA, 4001 bp, Homo sapiens
cttttcctaggatgaaatcccataagtcaattttttctcgggattgtgaagttcactgcacacaaccagccttattttacatctctttcttttatttcaaccatctggggactgggcagaagtcatggtcagaggggcacatatgtattgctttgatgatgggggcagagaacaaacaggaagaactgggaaatgaaaattgctttacttcttatattctgactagaaaggcaacccaaatgggaatcataacagggatagttcagtggcaaaaagacacccttaaaaatagaagctagaagttaaaggaggggtgacatcacacttttagagttgacatcagaggaagttgcatctcttggtgccatgttatacatgcaccgtcggggcagcagaactgattagtgtgcccagttgcacaaaaggactgtaatgtgcatgggccccagtgttagccatgtgactctgttaatggatccagcttgatctttacgctcttcaactaagctagtgcccaagcagttcttgtatttcagcttagagggggttctggaaaagctcttggtgatagcatttttggagaacggagagaaaaaaacatttctattaagtctgcctcaaaaagtaggaatttcaggtcaatgttaaatgcctggcatgagttttatatatatttttaatatttcaggcttattttaccaaaagaaagctggtgtaacacgttcacatcagacaaaataggtatcaaagcaaaaggcattagagatgaagaggatcacagcacagtgggaaaaggttcagttcagatataggtacatattatataaagcaaaaatacacagaaacaaaaggaaaataattcgatatttaaagatattaggttaagtgaaatttttataagtcttgaaaacaaatcagaaacaggtgagacacaggaaaatcatttttagcaacaaagtactaagagggtgcatggacaaggaaaacttttccctccctaagcccatacctctagttgataatctgttcccatccccaggtcccagcaaacattctaagacccaagaacaggtttactgggaggaattcgaggcactgcagttcatgtgctgagttaaataagctctggaaatagaagctgaagaatcacaatacccaatctaatttaaccaaagtctaattagagaatttaccagaaattgagagacttgctagacataatttcctgttaggaagtagtatttttctcctttcaaatttttaaatgtttggtataatcagcaaaatagaagtaaattatcaatttaagcttaacagagatattttgttaagtaatatcacagtaccttataaataaaaaatattaattatttccagttagtcacacgtattattactaataatgagtaaatacaaaaatatacactcaaacagaaagagccaaactggctcccataataatagtaggtattttcctaagccttgtacacagtaataaataaataaatctgccacatctttaccattctttaaatgacaagctgggttttgatgaattccactttttcagtcaaaaatcatattcatgatttaaattgtgctgtatgaaattgtcccttttatttctgtatattctcagatgagatgcatacatattggttcaagacctcttgttgcctctttttaacattgtctttgtatcactcgcagcccccaaacaacaggttaaaaccagcccaactggttagtaagattgattgagaaaaaagaaaaagaaaaaagtcaaaatagtttatacaataaaactattaggagactatgaaaagttcgctaatgcattcaatagaacctgaaaaagagctaaatatgtacctgcaacagagaggaggagactgactggcaggagaccttgcaacatgctgggtgattccaggagcacggtgtctgctcttctcgctcaggtgggtgctgctgggtctgtccctgcctcctctccagtgagacagaatgaaactccctggttcattcttgtctctgattcaggaagtgtttactaaaggtgttgcgcaacctcgaagctgtggtcctgcaacaatggcccagcaggcggaagtcctggctgcctcctggctctaagattacttgatctgaactattgttttgctctcctttgccatactccccactccaaagtagtacatttccaacatattactatagccagataagctacaaggaaagaggcaactgcattaatgagtcttgaaaaacatgctagacatttatttacattacggatatgatatataaatatatgtttaaatatatttttatatatatacagttgtaggaaaaaagttattaagaatgttatttttcccccacatacataatgtggttatgtaaagcaatttctaattcaacctaattactatatagcattctcttttccattattttatgttctattcctcacacaagtgtactctcaggaagtttgaactatcctgaaataagaatgtctgacaatataagcacaataatttttagatccttgggggtatttgtgtcataactggcaatgaggagtgtggaagaaggattcaagacccaaaggatacaattttaggatctgtcactggtggtagtaaggctaaactgggcatgtctaaaaatcatacttataaccaataaaataactaatatcaactgagctgcttattaagttttaggtactgatagggtttggttgtgtccctacctgaatctcatcttgaattgtagctcccataatccccatgtgttgtgggagggacccagtgggagataattgaatcaaggggcgggcttttcccatgctgttctcattatagtgaataagtctcataagatctaatgattttataaagggcagttcccctgctcaggctctctttgcctgcctccatgtaagatgtgtctttgctcctccttcaccttctaccatgagagtgaggcctccccagccatgtgaaactgtgaggccatgaaacctctttttaatttacccagtctcagatatttcttcgtgatagtatgaaaatggactaatacaggtactctcctaaatctactgtacttgttattttattagtctttatgatactcatgtattatgcatttacaatcattttgcaggtgaaaatttggggttttaaaggcaaaattcaaaagattaagaatcagttgtcccctcattgtatagattaagaagattaagcagataaagtcacctatccagtaagtggtagaagtggaatctgaactatgtgttgtctgggctcttagtcatatactctaatgctttcccttggcttagctgacttgtactcccagtatcatttctattgaaaagattctgggagaatagaaataattatgaaattcctaaggaatagaaattacgctgaggaccagttattaccacaaaacctagtcctagtccactaaaatcatgcatcattttacagattctgaaacacattctcatactagagggattacagtgattattgatgtctccaaatgattatacagtcatcaactaaaaccacaaaggaatttttgagtctagttactgagcattttaaccatcaggattgcgattcacagatttcttgccttttcaacccaagttccattgctttgtcttttccagggaacagaaaggatacttcaacttttaattattacatattttttctccattaattcaacgtaattttacttacagctattatgtgtcagacactgagattgcagttgaaaaaacacaatcatggccgggagtggtggctcatgtctgtaatcccagcactttgggaggctgaggcagacagactacctgagatcagaatttgagaccagcctgcccaacatggtgaaaccccatctctactaaaaaaaaaaaattagctgggtgtggtggtggtcacctgtaatcccagttactcaggaggctg

SEQ ID NO: 587224 - DNA, 4001 bp, Homo sapiens
cttgtcacccaggctggagtgcgatggtgccatctcagctcactgcaactcctgcctcctgggttcaaccgattctcctgcctcagcttcccgagtagctgggattacaggcacgcaccaccacgcccagctaatttttttgtattttagtagcaatggggtttcaccatgttggccaggctgatttcaaactcctgacctcactcaggtgatccacctgcctcagcctcccaaagtgctgggattacaggcgtgagccaccacgcctggccgttacttttatttttaatgaatgaaatacacattcttacatttctattttaatttctaatatgttaaacatcgatataaatccacataaacaaaagctctttgagaatctcaaaaattgttcatgtataaggcagttctgaacccaaaaactttgacaaccactgcattaaaattttgtatgtgttatgaactgaatgtatcccacaaaattctatgttgaatccctaacccccaatgtgacagtatttggttatggcctttgggaggtaatcagggttttaggcatagagtgggaccctcatgatgagattcatgcccttataagatgagacatcagagaatttcctcctcctgtctttccctgtacacaaagaaaaggtcctgtgagtacgcagggagaaggtagctgtttacaagccaggaagagaacactcaccctaatctaaccaggctgacaccctggccttgaccacacctctgctatgctgcagaggtaattatggcaggataggaagaagagtaggaagagttctcaaaaatttacagtatcaccagggaggcttacatgcaagtaaaatgtttggatatgcccgtatttttttccttctcttattacatactattctgaatcttgtcagccagagtcagtacatggcatgtcttacttcctccctctccacagtggtccatttgcattgtttggagataaccacagtttatttagcagttctcttactaatgaacttttacagtttttcaatcattttgctgttaagtactatattagtcagctcccactgccataacaaaatagtgtagactgcatggcttaaacaacagaaatttattttcctcatagttctggagaactacgatctggagtctccctctgttgcctactgttgcccactgcactccagcctgggcgacagaagggactcggtcacacacaaaaataatttttttaatttataaaaaagacaggatctctgtcgcccaggctggagtccagtgggggcgatcttggctcactgcagcctccacctcctggactcacgtggtcctcctccctcagcctcccgggtagctgggatcacaggtgcgcaccaccacctcggaacatttttttaaatttttttgtagagatggggtcttgctgtgttgcccaagctggtctccaactccgaggtcaaacaatcagctcgcctcagtctctcaaagccctgggattacaggcgtgagccctggtgctgggccctgagtcgcttctccatccggacggggcgcctaatcccctggaaaaggccccgttgccagggtgacaggaccaaagggacccagacagggagggccccgggctttgcagggagtcgggccgcagtgtgacgagcgcccggactagtgtcagggtctgggctggctcaccgggtcttgacgccaggaggccgcagagcccggccagcagcaaccagaggcggaacatggtgcggcttcggggctgccagcgggaagccgttgggaagtcgggaattgccagggacgcggggacgcgcggacgccgggggccgctccccgcacgttcatgggacagcgttctccggaggccccggagacggggtgctctcggtgtttagcgtccggaacacgaagggcccgcagcgtgcgccccgaggctaaaacatccagctcccttcccggcgcaccccagccgcgtggttgctggagccactgaccacccagcgccctctgtcgagatcgcgctcgtagtcctccactaacttttcgctttgtgttgctggaccttaagaactgacacacttattcacagtcagcgtgtgctctcctgcaccagacacttcccagttgcttttttttctttttgggacgggggtgctcactattctgcccaggctggtctcgaactcctgggttcaagtgatcctccctcctcaacttcctgagtagctgggattacaggcatctgccaccgttcggggcttcctaggtcctttcaaaagcgaatgtgtaatactttctgaattaaaatctatatacacacctaaatatatattcatatttgccaaacctgtttctaatattttttcaaaactatttagccagatgtgtgaacattccaaagaagggaaaagtgagccgcttttcaatatgaaatgccagctcttcatatttttgaagagcgccagctgcatttttttccccactgacgctgcccaaatggacttcacaaccaggctttttcctccaatctggttctccgcaggccattggctaaaactcatgtgatgtcattctattgttcagaaacttctcagtgcaataaatacttatttcatgtagtgaaagatttagagattcttgcccacaattacagtaattacattccagtagaaaattctagcctcagcatagtaatttttctgaactcagaccggaacctgccacttaatttctcctatcccgtgttttagcagctctgactttgggtttttcctaaacactgctttactccctggaactgcaatgcctcctccttcccagcctcacacctggtctccatctgtatgcattagcttttcattcttttcaaatcccaaagaatggattaatttctcatactacataataggccaacacataaactaaaaggcctcatgggaacagagaaaaatctcacttggggaactaagacatttaaagtgaagatgtgatttttatggatgcacgcaatttcaacagggcaatctacacctgaaattaatagcatgaacaaaaacaaggcaacaggccaggtgaggtggctcacgcctgtaatcccagcacttagggaggccgaggtggttggatcaccagaggtcaggagtttgaaaccagcctggtcaacatggtgaaaccccgtttctactaaaaaatacaaaaattagccgggcatggttgtgggcgcctgtaatcccagcacttggggaggctgaggaaggagaatcgcttgagcccaggaagtggaggttgcagtgagccgagattgtgccattgccctccagcctgggtgacgagcaaaactccatctggggcaggtggaggggtggggtggggaacaaggcaacaaaaaaatacactgagcttgtatctcaataggaacagccaatgctaagctaacactgcttttaggcagctgctgagccacagctagtttcaccttgctttgtaacaaacagaagagcaattacagtaaatgcttcaactcatcaattagtggtaagtattctgaatgaatttctggctcttgtattattttgttctttcttactcctcaacctttctggtttgtatctttaatagggttgattttgtattattcttgtgtgtatgcctctcttcataacagaggatgcacttctaaaagtcgggaaacatatcctatccagaacttagatatcacagtacctaatacagtgcctgaaaaatggtaggttttagtaaacatttatgaaatttaataaaatctgatttgagtttagaaaacccaaattgtgcttaactctatggttacagacacaggagaaagcgagaatgcaatactctgaacaaggtcagtttgacatacagagtcaaacagagatgtcaaacttgcatataatttacccttatttattctttttgaagaaagaaaggatgtcctttaatattttcaaattttgaagtggcatcca

SEQ ID NO: 587225 - DNA, 4001 bp, Homo sapiens
ttctgagcaacagaccaagcaggcctttgagttcctctgaaagttgcacatctttgctgcagactctataaacaaaaaccttgcataccagacctctgggaaagtaacatgctcaagatgacattcaccaggcaccggctcagaacaaatgaggttgttataagtcagcctgaaagctgttggtggaactccataaactggaaaatttagaatggtattccctaaacccaggctttactcttttctgttttctaacccattgaggggttgcttattcccaagcacatggtgtatgccgaatgggagtccttagaaaaattgaaactcctctctccctatttgcttctggttggagctagagacaactgtctacatgcctgtgaaagcaacaaatcttatttactaaatcaaaacttgtaccagtatgtcatcatcatgggtgtgtccagtatctcgcttctgtatcagaggaagctttttaggacgaaccagttgttgaccctctactccaaggatgaacttttctacgaggaaacataagaggaaaaaatccgtctgacattaacattcgtctacagcggctgaaaaacagaattgttctaatacagttcatttgcccccagttagcagccatggacagcaacactatgaaatgttattcccactttactggcaaggaaattgacactgatatttacaaatcaggagaatataaggaaacttggaaaggagccaaagaaatcagtgtccctccatttcctccatattttcgccatgttctgcagctgtaattttattttttgtttcatttatttatttttttgagacagagtctcgctctgtcagccaggctggagtgtagtggcgtgatctcggctcactgcaacctccgcctccccggttcaagcgattcttccacctcagcctcccaagtagctgggattacaagtgcacaccaccatgcctggctaatttttgtatttttagtagagacggggtttcaccatgttggccaggctagtctcaaactcctgacctcaggtgatccacctgcctcagcctcccaaagtgctgggattacaggcatgagccaccatgtctggcctgcagttgtcgttttgttatcctcatgccaacctctggattttgtctcctgtcaaagcctgcactgttgtcctgtttgaatgtaaattactgaatttggtcttccagggatgtttgcatttaaagtcttacctttcgtagttaagtataagacctttacctgttaaagaattttgggtagccctgcatcagtgccaaccataatcttctattcatgtcctatcaccttgatagtcatctgtgagatgagccctgcttaattaaggtgtgatacttaaagagcaataaaaaggagagggcatggggtttctggaatatgctctgatttgaatcaagcctttaccaatttattgtgtggccagcagtagcatatttaatttctctgatctgtaaatagtctcattttccttatctgtaaagtggagatattaatttcaaattttaaacactttaacatacaaagcagctaatggccagcacagtgcctgccatgctgcagatatgcagtacttgtccactcctttctcctcctcactgtgggtcagaatgttcaagagtgatatggcattacacagatgcatggagtctcatgattagctgtaatctagtcgaagctctcagaaaaatcatcaacgtttaatgtttttatcacttacagtttaaagtttgtgactaaagagacacaacctcacagcataataagaaagtcctgataaaaagagcaagacatacctttaacctgaggaatgagtaaaatcatcaagaatatacacccgggaagcattctgagtgattctggtagaggagagcagaagtgcttgagaaaaggagttcacctttcttcctcctcacttccactgcagggatgaagcacctcacagataggtgggcagttttgatccacaacaaggaagtgttccttgagggagttacacaacttgctaggtgcttgaggctaaaacctggaggttgaacatcatgttctaattaaagacaactaccgaggtggtggtggtgaaggttggctggacatagattcctacgtcatgtctaatataaatttgattccagatatctgaaaacttcaaaagtggaaaaaaatcaagaatgtcttaggaaaaaaatgttgaaaaatatttatatatgctttggttgaagatggttaaattctttctatgcagagtatgccatataaaaactaaaaggaacatttgttaaatgagaaatattgaaaatttatatggcataaatcacatattaaaattaaaatatccaaactacagaaatgtatgtaataaataaataaaaggtgggagtaagtgtccatataatatagagccctttcaaagcaatacaaaaaagaataccaatggacagatgtgcaaagggcctcgacaattccatctgtatgtctgtgttctcttgttatgttagtagagttatcccatggccaatagaatccttttatcttcatttgggattctatttctcacccgcatctatatgtctctaatatttccacaaactgaacgaatctatgtcaattggaagcttccttttgatatttagaccctctgctccaaggacgactttttctacaaggaaacataagaggaaaaatccatctgacattaatattcatccattgtggttgaaaaacagaattgtcctcatacagttcacttgctcccagttagcagccatgtatagcagcattataaaatataatccccactttgcaggtggggaaattgacactgatatttacaaattgggaaaacataagcaaacttggaaaggaggcagagaaatcggagtcccttggcttaaaacgggggtaccattttaagtcaagtcaaaagtctctcctttttgaaaaattctctctattctatatctcatatactcttactatcactttttctcccatttcctttacagctaaatttctaacacagtattacctggacttcttgcaattttcttacctcaaacttatcctaccacatcccagttctagcatctgcctttattattctactgaaatggccaatatctccagtgattttaccatttctatatccaagagatattttgtttcctcatctcatttgcccttttaacaatttttagcactgttgaccacatccttccccttgaaatatactatttagctcccttgccacaatagccttcttaacttcttcctggttcagtggcaacttgtaggtatatccttttctatgtagcatttaaatttttgagttccttgaggtatttattaaacaccctcttttcctccgattatgcttgttccaaagccatctcatcttcagttatggtttaattattgctatgctatgcctcacattttatatttctagccatttgggcaacagatctttacagcaaagtttctacttaatgtcttcattgggaaggatcaaagtccttgtaaaatcaatatgtacaagacttaaaatacatttccccccagtttgtcctctgtcttggccagcagtgcctcatccctttagcattgcaattctgaaagtcagtatcatcaatgacatcccttataatcagtccaccactaagttttttttttttgcctccattatagtccaagacattctttggttacattgcaacaagtgtgattatttatttattttttatttctgagatgcagtgtcgctctgtcacctagggtggagtgcagtggtgcaatcttggctcactgcaacctctgcctcctgggtttaagcaattctcctgtctcagctttctgagtagctgagactacaagtgtgtgccaccatgctgagctaatttttgtatttttagtaaagatagggtttcaccatgttggccaggctggtctcaaactcctaacc

SEQ ID NO: 587226 - DNA, 4001 bp, Homo sapiens
aaaatgagattaggtcgcacccctacttaaaacctccactgcccaaagaacttcctacggggtgaagtccaaaccccttagttcagcatagaagactcttcccaactggtaacaacctaccttagtttgatcttccatccctcccttttatagtctgcatgaagacatattgacatttttatcatttcctaaaaagtcatgttctttcatacgccccccgccccaccatactcttgcaaaaactttcctctgcttagaatgtatctactattctacttgaaaaatcaccgatgtagcccagttcaaatattattttctctaaaaatcttccccaacatctctcagatgcgcttagcatatttggtcaccttctgcccctctacaatcaactgtgtggtgtttataggagttccataaacggtggctaaactttgaaggggcatacacatgccgaagtgaggagctggccaaaaccacagttaaagaccatcaggatattccactcacctaatgcaggtcggtaatgactgacaatttatattaacatttaaaaatacagtcttatttacatttacaaacacaaaaaaaaatcacagattaataaaactccggatgtataatcgtcttcaccttaaacatcggtgagtgttaaccatctagaataccaccggaaaagtagttttaaccagaagaaatttggcaacttcccattcaaaacattgtcagagtttcaacatttccacactggggcaaatttacttaatttcaaataaagcagccaaagataagaaaaacaagtaattagtttcctgaaggtcaacagtcctgcgttgaaatcttctatcatcacctttgaataactttcaatcaatgatttagtaaaaactcccattctccatcatcctctgtcgctgatagagaaaatacagccatgcaaacaattatatcatacaaaatccaaaataaacaacttgtttccagaaagacgccagcgtgctgacaatctgcttccactatgtttgggcatctccaatacaagtatcttacatagtcaagggcagtttcacaattcaaaaacgatttcacacaaatgatttaattcctacaataatcctgtgagttcaaaagagcagggattatctgtccggatttaacacagtacgaacccaataaaaacacagattttttaagaatggtttggctatagaaaggtagcacatcgtttacaaaatattcttactacaaaaatgacccaagagaaatgagcgtcctcccacccacctttattccaccattaaatttagctgtgttgacccaaggataccatgaacgtcaaaatttcaaattataacctgcagcaaaagtttcatctctcagtctctttccaagcgacattaactccacgagcgagagccagctccctccctgcaggcgtttggaggactgaacgcccgcgggcgcgcccagcctgcagggctccggcccgccgaggtcagcgcccgccccagagcgggtttcggggcgtctgggggacccggggtcgcgcgaggcggcgagggatggggggacgctgggaacggctccatcgaacaggacacggaggaagcggtgccgggcagaggacccgggccaagaagggcttggggcgccaaaccccgcgcctcgggtgcgaccccggtccgcacacacctggagcggccgcgccccccgaccccgggtccgatccccaggccgggcccctccactcccaggcaccacaggttcactccgagcgccccgtccctaggaagcagccgtcccaaccgacccggggcgcggacacccacctggccgcgccgcaccgaggactgggcccaccaggccaagcaacagcaaccaccggacacgaagggtccccgagggaaagcgcgcgccagaccccatctcggccgattccgcaggttcctctcagcactcggtcgcctccacctccgcctcttccatcattttccaaccctgccggggccccaagtctggccgggaagcgcgcgcgcccgacgagcacgcgcgcccgacgagcacgcgcgcggcactgacgcaactgagccctcggtccgagctcgctcccgacatcgcctagctgcgctgacgtagggaaaaatccagtccccggcgcgagaataggatttctaaaccggcggtggcaaccagcactagtcggcccgccagtcatatccgccccgccccgtcggctgccgggcacgcccacctaggggggtcgacggatccgattggagaacgcattcggcgcaaaagaaggaggagcatgagacccagaagaggaatcgagaagcagaagcagagggcggagtagccccgcccgtctgctcgaccttttctagttggttggcggaggtgcgcggagcgtcgagctgcgcgtccattggctgtttggcggggctacgcgggcggggctacgcggaaaggcctgaccacgcagttcttgggtctgtgctgctggcctggggttgtggttgaggccgggtctccgctcctgtgcccgggaagatggtgctaggtggttgcccggttagttacttacttctgtgcggccaggcggctttgctgctggggaatttacttctgctgcattgtgtgtctcggagccactcgcaaaatgcgaccgctgagcctgagctcacatccgctggcgccgcccagccggagggccccgggggtgctgcgagctgggaatatggcgacccccactctccggtcatcctctgctcttacctgtaagctaccagtggtcgaggcgggtggacgtggagggtgtgccaggaatatatgggtgttaagggaaggcagggttggggggacgctgcattttttcagaccctgcctctctgaggtcgttccggaggcaaatatcatgaaccaggtttctcacagcccgtgcagagaaaactcttgtgtgtcagtgacagaggctttgagatccccaaagaggaaaactgggtaggagtaacatcatatagcctctggaagaagggcgtaaggttgtgctttctttgccctgcgccctttagcccaaggagagtattagtcggtcgattcggtgccagtactgagtaaggcataaatggagtaaatgacttgtctctgcctacaaggcatcttttaaaaaagcaatcaatattcttaccgttgcagaatcacgccattttttaacatctctttttgatcaaacaagaaaaggcatttgggaaatgcaaagaggactgagaatactttggcttaaattttgcccccagaatcttgttgtttgcctactgaagagatgaaaccatggcagaagtagaatccttatagaaacaggaccagaaacacctcccttctccaacaaaaggttcattttggtggctgtccgtttgacctgctgtgcttcagtttaattggcttggaaaggggtcagcagggtgaaaccgaaccccagaaaacttgatgaagaaatgtcttttgcccgttttgattacgtgcatgcaaacagcgatttgcaaagaccgtatgatgatgatcatgatcttactggtgaattacagacctgatgaatttatagaatgtgaagacccagtggatcatgttggaaatgcaactgcatcccaggaacttggttatggttgtctcaaggtgagtttttgttttgtcgtaagagcaaacccttcgataacgaaataggaatgtctgaatgctattacataaaagtataagaggtacaaagttttttgaagaatttcctcagaaagaccgttactggaaatttccagtatggccagggtcagtgactgaacaagatatttggtttccttatgaaggagcaatctctgtgctaaaaccacccaggtgcaaagaccaacctgtctttggttcctttggccactgacagattttgaaactaaaatgtcacccctgactctccttcaaggcatgaacctttcctgaaagagcaaaaggaagtctgt

SEQ ID NO: 587227 - DNA, 4001 bp, Homo sapiens
ccagataagattgtgtatgggtaaacataagaacattaccaggtataaaattatatagttaactgcaacctaatgaatatcttccaaaataatagctttcattgttaactattgggttatctaaagtaatagggaggaatgtttaaaaatgtagggctacttgggcactatgggcatcatagactatcatcaaattcagaagtatttcagtgactttttcagcagaatattgtgagaacaatattaatagaaacaagtttcacttttctagaaatgtatctatgagtattttgagacctctgaggaatggggggaaaaaagatatgtagatttttttttttatttcaatcaagttctatttcattacatgttgtttgacttctctttaggtacaattaattctcatccgacagcacaggcacagttgttcagttggtcaattaatgttttcttttgtttaataatgcaattataatgtattacatctgatttttgtttaataatgcagttatatatgatttagccctcattctattttaaactcttctctgtctttcatcctagcagagctatgattcggaagttgtcttaaatacatggatttgatttttggccaggaagttagttctgtgttgtcattgggatggtgtgttttagaaaagaaaatagatctagtagagttattaaataagaaatacagttccagagacatccttactaaatcattatgcaaattacaaagtgttgactataagcctgtctttatatgtttatatggatcaaataattgaatttgaagacttcagtaagctgtgtgtatatatcgcataattattggtataataattactccattttatccttcttttgggtatagtattggtgatgcacaatgaggaaatgtaaaagaatatgaaggctagagccagccgtatgtgtgcagcttttgcacggcaacttttaggcaagtgggaattttgtggggagcttggataactcctcagctatgtactttacctgtttcaatatagggtttagcacaaatgtgtttatacatggaaatacgtaggtttacagcttggcttttaacatgcttattatgtgatcactagtaaaataaccagtgacttgaaaattatttgtagggtgtgtatagtgtgtcatcaaaatggttcatctatcaataatatcaataatcaatctcaaagacaaaaagggttccttttccagaactagtcattttgaccctgtcattctgcttttaagaatttttctcaaggaaatatcccaaagtgcagattttttaaacagccatgattcatgaagatgttaataaaattttatttagtagagaaaagacataatgaatggaacaatatgtagcttttttttcctctattttggaaaatattgtgcaaacataaaatttgttaaaatatataacaattggaggaaataggacaaattttagaatccatgtttcatatagtggtttaaaatatcctcactcaaaaagatacacatacttatgtatatatagttcgcttttgcagagaggtagaaaatctaccaaaatgcaaatggtaatggtctttcgaccataaaaacatatgccattttttttcaaaaggcactttaaacattcatcaaataatttgacttttatgtaaaatgctggtgtgatggtacgtaccttgagtttgaacaatgagccaaagtacaggcagcaggacccaagacatggtggccactgcaggtagctgggagatcccacgcagcatgaagttgtggtctccccagtgtccagttttatcttctccaatttctctttagaagttgaacaagaaaattaaaacccccacttttcgtgtgagattggggaatgtttcttaagagtgttgggaaattgtcaaaaaattgcagtgtcaacatcatgagaatgttcctcatctttgagagatatttatggctgtggttatagctcattgaggactcacatctggacactgtttgcccctggtgctcctataagcagtgggaatgtgtgaactgagactgaggtggtcgcgtgcatatctacatactcaccaaactggaccattacgattgttgttcagtatccttatagaaataaatccacatatttaggacatatatcagtattctgtacatattttgagatactgtcacagtgaacacagaatctaaaaagcaccaggtaaagtcctacaaaccaagatactgaaaatctctctaacattcagtctcctaatgagtcaacaggggatgctgataattttaactgcctcaagattcttataaaattcatatgcatttgcacacacacatatgcacatgcatgtaaaattgtaaagaaatgtgcatgtataagaaatgtacaagaaatttaaataaccttgacagtgctggccttaaccgaactatacaacatatgaagtatgttcgaggtgtactttctgagttctaccttatacaataacaatgtttctctgacaaatatggtagattttcatgattataatatcacaagtttattatgagaaaaaagttgactgccaatgatccgacatcaagaaataacttctgttaacgtttttacaatttattttcatcttcttatgcagaaaaggaaagctaaccttattgggcaaagggtttaagaaacttatttttttttccatggcactatgacataagcattctcatgacattgaatattaagacataattttagtgattttagaatatcatattttctacatatgtgtgtgttgagtgtccatgtaatgtttggttgtgtatatttctttaattgaatttctggtgacttcaggataaatgtctagaagtgctattatttagctaaaaagggtaaatcaacttgagattattgataaacattgactcagtgcttttcagaaagttagggccaaattaaatcattatgtatagttttcccaatctaaaaacccataccttctaactgctgaacttaacttttcactgatacatctgggagtttcctaacatctaattggaactttaaaaatcccctctctatgtctattcttcactttgttgctgttctaccttcctttaaaatagtaacattttctctataattttgcatttctttttctggtccagagataggcatccttcttatatcctttatgacccgccattaatattttaacaaagtataatgctaattatgtctctatcatcaaataataaaagaatcctggaatggtgaactcttatcagtgccctaccctttagcacattacatgttgttgtcaagtattttagtttatcatgattttgacccccatgttactcattatttttgtgtgtgttttctacagatgtttgaaattattcatgtgtaccaccttctttgctcgcaggtccttttagcatcagttattttttttttaattcttcattaaacatattcttttttattatttctataggtttttggggaacaggtggtatttggttacatgagtaagttctttagtggtgatttgtgagattttggtgtacccgtcacctgagcagtatacactgaacccaattagtagtcttttattcctcactggcttcccatcctttccccctgagtccccaaagtccattgtatcattcttatgtcttcacatcctcatagcttagctcccacttataagtgagaacatacagtgtttagttttctgttcctgagttacctcacttagaataatagtctccaatcccatccaggttgttgcaaatgacattaattcattccttttcatgaatgagtagtattccatcaaatacatggtgtatatgtggtgcatatatatggtatatatgcatgtatgtatggtatacatcatatatgtgtgtgtggtatatacatatatacaccagtttctttatctactctttgaatgatgggcatttgggctggttccacgtttttgcaattg

SEQ ID NO: 587228 - DNA, 4001 bp, Homo sapiens
agctgcatctcccagaaggacttcccagagcccaatccagggcaattctcacgtgacacacagccccaaccgcacccagaacacgacctctaaactgccagaagataagccgtcttttagacggtgggtccccagggccttcccccaacacacctgagacggccctggtgacacttatccctgcagctcccctgacttccaaagccttccagtttggacaagatgaaacgggtgccccctgtcagaacctctcatgctttcttatggtgagtgtgtgcagtctgtctgcacaaacggaaacacctcccgttccagagtgactctagaccacagctgactaccttgaaagcggcaagtattctgagtggtaacactcacacaggtatcatgaagttcacaaccaaagggcgtgctttggccgcagaaccacatgcatgtccgatcgtgtctggttttccagcgcctgcagatgaggaggatgcagctcccacagacaggcccggccgcagcagtgagaagcaactgccgagtctcagaatgatgccagaaactaaaaaccatgaacggatgaccagagcctggggaacccaacagcactgtgcacctcaacatgaggggaaactgaggcacataattgtccccaaagttaggaagagacagattgggagtctgggcagggtaagtgggtctggcgaccacagacactgtccttctcccagggtgtgtgaccctgtcagccccagccagtcctcaaacgccgcctggacccagccctgctcactggccatgagcagctcctaaccagaggctaaaccgacctgtccactcgctggggctggggagggactgagtggcctgcacgtgggaagactttgtcacctggaaggagctgcactgaaggccacctccccggcccatgaagcaccctggggtcacacagctgggctggggcacgagtgggccgtccatctgtgctatttatagccagacgggcaaggctagcttatcgccaaacacaagctctgctgacattccaagaaaaaaaggaacggcgctgggagccccttcatctcttctggaagggggtgggtaagatgcgtgtcaaggcctctgccccgcccccccgcagtcctaaccgcagggacagagcaacgggacccggcggcgacgtgggagcggggagacgccgagagcctgagagagggggcctcggagccatggggggcgcgcccctgagacgacgcaggggcgctcagagcagagcccggcctgcagcccccgcccgcccgccgcctcagggcagggcaggcccggcggggaggcgagcgaaggaggtccggggcagcaggctgggcagggaggcgtccgtgattccgggaggccgcctcgcgaggggaacggcgcctgaggcttccccgcggggcccctgccctctggagatcgcgctctccggggcgccgggcacccgcctccgggctgggcggaggggcccctgcggctcccggtgcaggcggcgtcagggctgcgggcgcggctcccgcctgaaatcccagctctcggggaggctgaggcgggcggatcgctagagcccaggaattcgagaccagcctgagcaacacggcgagaccccgactctgctaaacagagtcggccgggagcggtcacgcctgcggtgtcagctacttgcggggccgaggcgggaggatcgcctgagtccgggaggcggaagctgcggtgagcggagatcgcaccactgcgctccagggcgacagagcgagaccctgcctcaaaaaaaaagagggaaaaagccccgagggtctctagggcggggtctggggacttgcgggtctcgggtctctggggctggtgtgcaggatctcgggcgccccgggccgggagagtcctcaccggtcgccacatctccgaccactgctccgctcttctcccgcccggcgccgcttagcgtctcgcagcccagcaggccctgcgggagggcgcgtagtgcgcacgcgccggagccagagccccgccccgtgggcggtgggcgaggctggaggccacgccccgagtcgtgccggcctccgcggcggggcagcgtcccctggcggcccccagaggcttaccttttggcgcccggaccgcgcctcctgagagcggagggttccagtcccgccctcggcgcactgcgcattccccgggcaggcacctgccggaaggaccgctgtgagaagcacgtggataatccggggagggctgagggcttcctgaggtcctcacggcccggtatccgcctctctttaacactccgtgctatagtgtgattagcgtgaatctctttaacctcaggactccaactcaccacctgcctgtgtgagggccaagatgacgcccctgactgggaactggaagacaaccaggagagtggccaaaggggtcctggagcagctcccgtgcccatggggagaccttcccagggccagggcttcagattctggggttcactttgcagccacccttggtccctgtcacttagcttcttatgggaacgtcagtgacgtcacagcctcctgcagtgccctaggctgctgctactcactctgtgacagccctggctgggtaggggcccaggcccgggcatgccatgcagccagcaaggctactgctggactgacgacctcaccgctactagactgacctcaccgctactagactgacctcactgctactagactgacctcaccgctgctggactgacctcaccgtccccgaacatgccagggatcctcgggcgccaacacgggtcctggcacttactgcctgcaagccctcctagaccccactgtgagcatgaaacaaaacaccatccttgtggaatccacgagggctcctgagtcagcttggcctaagggtgccacagtagctgaaagtgggaggttttcaggcctcaaggccttttcacaactctcagaagtggcccctcctcctcccaccaatggcccctcctcctcccaccagtggcccctcctcctcccaccagtggcccctcctccgcccacaagtggcccctcctcctcccaccagtggcccctcctcctcccaccagtggcccctcctcctcccaccagtgacccctcctccgcccacaagtggcccctcctcctcccacaagtggcccctcctcctcccacatggctcctcgtcctcatcttcttacagtcctcttgctcctcccactgggactgaacccaaaggcatctcttcaatggggtggtccctgcctagggaaagccggtgcctccagccctttagtgccccttctgttatggcgtgtctcctgtgaagtctctgtcatccccaaggtcaagtttgctgggctcaatgattctgtgtgccctgcatcactttgctagcaggacagggattggcctccagtcttcagtccctcatccccaaagcccagactagaacttcacagatggacctggggcccctcccggagccgggctttctggagtgttctcatttgctaacatctgcctccctcggcaacctttcctctgtaatggaacaggtccagaagagccatgtgggctgacacagtaaggcctccaggcatctgtgccgtgacgtgagcaaagtgtgagctgcatggtgggatatgccatgccttgcctaggggcccgggcactgccatcacagggaggcttggccaccaaccgacatggctgccccaggtgggaagggtcggatggaggactctgccacccactcttgggaaacacccccaaaatgaacgaaggaatgacctctgtcctgttttagcatcccgggagacacactgtggcctaggatcctgcccggctgcagggctctggatggggcgtgacatcctgcccccgagggtgtggcggggagtcgatgtcacacagctgagccacagggcccagggatgtggtgaaagctttccccaggtcccaagtgcccacagcccctgccccatc

SEQ ID NO: 587229 - DNA, 4001 bp, Homo sapiens
aggagaaaggagggaaagatacctaaagaacaagattccacctaaatataatatttaaagcatctacatcaaaatgcccttttccaattaatcaaaacttgcattctttgccacccccaattactgaggttggtttattcaaagcactggggtcgcatcgtgtcatgagagaagatatcatgtttggtcaccaaggcaataaaaaattcccgagaaaaccatgtgtcataggattgtttgaaggattggatgacataacacgtacagtactcagcactgacaatcagtatgtgtttaacaaatgtatgttcctttgagaactgagggtttgtggcttagagatacggaaaaacccaactctgaagcccagagcctgctacaacaccctgctgcgactctcctgaggagagatgttaaggaatgggtcaccttctaaatctggatgcttctcctccccttctgtctcctgctccggagactgcagaccctgagggaggggaatgaggagcagaaagcagactttcttagctgatgtcagagtagaattactcatagaatcagagtagaagggtagagttggtagaaacttttagaggtcatttagttccactttaagaagagattgcattccgctaacactcaagacctcctaggtacaaggcactgtgccagactgaaggcggagacttaaagagagtgaggcaaccctggctctctggaagctatatgatcaataacccggggaagttagaggggaaacaaatgcaaggcaggcaggagttacctggttgatggaaatgaccgccagccggggtatgaccacttggaggatgacctgcagcagcgaggtgcccaggccggccaggatggcccaggtgagcggcagcggcagcatactgtaggtggcgaagagcgtgaagagcacgtagcctatgccgtcgcccaggagcccgtagccgaggcctgctgccaggatctgggtggtcatggccacccaggtgaccacgccgctgtactgcaggtacgtgtgggaggtggtgtccttcctgaccaccaccagggcgcagatcactacctcaatgccggtgaagaagcccagcaggatgcccttgagcgggtccatgggggccgaggccaggctcaagtgtaggaccaagagagtgagtttggtcagcacgtccagcacgttcatcaccacttccgatttgcgcctttggcccaagaaatagcgctggtagaggcgttccaaatcccgagatttgaaggagttgcgcagggtggggaaaatgacccctcggtagctatagcccccattaagaaagaaatccgagttgctaggggcacagtcaaggtgcaggaagcccaggtcgcccccgcctccgctgccgctggcactgccgctcccgctgcgttccgggaagactttggtgccgcaggtgctgtgcgctcgctctcccgggcccagcgagtagaggggcagcgccgagtcgcctgacagctgcggcgcgtggtggttggggccgccgcccgcagggtccgaggctttgcccgagcctccactcccgctgccgctgcctccccggtgcccgtgaatgaagcgctgctccgtgatgtgtcgcaccgccgtctgccacagcagccgctgcggccgggaggcgctcctgccgtcgccggccgggggcgtcgggtggatggtgtagagttcctcgctgcctgtaaggcagcgcacatcggagagctccatggctctgggccgcagggaaggaggcccagaaccttggggaggcagccggaggaggggttcctaaagactcaaaggcggcctggtaggagcttggcaaggatcctttttatcctaggctgccccgttgcaggagccctgcgctagggctccctgtaggtcgggtcatactgtgcccaggggcaaagggcacctggaagatcgcggcggacctcggcgtccttgcgtgctgctctcccgccagccggcgcagcttgggtacgcagcggcagtggctatttgtcctcaggagccgcagcgctgtgagccacgcagccccttcctgggctcaggctccttggttgattctaggctcagcgttttggcgcagcctttgctctccaagagacgcctaagcgcctgggcgccgtgcttctgctgcgcgtcgggcgggtcctggctgctgcactgggctttggacgcccactgctccgcggctgcagggggcctggccggcggtgaccggcggcagcgatgggtgcgaagttagcagatgtggctggaatcatcgcccttcggagaactccattgcgccgggatggggagcaggggcggagctgggggcgggggcaaagaaggaggaggagggggtcacggtgaggtggcggggcgccccgcgacagggttggagaggtggtagcctcggcgctaacaattcaccaaatagttaatttggaggaaggggtatgctgaggctccctcctaggctctttcctagttcgggagcaaggactgacagcgcagcgctggctctggccagaagcatccctcccggagggggtgtggggactctcgctccagggtcccagcctgagctataagacgaggtcaacgctttcagctgtgctttcgaagggtcgcagcacacagttctcatcccctttatttcgttctttggagtccatttggctcggagctaggaggatcaggagaggcgggggaaggaaaaagtggtgagggctccaaagccaagagctccgagaacgaagagaagccgccggtgcggatatctgaggctgagaaccgaagcttggcggatgaggcgaaggtttggaggagaagggaggcccgaggccgcgtggaagtcgacagagacgcctctggatctagggaagcgccgccgcgtgccaccctggagctctgaaacgcaccgcgggcgccaggcgactgggagaaatttggagacctgtcagagtggtcagacacccgcggtgacttaaacccgcccccgcgccaagccacgcccccggaaccgggccgggggtggcggagggacctgccatccagatctggccaggacgccccaggtcttgtaggcagaggcacgcgcgggccggcgtgggagaggaccactgagggctagggccggcgggcgcccccggccttccctgggcgcactgcgatccagcgttccagctggccgcgccagccggttcctccgctgttcttttttaggcattggctcttgtcctctgcaggtgcggagccaggactcgtaggccgctttgcgcacggactcggagagcccagcgcgacggaatacagggtttccttttcgcccttcctacccgtgcgtcttttggcaaagccaactttcgggctaaacgcaaaatcccccaagaggccgcaatcatagaggcagtcagtttcctacaggagcctctttactacctcgatccgaagggggtggagggtacgggacatcaaaatggggacgtcccctgcctgcctcgcacactaagtttctccgcttacaatagggtcgaggaggcggacgtggagaaaggcatgtccaggggccccgcctcgccctagcccaggtttcccgcccgcccagactcagccgagcgctagcggacaaagcctgcggcggagcttgcggcggaccaagtcgctgagcggtgggagcttagtgccggtgctaatgacagatgagccgcgtcccggggtgcagggtctgcagggcaaacgcggccgccgcagtcccgcagccggatgcaggtggaggagcggtggtggtcaccacctcctccaccaagactgcggctgcagccagtggagcccgggcccagagcacagtcagctgatggccaatgacgtcaggccctgggcgcgttcgcggctccccgtggcgtcccatgaaagcccaaatgaccgccttgccttgccgccccctcagtccctcctgagcaagaagagaagctcccttccctcctgcctg

SEQ ID NO: 587230 - DNA, 4001 bp, Homo sapiens
ctactcctgctgtggcagtgctgctccccaggaattcaccctcagctgtttccttctaggttagagttttgttagggcttcaactgtcctccatacgcatggatggatgtgttcccaactcactcttgagccccagaacaatacattcaatcacctactggggtctccatctgaatgtaccagaagcatgctcaactcaaaatgccctagactgaagttgccattttcctcctaacactaactctcctacaatccctgccttggtaaatgagcccactgtttacttgatgcccaagccagaaatctcaactcttcactattcagatacaaaatcctgtggattctaaccaacctctcagcatttctatctacccaaggaactgcctctccgtgcatgaagccattatcttcaggctggagcaggacaatgacctctagtccttcctcttcactccacatttccaccagaatgtgctaacacagttctgattatgccatactcccttttcatgcaaccattccaaaaacatattctgtgtgtgacactgattccatgggatataaatggtgttgtgtgacaaagagttctatgatgacacaggtttacaaccaaaaatttgaacacagctttagtattttttgtagcttcttggagccctgcatgtctaatgtatattttgattctccaagagggcaatacagcagtaaggagcttctcaaacttatttggccatgtaattcttttgtcatgggacattttaaggtatcagtgtttaatggtgacaaatattattcaatggctttccattatctacagcacacaattcaaattccttactacaggcctaagaacaaggactgtgaagccagagtatctgggttcaaattatgactgtgccatttgcttagctgtgtgacactggacaaattcttctccatgcctttatttccgtatctatgaggatgacaataccgtgtgtcatagggtcagtgaaaggattagagttactattatactgatagtccattcaaagtgtgtaagacactgccgggctcatcgtattagctatattcttattcatggtcttttatcagccgtcttctccatctttacctcctcttataaaggtaggtctacttgtcttttgtgtcctgggactgcatctccatcgctggtgttgctcttctctctgcctgacgttcctcgccagtccctcgcctttcctcctactgatctgcacctgtgagctcaaacttttccatgtttcccaggcagacttgtgcacttgcacagtcagcaagtatttatcaggtgaccaggatgtacctcacatttctgctgggaggcaggcgtgtcatgacattgaataccctgactccctgtacatgccaggaagtgtgactctgcgacttctcacatccatccttcccttctacacccagtctgctatagccggttttagcctcgtcccctcatcccattccccactagacctcaaactgctccagagcctttcatctttgtatccccagaacctagaatagtttttggcacataatatatgcccaataaatatgtgtcaattgcatacatgaatttgtcttggccaccgtgccaagctctccactgcctgctacgatgtgggaccaggtcctctctgggcctcagtttctttaacggtagacaagcagagtaaaggctgcctcactgcgccctgagaggctgcatcgcgcactctgtgacctcgctgttccgcctggcgcgcggtgggagcccagggcggtatccaaattctccgaattcttgaaagtaagcggagaagactgcgcaggatctgagcgggtcacacccagggggctgcgtgggcaccctgcggtcccctgcccgcccgccggccccgcactcacgctgcgcgttgcagttgcctcagcaagtacgcgacccgggctcgggcggcagcggccatggcgcttggagtcctcttccctcctcgggtcgctacaccgccccctccgccggccaatcacggaggctgcccgcctcccgcccctcggccgcgcctgcccacccgcttcgcggggtcacctgtctaagcctcaagccagtcgggctcagggccattttcccacggagtaagaaccagaacgccagctgccccagcggcgctcgcaccatccacccttgaaattgccgtagaaggtaactgctccgtaggcctcgggttctgccttaaatctccttacttatcaactctatttttcacatgttgaggacttgggggaaggaagaggaacagggatattctttttccactgttaatcctttaaaatgttactttcccttctaagagtattttaagtgatcaagaccctgcctttaaactgttttaacagtaaacaagaacctagcagagcccgagggtttttgttaaatactgtgtgaatggctttgcttttgatgaaagcaaaatcaatagttaaaactcttacatcaatagttaaaacttgccatgattagactatgctccgggagggcttggctgtgccatatctgccatgtcccagtggaaaagctgattaacgataaagctcaactttatcagaaagtatccaaagacagtaacaactaaacatttgcatttttagtaatctgttattatgaaatctgaatcctttatgggagatattaagttttacagaaatgaatttactgcgatcaaactggaaaagattgatggacaggaagaccaaggacagctatataaacatttcacctcctaatcaaaccagctcaggccaacttgacaaatgaatcaaaaaataatgttctatgagaacacatgtacacagggaggggaacaacacacattggggcctgggggcaggggatagaagggggcagagggacttaatacttaggtgatgggttgataggtgcagcaagccaccacagcacacgtttacctatgtaacaaacatgcacatcctgcacatctactccggaacttaaaaaaagataataatgtcctaattaaggatcttatgggtctgtttctttcttcccccaaacaaaactatacctgacgtcaagcttaaaaacaaacacacacacacaaacaactggggatataaacgtagagaaagatttaagtgttttctggattaatgaggattattaccattagtcaatgaagcccaaattgatcatttacaggaaatccatgtgttcagtgttgaaaggcataaaatctttttaaaaaacagacatcagttttactactttgaatattatatttgataccaaaagaagtataagtttagaagtggtatcactgaaaccattataattgaactgctttttttttttgagatggccccttcctctgttgcccaggctggagtggagtgcagtggcgtgatctgggctcactgcaacctccgcctcccaggttcaaacgatactcctgcctcagcctcccaagtagctgggactacaggtaccagccaccgtgtctggctaatttttttatttttagtagagatggggtttcactgtgttggccaggctggtcgcgaactcctgacctcaggtgatccgcccgccccggcctcccaaagtactgggactctacaggagtgagccactgcgcacggcctgctttgtgtttttcagaaagtaaacaaaaataatctgtaccaggtatccaggtaaccggcttcaagtacaatttctacccagtagtcagaaagttaaaagtcacactagataagacatctttattacttaatctttaaaacagtcacttgcctattcaattctgaaactgtttgttttctttccctcccccgcactcccgctctgatacacaaacttgttgtaaaaataatgcagaaacatatacgtcaatctaagtctctgaaatatggccaactctacctcgccgtatatccaacattaaaaagaaaaaaaaaggctgtttaagaatagaactcattcccgg

SEQ ID NO: 587231 - DNA, 4001 bp, Homo sapiens
gtgtttgttttaatacttattattaaaataaaaaaataagtatttacttattggaaatactatgattaattatttaaggcttaaattggtttggacataaaatcatttttttttcttagtggctgaccataattccttccatactgaatccagaaaataaaattagcacagatatagaacataaacagaccattataacaaacccttatgaataacctaatgcaataataaaatcacacatttgtccagaataagcatggtacttattttcaggccaagagaatttgcattctgtagcagagtgaaaatggcattccacagtcagcctaagcacttggtggagactctgagactagagagagcagatgcatttaaattgaacacgtgcttataggcattaagaaaagttgacattcttattaaagagaccaattaatctgcatcagttggaagccactttacagtcgaaaaagtgctctaggacctaatataaatgagactggagtagaaagagaatgaaaattcacttttctacaagggagccttttctaattgccctagagctgtgctgtttgaaatgctaatccttcctcttccatcccggactgggagtctggggtaacagaagccgaggagggtgaagacccccagatgctaaagtgaggggtgttcaagacttaccaatgggcatgactaagaaaaaaggcagccagcagaggacgaagcagccgaccacgatgcccagcgttttggccgctttcttctcccgggagaacttgaggagcctcactgagaagtgcgtcttggtcttggcgctggccatcccgctgcctcctgccggggcgtttttccgatggatgcggagcgtcacttgctccgagtccgacttgtcggtcttgaggccagacttgaggccccggctctccctcttggccaccacgtagacgcggcagtacatgaccaggatgatggccagaggcaggtagaaggagcccagcgctgagaagagcacgtagcccggctcctcgttgatctggcagatggtctcgtcctcgggggccggctgcctccagccgaacaggggtccaatggatatgaccagggagagtgcccagacgcagagcagagccatgagacccctcctctgggtgacgatggttgggtagcgcagcgggtagctcacgccgatgtagcggtcgatggagatgatgcagaggcccatgatggacgcggtgcagcacagcacatccactgccgcccagatgttgcagaagaccctgccgaaggcccagtagcctaggacctcgaagatggcggagaagggcagcaccgtggaggtgagcaggaggtcggccaccgccaggttgacgatgtagtagtgcgtgactgagtgcaggtgtcggtgacaggctacggagaggatcactaggatgttacccagcaccccgaaaagaatgaggccccccaagatcaccccgagcagaatggccttggaaatgttcaccggtgccggcggttgggtgcagttggagctgtcggaagcatttcccgagagaaacaccatggtcccagccggggccgggcgaggtccggctgtccagggccacctcccgggctggcgcggaggcgggagcgcgggagccgggaatcaaaaggtctcggctggagggagccctgccaggtgggtttggctgggggtgagagcgcgcgcgcgggtgggaaacaaccctggccagccctgggaaccctcagaaggccacatgaaggggcagggcattaaagacatggccaggggcgcgcggggctgccggggaccctctccacctgccgggctggcctagcccgggacccggactccctccctacccgaagctgggtgcgaagatccaggagactccttgcaacatgcaattccagaattacgagaatctgcttttccgcgctgtcttattcgtcctggctgggggaagattcagcattctgcacatgattcggaattcaaaactccagcgccagtctctccctcaaaccaaaagatcagccgtcgacgctcaaaggcagggaccgatggttgggtagcgcagcgctacaggttgggcgctgctcctggcccgcagttacctacattttgagctgccccaccgaaggctcctgctctctccagcttctaggagcacaggtcaggggacgtaggtgtggaatatgtgctgagacccaggaggctgcggggcatcgtttgaccgcgtccacctgaaagagcgcaaagagaaaggcggctttgagctaggcgccccagggaaagaggctgtgctgagcttgacgggttgggggacaccagttgggagccgggttggttctgcggtccagaagctgcttcgcccggcagcggtggaggcgacttcggagctcatctcgcgcccccaccactgggaacctgcctagcgcactctactgagtcacctctgcccgagttcaggatccgaagcgaaaaacaaacaaaaaaacaaatccccaaaaccccaggctccagcgctcgaagtctggatttcgagcgcaggtaccacgaaattaaaatcctcgaagccccggaggggcgactgcggctggcgagtgtgtcgcacggatcctagccggggaattctggaggatgtactcggtttccgttagaacaggttgcctcgcagtcacctggagggggcggcctgggagagggaacagctgcgacccagggacctcagggccaggaccacgagcacgctcactctcacgccggtggaattcgcactcgggtgtgcagagcgcaccggtctgtccaccagccaagctggcttgagagccaggtcccgagcgaagccgggagggacccgaagacagaaagcgacccaggtctgtccacgacgcctttccaagcctcactgttggccacccgaggggctccagctgccagccgtagcgggactggcgggggacggggtggggaggacgtccctctgcagagggagctttgcaagtgacagtcactgcggattttgcaggcgtaaacattaagccggcatgccagcgggcaggggccgccttcgattttctgggctgggggccaccatctgcgtaagaaacctgggtttccacaactgcgaacctaccgcagggactcggcaggacagcgcggcgtgaggaagtgcccaccttgccttctggggttgggccctgaggtgggacctcgggcaaagactcttgttaaaatcgcaagttggagacctcacaggtggtattaaaaacgtgccactgcagaaacccttttcctcctacctcgagggtgataaacacagggttaaaaagacacttgttcagtagaaggcaacttcgcagaagatgtaagggaatcgggggtggggtagaggggccggtataaaacctggtggaaaaagcgggaggcgctgggaaaagtgggggttccgtctcaccagacggcgggggaggtctgccctcacccactcggccctgcgggacgccggccccggcgcactcacctgaagcgccgctgctgagccaccagctcgcgcgcgggggatgtggacccggcttcggtcccgggagctgcctgcctgctcttctctggaggcggagaggggaccgtgtctccgaggcaccaaatccttgtccttttgcacccgctgactcacccctccaccactgatgtctttaagctcctgaaccgctgtcactttacctgcattttttaaaaagagtcaaaataagaaaagaaaaaaaaatgcagataaccggtaactccacaatcacccttttaatattcagctccccgacaccagaaaagaatagcaaggaactttgcagctctcgctgacgtaactcaggcagtagcccagctagtaccgtaatctcctgctgctaccgtattactctacggcaacaggcacaagtgcgtatacagctgtaatgttttcctctggcctagagggggttgggttctagcgtttctt

SEQ ID NO: 587232 - DNA, 4001 bp, Homo sapiens
ccggcctgtaatcctaatgctttggaaggctgaggcagaaggatcacttgaggccagaagttcaagacaagcctgggcaacatagcaagaccccatctctacaagaaattttaaaaatagctgggattggtggggctcgcctgtagtcccagatactcaggaggctgaggtgggaggatcgcttgagcccaggagccaggagttcaagactgcagtgagctgagatcgcgccactgcattcccgcgtgggcgacagagacgaaaccctgtctctatttaaaaaaaaaaaaaatccctaaagccgaccaggcgaggcgagagtcctcgggacaccgcagcgctttccggtggcgcaccttgggtccttgggtgaggaacgacggcccgctcgccctcctttgcttctaccctagtgactggatccggaaagaaaaggaccctgggtcccattttggttcgctactcctcgttcccttttctctccaagcaaagccatcccaccttctcttaataaactccacactcaaaaagttgacccacggacacatcgcatgcttcccgaccctgagccgccggtccctctgccccggttacctacccgtcgagccgttggcaaagcctgggctgcgctgggctgctccgggccgcaggaacgcccgaggggaagagggccgggcgggcggcggcgcagggctccggaggcaggcgacggccgcagcggcacagaagacggcggaaggcgctgcgaaagtccgggctgcggcagtagatgagcgggttgaaggcagaattggcataacctagccagttcagggcaaggaaagccgggcccgggactagagaggggccccccagggcgcgcagcacgttggccagaaagaagggcaaccagcagagagtgaaggtgcccatgatgagacccaaggtgcacagggcccggtgttcccggagaggcaggaggcgcgcgggccgccggccgcaggcgggcaccccttcgggcggagcgcacgtccccaccggggccggggccagagagcgcgacggcgccggcggagactcctcgggcggaaagcggcccagctccccgcgcagcaagcgcagctggcgcgtagccaccacgaaaacccgcgcgtagacgaagagcatcacgagaagaggaaggtagaaggagacggaggaggacagcagcacgtagggcatgttggaggcgaaggcacagcagcgcgggttggagtggcagcgctgcgcctcggcgtcggcccctacgcgccaccactggctcatgatgggcgcaaacgacaccgcggccgacacgacccacaccaggaccacagctgtccgggcgcagcgcttggtgaccagtgcgccgtaacgcagcgggttggtcacagccaggtagcggtccacggccagggcgcacagggtttcgatgctggcggtcacacacagcacgtccaccgaggtccacagctcgcagccagtggcgcccaacggccagtggccagtcagcgccaaggtggccgccggcggcaccaccaggagtcccatcaccaggtcggctgcggccagcgaagtcacgaacacgttggtcatggtctggagtctcggagtccaggcgatggccacgatgaccagcaggttgcctcccacggtggccagcaccgccagcgccagcagggccccggctagggccgcctcccacggaacccctggcagcccactggtgttggcggtattgggcgccagggtggggaggtccggccatggggcaagagagctgttctcgtgaggccacggagccatccccgggtcgcgcgtggggcggtagggaaagaaggaaggagggggtctcccaaatcacctggctcaggggaggggacagcaaggcatgagagcgacttccccagcctgggccatcttctctagctgtcccagccagagcgctcagcctccccccaccccaactccctcggtgccaccgctcttgggggaggagtagcgacgcttaaaggggcagctgcctatagtctggaggggcctctggagccgaattggagagtggggaggatggccaatgggatgctccacgtttcctttagctaaatctggaggaagggacaccgtggttcctctgccaccatctgtccacccctgccgtggccaggctcctggactcagcatagcactccctgggcactggcttcctggagccctgcacctcctttcccagaagttcccacagcaaggcaggggaaggagagaggagagcgctcccatccccaccctttatgtatcagaggcaaaggtaacccgctggagtcaagcaaaggattcacaggagccccgcatccacttgggtggcctcccctaaggtattttaaattaagtaatagggctcagccagtatctcctctcccaagacctcagcttggtgagatctgtcccctttcccttctgtttcagttaccttctctttccttctagctttttgttttttttaatattttcaggtactgaggaaatttaccatatttcaagtctctctctctctctatttttcccaggctggctttgaactcccgggctcaagccaccctcctgtcccagcctcctgagtagttggaattgcaggcgtgaaccactaggaggctcaggagtctttttctttttcttttctttttttttttttttttgagacggcgtctcgctctgtcacccaggctggaggctggagtgcaatgatgtgatgtctgctcactgcaatctccacctcccgggttcaagcgcttctcctgcctcagcctcccaagtagctgggactgcaggcacccgccagcatgcccaactaatttttatatttttagtagagacggggtttcaccatgttggccaggatggtctcgatctcctgacctcgtgatccgcccgcctcggcctcccaaagtgctgggattacaggcgtgagccatcgcgcccggccaggagtctttttcattgctagctctggatttgcatttggatttggcactatgtagtctgggatgctgaagaatttcaatttctccatcttccccactctgcactgccccttccatgcacctttccacctagagattttctagatagccccttctcttaaaatctttctgctataaagacatattaaaaatggatgaatcaacaggtgggcgcggtggctcacgcctgtaatcccagcactttgggaggtcgaggtgggcagatcacctgaggtcaggagttcaagaccagcctgaacaacaaggagaaaccctgtctctactaaaaatacaaaaaaaaaaaaaaaaaattagccaggtgtggtggcgcatgcctgtaatcccagctactcaagaggctgaggcaggagaatctcttgaacctgggaggcagaggttgcagtgagccgagatcacaccatggcactccagccttggcaacaagagcgaaactccatatcagaaaaaaaaaaaaaaaaaaaaaaaagaaaggatgaatcaagaggctgagaggagaggatcgcttgagcccaggagttcaaggttacagtgatctgtgatcatgctactactgcactccagcttggaagacggcaagaagcaagaccctattttaaaaaaaaaaatgggtaaatgggtgactgggtatgaggcaggtccaccatccccccaaactatacacaactcttccattgccatctccccaatggtaagtgttcgctccacttcctttaggttttttgtttgtttatttgttttttgagatgaaattttgctcttgttgcccaggctggagtgcagtggcacaatctctgctcactgcaacctccacttcccaggttcaagcaattcttctgcctcagcctcccaagcctcccagccacccaagtagctgggatgagcatgtgccaccaagcccagcaaatttttgtatttttagtagagacggggtttcaccatgttggccaggctggtctcaaactc

SEQ ID NO: 587233 - DNA, 4001 bp, Homo sapiens
atcgacaagacagcatcccggggcagtgcacacagtacagcagtgagctggggtggcttcctgaagccccgctgtcaatgacaagtatgcgggcaggtgctggtccagtccagccctaacagagacttcttactgtgggtctgggttatagggcttgaaagggactgccctgaggaaggcacccagagaaccagctcggaagtcggaccgattgtcctgatactcactcactgctgtgtgaccttggtgaagttctcaacctctgtgagcctcggctgtctgtcttcacaaacaccaccaacctcagcaagtggagtgaattaagtaacacgcaaaacacaacacagaaagcttgaccttccttaaagcctcttcactttttctgggcctccaacttttaaaaccgataacctgaaaaaatgtagtgctgtcagtcccataagctgggttcctctacaaagaggagctggaaggtcccaactcacaaggggatgcccggtcctttcccaagagggggcctggccacccaaggcctctagaggccagcacctgctccaggactgcggcccctcccaggtggagggggaaaatcattcttcaaactgctgatggccctcaggggttgaaaagttggtcagactccgccttgttgaagctttctaaatgacatcagaaaaaagacgcgacattcgcaaggcacagagccaacagctccagcagtgggggccaccatcaacggaccaaggtgggccagggggccttccggaccccacaatttggggccggtctgcagcaacgagggcagcatcgggaatgcgagcctcctcgcccggccgggtaaacataagcccagagcccggcggggcctgcgccgcctgcggcccggctggggcccagcggacaaaggggagcaggcggtgccccgtcccagcggccaggccggccgagagagccaggagccacgtgcccggtgggagcacgccaaaagcaggagaacacctgaccgtttttttggcccaccaaggagaccgccttctactctgcatttaaaaagaaaaacaacgcgttaccgctttaagttttttagaacttttccagagaaaggccgactagcaacaaggggtgctacaggaatccacctcgcctcacctctcctaggaaattgtaaaaggaattagcacttgaatggggaggccggcgtgtctggaatgagaacgagccgcgcacgcagtttgagggttccggggagccgcgtcctcccctttccaggcgacagccctaactacaggaattggccaaaattcagcatttccagactttccttgggaaaaggggccgaagaagtgccggcaacaagaagggccacaacggagcgcgccacagactcaccgcggctggggtcgggaccggcgcagccccctcccctcccgcccgtgcgcgccccgagccgggcgccccgacccggcctccacccgctcaggcgctcagggtcaggccgggccgggctgcggcgcccccatccccgcccgggcagcgaggccgggccaagcggggcgctccgggcctcgggcctacacgcggcggccgcctcggccccggccccagcccgcgggccccgggcgggggatgcgaggacgctgggacgcgggcccgaggcgcgggaggggcccaggccgcgcggggcgccccgacgactcgcgggggccgaggaggccggggctgcgcgtccaacgcggggccgagaaaacggccggctcggccccgccgccgccgctcctcgagcccccaagcgcggccccggctcgcccgcccccggcccccgccgccccgaccccgcggccccccgatccccggcccctgccgcccgcgccgggcccgccaaccacgggcaggagcgcgcgaacggccgggcgggcgccccgagcgccaggactcaccggggccggctcccgagtacatggtggcgccgccgaggggctccggggccgaggggcggccgcgcgcgcgccacgggccccgacgccgcgagccgcgagggagccgccggccgcacgatccgccccggcgcggccgcctcgccaaacaggtttacccgacgcggccggggcggcgggcggaggcggcggcgggagcgggagcgggaggggcgggggaggaaggaggagggagggggaggggaggcgaggccggcggcgggagcgcgctcgcggggggagcggggctgggcgcgcgggcggggtccgcggcggcggcggcggcggcgccgggtctggcggggcctggggcggggacccggggaggggcccggagacctcgccgggcggtgggaaccgcgggcgggagcggggacgagggccgagggcggcgcggcccgtgtggcgcgggggcgggcgcggccccggggacccttcactgccacccagagaagccgcgtcttcccgacggggaggagccgggccccccggctgtgccgccggagccggaggggaggccacgcgcccccgctttccccgccgccccccggtggggggcgcagaaccctcccaccctcagcccctcggcccccagcctggctctttaagttactacagaaacacggaggtcgggaagctccctcccagcccggagcttgaacttgaacgcggccggccgctcgcgcaggaccacaccgccacctcccggcgcggccccagaacccagataatccgtttaaagcactgagaaaatctaagaagtttttagtaaactgtagctggtatcagggatcagatcagcggacacgcccattccagcagtcaggggcctgctcggaccgtcgtgcacctccgagcgtttctgtccggtccctctgggtccgtctggttttcggaggctttcctggaaaagccagcctgtggctacctcctttctcccctaagtgatggaggattagaaggcagaggttgacccacaatctaaagtgcctggtcgccttttcccagatttcccggagcattccttcaccccgtggcatcggctgtctgcatatgggtgcaaggccctgttccgggcggagaataaacaggagttctgactgacaggagctccgcagccagcagggtggtcactagttctctgcagtctcggaggacagccctgaagaagggcaggagaaccagcacttcctccgaaaactcaaaaggacatcagtcttcaccaagttgccgatacaaaacgtgctcctgaaatgtgtagtaatgaacaccaggaaacctgggtaggagtgtgcatggcattcttcatcaccgcttggactgcatggcactgaatacccacggagagcaggatggagaaacagtgtgctcatattcacaggatggaatctagccattcacaaaaattccaaaacaggcaaaattaaactgcattctttagggaagcatcattaagtagtaaataattgacagaagggcaagaaggtgcttactctaagtgtcagaatggtggatacagctgggggtgagagggctgtgaccacagcagggcccctgggggatttgggggtgccaggcctgttccttcctgcaatggtgccctttggcagccatcccttaaactgcacttttactttatatgcttttctgtacctttactgtagtatttcacggaaatttttaaataatcatgaatgttaccactttcctatttatgaaccatgcaacctcatcaatcttcccagttcgcagatgcccaccctctctctctgcccctgtctccttcacatatccccaaaactcgttttggcccgaaatccctgaggcccaactgccctgctgtcagcgactgcacgcctcagcaaaggcccagaaggctctgtcatcactggctgccctcagcccgccttcagctcctttgagcgctgtgttggggaactttgttgcaaggatttcgttccagaaggcaagataatgtctctgagggcttcattgtgtcacttctctttggatggcggacaccgtggc

SEQ ID NO: 587234 - DNA, 4001 bp, Homo sapiens
tgattagattaaatgttttcaaaatcacttgctgggaaatcaagaagtaaatcggatctctgaacatcaggtaaggtatgcaatttcagaaacactgctaggttttacagccatttaaaaaaataagaacttgccaaaccaaaaaatccttcaatggtgtattctgcatcatattgtgtcctctttgaacaaaaataacataacccgccacagatagaattatttttttaagaggtgaatgactttgtgttctgagcttatatcccatcccaggccagttgtcacatgatgtggaagtaaaaacttaatcatgataaaaatcatacatttagacaaacttggtggagttaccatataaagggaaaaaattagcctgaattattgaaatttttaaatgaggcccattttaaacgtcaactaccaggaaaccatgacctggaacagtatctttttttctttccaaggagacacttacagacactggtttaaatggaggccctggcctctcctagttccttccccccaaacaacttccaactggggccatcaagggtcgatcagcagtgcaactgcaaactaaatatagtacctgactgaccacagggtaaaaacagctgctgtaggtggaaaaaaaaaaagttaaaaagacaaaatgataccgtcccatttccccatgccaccctaaccctaccaagaaaagtaaaagaggactaggtggacattaggaataaccaagaataaagctgttctttcaaactgagaaataaaagaaaaattcaccttttttttttttttataacacttcaaatacctactgttaaagagggccttccacttttatggtttgtttctcaagtttaatctacgaatccaatctctacagagaaacagtaacagaaagaaagtaatcagacaacagatcacccacacattcaagcccagttaaagttggcaagaaatgtatctagttaggcttctacggttaacaaatgtattcatttcttcgcccagctttcacttgtccaggggaaagaacacaagaccgaattgtacttctgtttcaagaggtcactgtaaaagcgcacttcggagtgtagacgtctccgatctgttccaacatgaccacctctttggaccaaaggccagaaactgctaaacgcgtgccctattatttaaaacgtgcatctgcacccactttgctaagcagcatcagacccaggcgaggggcggggaaaggggcggcgggtcccactcgtagcctcaggacgacgcagccacagcttcctagagagcgatctcggcagaacggcaggaagcatgcggagaggaaggcggggaggcggcacgtgctctccgtgctgggtccgccgggccggccgggtgaccctcgccagctgtgggggagcggagaggtccgcgcccccgggagctcgggtggacgccgagacccgggagcgggaggcggctcacctggaccccggtgtaattctcgaagaagaagagcaccatgctctggtagacgcagtagagccggtcgtccagcgcttggtagaagcgggcgggcaggaaggcggagagcagccgccagaccccccaggccaacacgtaggtgggcgccgtgcccaggagcacgacgctgggcagcaggtagcgcatggagtacgtgtggagcaccagggacagcagcatcttctcagctcggcggcagcgagctccgcctgcgctccccgcccgcctcccgggcctcagtcgcggccagcaggcggccaatcaccgcccgggcccgggccgccgcgcccgccacccgctcccagcctccgcccccagccgcatgggccgcgccgccgcccggggccgggtaggcgagtgcggggctgcgtgcgccgctcccggcggcaaagcaagggaacccgcggccctcccggatcgatggctcagggatgctcacaccccatgaccctcacccatcgccacatccccctgccggggcagggggctccgcggcaacaacgcgccttctgattggtcgcccgttgccatagttccacctcggcggcaataacacgtctcttgattggttggtttgggccgacagttgcagtacagctacctgctggggcgcgggcaacccggctccggccactgcgcatgctccccagctgggccggctgcggacgcgggaagggaggtggtggcgactgacggaactgggtgaaggtgggtgctggccggaggagggtccgggtgcctcttgttctgctccctcgggccggacgtgcgcgcggtcaggtttaagggtcgctggagctgcctggaacgcgcacctgctgctcacaagcccctgggcgccgggatgcacacaattagagcagtgagaaagtgggtgttaacgttatcggaggtctaattcttgcaggcacctgggcccaggttgtaggcagctcggcccaggtcgcggggcagctcgagtgtccccatctgctcactgccagtcctttgcaaggggacgccgcctcctcagcctccgctctgagtgcgcagcagcccctcctgcccgtctctcgctaccagggtgtttcagaattagggtccgtgtttttccccatcacagtaatgatgataattacatgtttatgcatagctgaagaacaatcccacaaggatatttccatactgtttattagaccttttcagaattcactcttgcttcatttcctcagagtctgttggacttgtttctgatttttttttaataaggagcctcgtttttttctgtagtaattaaagtagttgcgtgcacatgtgtaatccataaaaagcatacttttgtagccttcactaaaagctacgaagggtggataactgttttattgatgttaaagcagatccacaggacttttggatctttctcctcccctttggctgtggtaaaaatggtttaatatgtaacccttttcaaggatagttgtactttaaaagaatgccgaatgctttaccatatatatatatatatatatatatatatatatatatatattcccgccccctccccaccaccaccataatgggagcctgtgctacctttaggcaggacggtatttcagtgggaagttctaatcagggccaggatggtagctactttctttatacatgattaacatcaaataacaacatcattggtagatgatgacctttggggacaaagccaggtgaatggagatctctcaagtaacaagtatttgaaggccagcaggaagcattacacagtaaaaggagcttctctctttctgtggctgtcattgtcctgtactgtaagaagcactaggtttagtactggtggaaaaaagtcacaggtgtggacagtgtgcacaactaatgctccttatgctttctttaactgagaccagacatctctacactagaacagtgtgcgaaaagataaagcaggttctgtgttcacgttaggattgctgtgtataaagtcagtaaatatgtgtttatgtgtaaatttgttgtgaatcaccccagattactgttagtcacgaagttgtaaacttttgtgcaatgtttgccatgaaaacacagaacttaactttctcttgttccctctttatctccaaacccagctcctgactatcagttattgtctgtcctgctcccgctcctctcttcctgcgaacagtcacagatccaccctctctttctgccactacccggccctgtttttctgtttttttttttttccctttttccgtgcaaacctcttagttgataatcagcccacaccctctgcctccttaccttgtacttttgttgagcccttgcagtctgatgaccttttcctcccctttactggaatggtgcttctttcagagcacagctgatttcctcctttgcataccctgctgggcaccagtggaacagtgaaaggtgaattctgtctatgccttccttgtacaacatttaacaaggagttacctgtgggatgaaaaggggacatt

SEQ ID NO: 587235 - DNA, 4001 bp, Homo sapiens
tctcgtctgccccaaattgatttttaagaaataatttaaggcatttcttaaaattctgaaatttggtggaaaagctcatgttcgcctatccaaatccttcatgaatgtaagcgtcttcatccacagccttcctacaccatttctctttcctgaaggcaagtagtatgggtcagtggaaccgcagcctcgaggcagaggcgagatttcagcctcttaagacctgcagctctggacaagtcactgaacttctctggacctccaagggctcagaaaaaaatgaaaacattgaacaggacgttccgaatgttctcatccagatctgaaacactttttttcttttctttttttttttgacacgagtctcgctctgtcgcccaggctggagtgcagcggcgcaatcttggctcactgcaacctctgcctcctgggttcaagcgattctccggcctcagcctcccgagtagctgggaatacaagtacttgccaccacgtccggctaatttttgtatttttagtatatgcagggtttcaccatgttggccaggctggtcttgaactcctgactttaggtgatccgcccgcctcggcctcccaaagtgctgggattaccggcgtgagtcaccacgcccggccatactttttcttttaacctgttctatcatgttaagataccttttgctgtgctctttcttcaactctactgtgtttcttagctgaagacctcatgagtaggctgtgttccaaaacaaaaagcaccttatgacttggtatggtggttttcattatggaactgaagctacttttgacagactcatcttgcatcaagttctccctgagacatacgggaggggaaatgggtggggtgtgtatggcacaggaatagccacagttaagtggctgaggaggccagaacaagtacatgctggttccctattccatctatttccctgtgtctgaaattctccaaaatacaaagttaaaaaagaaaagaaaagcacatctctttcaaagagagaagtatatttgattggcattattacaggattttgtctggagactttggtatggtataactgctcttcacaccatttcccttggattgagatagaatctacaagacatgaaactaaggagagctcctcaaagttcagccaaaattaaggaaaatgaaccaaaaacaaaattcctcaaatgacctcaaggttatccatgagaagatccatggtaatacttggcagaggatggaacttatttccatcgtgctacaccgtatgtctcctataagctattttctgcaacttctgaacagctaaacttcagccctctgtgacatggaaagcgaggaaataaacaagccccactgggagaaggatgcctcagagggtgctgaaataaaaaaggaaaggcaagggatttcaggagttaagaaatcctaaagaaaaatgggagcatgcatttggagaaggagagggtaaagacatgcatcttacggcagccagagaacacaggaaggggaatgacaggggaaggcgcttcctggtgctccaacgcccagcagccctcgccacccacatccccggactcccggggcgggagggctgcgcacacctgggacttgggggaggcgaggggctccgaggagccgggctcggagagcaggcgagcggagaggcgggcggccggggttcggggcgggcgcggaccgttccatcccggacggggggcacccgctccacccgccggggatccccggggcgcggcgatggtgcctcctgacgccggcgcagcgtcgccggggcgtcccagaccgcaggccccgcgcggccgcccaagcccggctcccacgtcccgctctcggctccccggaggtcggagactttgaggtaaggggccagctccctcctactcaccgaccgcgaggctaggcagctccaaatcccgcggcgaccgctccctcccgcccttgccgccgccgcgggcccaagctgcgtcaggacgtgcgcgcgcccgcctttgtctgcgccgcccaacgtgaccctgcgcccaccgccccgcacgctcccgtcgggcgcgcgcgggccggcagggcgggggcctagggagaggcgggtgccgcgtggaccggtcgcgggttgggcgacccgcggagtcgccctctggcggactagggggcactgccgggggcggggcggggcaggagcaggagaggccgggccctggctgtccctccgctggcgcgtccctctcagaaagcggagcgcttccctgcgttaggacccgatactggctccctccccggaggttcgcttgtgtgttccggagagggtgaaatcaggctggcaccgcgggaagaggctagagtcactaaatcaccttgtcctcttgaggctgctgtccgtatgcagcgacattctgcccgttagaggactcagctcagggcctggtacgctcaagatctgttagctaccagcaccatcaccacgaccaccgtcatcaccagcagtatccctcagcctcgtctaccttgctcgtcaagcagggtgctccaggagtgggtgtaggccactttcgccctgcctggcagatgcaactttccaacttccacctccacttggacctgctctctctactcaagtctagctggtggctgctggagtttgcgtgtgtgtttcttactatatcttctgacttcggacgcctaacccaagcttattatctcccctaaaatgggacctccttaaaatatatattacctttctttttcctgttcttaaaagacagtttgcctttagtgccaagccctctccgccggtttacgctgtacacggctgtcagattgtcattccgtgctaaatgcataatctgataatgaaatctttaaagtccacattcttagacctcaaaatctctgtaagaataaagggcagagtatggtagttcacgccagtaatcccagcgttttgggaggccaaagcaggaggatcgcttgaggccaggagtttgagactagccggggcaacgtaacgagacccccacttctacaaaaattttgaaaattaaaaaaaaatggtggggggagcggggcgcgggtagctcacgcctgtaatcccagcactttgggaggcagaggcggacagatcacttaaggccaggagtttgagaccagcctggccaacatggtgaaaccccgtctctactaaaaatacaaaatttagccgggggtgatggcacgcacctgtaatcccagctactcgggaggctgagacaggagaattgcatgaacccaggaggcagatgttgcagtgaactgagattgtggcactatactccagcctgtgtgacagagcgagacccaaactcaaaaaaaaaaaaaaaaaaaagaataaccacttagctccaaaacactggactacttatctccaccaaatataactaaatgttacccatttggaactgatcacgtatttattaactcaatcacttatccattcattgagcccttgttactcgcccagcttttttggggatcccaattcaagattgagtaatgcatggccacgtctaatcgtcaacgacattaaattccataagagaagaaaccaccgggcgcggtggctcacccctgtaatcccagcactttgggaggctgaggcgggggaatcacgaggtcaggcattcgagaccagcctgaccaacatggtgaaaccccgtctctccgtctctactaaaaatacaaaaattagccgggcgtggtggtgcgcacctgtaatcccagctattcgggaggctgaggcaggagacttgcttgaacccaggaggcggaggttgcagtgagttgagatcgcaccactacactccagcctgggcgacagagggagactccatctcagaaaaaaaaaaaaaaaagaagaagaaaccagacatcatacatttttgtgttgtgttctccacagtgctagggatagggatttaaagtggccaccaggatctcaactgctctt

SEQ ID NO: 587236 - DNA, 4001 bp, Homo sapiens
gcatgattcagcaggcaatgacctaagtgagtgtgaccacacaggaacaaaatagagcatttgtcctttccctatcttttatctttttaaagggattgcccggttaacagactaacttaaagaagcctgattgcatacctatctacatgtaccaagtgaatccattaacaagggagagaagcttttcacaaattgagacattgcctcccttctagtagcatagtcagttgaatatacttattctcggctgcctattattaaacagagtgcaaagacagaatgaattgcagaagtgtgttcataatttaataggcttatcttcaacaaaaacttaaatggtttgtagataaataactggataaactattcgatttgatttctataaattgagattacattcatactcaacattaacattcatcaaataacatggatacttaaactcgccaggtactgtctctaactacaatgccctgagaagggaggtatttcaggaatatagtagactacatgctgcgttcagcccatatctgcaggtgcatgtcttcctcaacagccagcatgccctcatcgtgagcgagcaacccctttccgacagttaacattacaatgtatctttttaattttttttctcaaggacagaagaaaaaaatatttaacagaaatcagtctactattctaccacttgctgaaactaacagttccctttacataaatatacaatttctccaaccaaatatcatattttatatttactctcacttcatgttaatttttataaaggttaaaaaaacaaatactttgtgatgatttgccaccccagcggcacaaaattttctggtgcaaaatcgatttgatcttattaattaatattgtcattattatttatttttcaccaacttgcttaagaggtacatactttctttcttaaggtagtgttttgacagagagaaccttaatgctgaactttagaaaagagaaaccaaaaatgtcataaaatttgccagggctagacacacaaacggggtgcccccacacattcataggtttgggcaagcccccaaaccttggcttacccaggaagccaaacccagacagccgtcttgcaattgcaaacactgcccccctggagcaaaaggtaaatacacaaatgctcccctaaggaactttaagttagctgcagtgcaagaaaggaaaaaggtccgtgctattagaaactgaaagcaatcacttactttttgcagccactgagtataattttccatcacatgttccagatgttgaagtttctgggaagagaaatccggttccacgtgtggagcatctctctgcagagcgtttgtgttgtactggtctgtcgtactctcacgacagttgccatcgtgttctggaagaatgaaagtgtaggcacattgcccatgttgaatccggttatatcttctcccactgttttctggacttcggcgctgattgctgcaccctatgtgagtcagaatggcagcgaggaaagcaaaggaaaggaaaactgtcattgtactgccagcacactccttccgtgcctctcgcaaaacttgctcctttcttctgacctctaaaactagttctttatttcaggtaaaactgcttgtttgtttgactctttccccctcaaagaaagcgtttgaagaagaatcatagaaaactagccatttgttagctttgttctaaaattttaaaattttttatttcactgcaatgatgtttttcttcgttaaaacttgagatatttattgcatagtagctgagatttattgtttcctctctgtgtgaccgttcagcatggagcctgcctgagtcagctgcgtgtacatattctagaccctttcctctaccctatctgctgcagatctgctattttctcccagacctcagtgagttttattaaggttgcacatccaagccaagctggaagcaggcagcctttcacaagatgacttgacaggaatgcatgagtgtgcccctatactaaggattgctgatggcttagggcggcgggatcgtcttacaaattggctagatgcgcatgacctcgatcatgtatggccctcccgcccctttccacagacaattgccttgagcctttagcagattcatggcaaatcaataaatagagcagtccaccttaatacacttttggtgtgcatgctgacctactaaaatatagcaaactagcagtatgtttttaaagttactatttagtcgagggaccctaagaagaaaattggcataatgtccaatggaattatttttgatagagaatgataaacccatatcattattaaatgtctttaaaaaacatgtattcttgactctgaggaaaaatatgttaaaaaacagtttttacagatggtattctttcattgtattcacttagacttttaggagttgaagaaaataatcagagaggatcaaattagcaagaaaattagcatcatttgttgctcaaagcaatatgttgcacaaagcaatatagtatgtgcatattaaagagggttatctaagtaccttttggtatagggttcttaaatgaaactggtgtcctgatcagaatgcaacccttcatgttctgtgtatataaattgagcaacttccctacaaaaacaatgtggctacaatttaaagcagtggcttgagaattattaattcctgtggtatatcctaatcctgtattttacaaggatctctttggtggctatggctgtctttaacactggtgtggaagttccacataaaaacctcctgtggctgcacagacatactatgtgagaacaagcatatatcaggtgtgctaacagccagcaatgggctgtacaggagacatctctgtgcttctgtgaaggaagaaagaaaaattatcagaagatgatttcccacaggcagcgtataaacatttgaacaaagggacccataaacataaacaggcaataattgtagaatttagggaacggctttgagatctttactagatgcagaaaacctgaattatgagttgggattttcattaggaactgggagggcttttagacaactgcagtcatggtgtgaaaacagaagccacagctgtcatctcccatgtcttggaaggagaacagggcagtgggtgaaggtccgtagtggttagagatgggcatttagggagaagttagaggagaggtcaaaacaaattccagaacaaatgcgatttacttggggaaagaaaccttgccgagattcatcagtcctttccacaccaaataacaaatttctgattggacagatatggaagcaagttatgccaaacacagcaataaaatatttgaaccacttttgcagcctcttgaacttttgcgtgtctcctcattgagtcatgtatcactcctgtgcaacaataataatggcatgcattaagaccttactgttttccaggcgaagcactccttacacactatctcacttaatcattccaacaaacctaagatcacggatatcatccgtttaaccccattttatcaatgggaagactgagtcacagaaaggctaacaggatgtaattcacagagctggcaagtgatggcgccagtatgtgaactcaggcaaactgactcagagcctgtttcaaaccaccaggccagcctgcttttggaaatctctgcaaggaatgaaagcaatttcaaaagcgctccagctgcattgatttacagtcctaaaccaggagaagtgacgtacctagaagaaaaagcactgttaaaaccagagtatctctccaaagtgattcaggccttttccagcacacgcgtgcgcgcgcacacgcacacacgcacacacgcacacacacagtgacaggtaacctatgcacagccacaaagatgaagtgcactggcaaaatgcaggttgtctaagaacactttccaataatgcttgatttgaaaattatccatggaaagaagagagtccaaacccgacacctagaagtgttttgcgaa

SEQ ID NO: 587237 - DNA, 4001 bp, Homo sapiens
gtgagttttatgtcacatgaaatctacatttgataggtcattttggtaagtttttgttgttttaaatgactcctcttgacacagtaaccagtggtgctgggaacattcattcacattcattcatttaagctcatgactcaaataataacttagtcgtttcctctctgaaggtaggggaggtaatgaggagcaccgattaggctccaagatccgttctgagattcagataaggtgtcctaacaaaaggtttatggtgaaatgaaagagtgagaaaataattgtgctttttctagggtcatgcgtcaaatgaggctcaccaacttttaaaagactttacatagctttagataatcacattccctgccatgtaagcattgtgatgtaatggcatcatcatgctacttaacaattaatttatgcattttgtttaaacttcctttagaatatatatagtccatataaagaaaattccaggttcgttttggattttgtataaatagctcccatgtttacatgtgaaaaaaaattatttatgaaagaaaaacagagctttcaatatcctattttggttacgtctccataaaaactctaggaaacagtgggatcatctgtgaaacagtggaatcaccccaagaacaaactgtcagacagaccgtcctgtcgtggcatgacttgaacataaccgtcccacgtggggacgcattccgcaccggttgctggaactgacgggggctgcagtgctgaatacctctgggacgcttgggaactgtgcccctgtttacagacggcaagcccttagtggtagggccctgagattctgagaaacataaggtctgctttatttaatttcctctcgtttaccaagagtcacaacctattttagtaaataaattcaggaaattggtaaagcactttactccatccgttatgcctcggtcatcagcatggttgtcacggtctctctggctcacgggctgctgcggctcacagccttccctcacttgcctgcaaccagctgagagcctccctggtgatgggtgttactgagcttaaacgatgtaaacaaacagaacggcacacaagttgtgcagggaagtatatttcctctaccttgttaataaagatttctaactttagagattttctgtattgactctggcattctttccaaataattattttcaccccggggactacccacacaccctgggatagaataaaagaaattatctttcatttgagggtaccagcaacccgctctccagctctaatcctcttcatcctccttctttttttttttttttttttggttgttaaaacctgagctgctgccaagctgatcttaatagcatgttcacaaagacagatggatttttttcctaccttcattagccactgagtgttgttttccatgatgttctccagcacttgcagcctctgcaccgagtcatcgtattcgagcggcgcgtccctctgcacagcattggacacgtaggggctggaggaagagcggcagttgtccatctctggcaggaggaaagtgtagctgcaggacccatgctggacctgatattgcttctttcctatgctgtccatgctcttccgaaagttgttataggctgcggccaagacaagatcacagctcagagtaaagaaaacaatctgccacattctttcttcagtaataaaccagcagcttagcaaacttgagggcaaacacacgtccagagtcccgagctgctgccgtctaaaacgcagggctgctacgctgccatggctgggtccgtcaatgaaagtcttctctttcctctttttccagtagcaaacctggtttttactgctgtgttctctccaggcatgcagtaaactgtcagattgcagtgggaagaacagtcctgctcacttgggagggctgtgtcagcttttacagagcagctttcacggtcctttgttcctctctccccagatcctacagtgtcagtatccgaatcaatcactttcctttccttatatgataagttgataagagcagccagacatgtgtagtgggctgctccgccctcctggcttagccgttatcttcctgtagggggtcactagccaggcaacaggaaaaatcagagcagaatgcctgccctccaaccaggacccatgctgcagaaaccctctgggaaaaaccgatctgttacaggacccctgggcatttcctaggcaccaccccaattaagtatttcctagagagagcagttgatctcttttgtctgaaactgatttttgccgtgctaagctggcaaaatatctgaggtaataactttaatgttgaagtacaatgaaagttcctgttttttcctttaggaataaaaatattacaaataggtcaggacttcggtttatttttgttattacaaataaagaggaagaagtttggctcctgtaaacgtgtgccttttcagagggaaaaatagattcattgattttagttgattcttgaaccactagccaagttacaaaagattttcatttccgaacagttggatagaaagatctgttattaagtcacgttagaaacatcagtttctgagctctgacctttattctttaaaaaaactccacttggatattcactctaaaaatacactgtactgattaagttcattacattacaatagagaaattagaatttaagtgcctgtgtagaaagaggaatacaaactttttttttttttttttttttttgagacggagtctcgctctgtcgaccaggctagagtgcagtggggcaatgttggctcactgcaacctccgccttccgggttcaagtgattctcttgcctcaggctcctgagcagctgggattacaggcaaacgccaccacacccggctaatttttgtatttttagtagagacagggtttcaccatgttaggctggtctcaaactcatgaccttgtgatcgactcgcctttggcctcccaaagtgctgagattacaggtgtgagtcaccatgcctggcccacaaacttctttattgtgtcagaatttgttgacatctcagcattttgtaacacattatcaattacattagtcccccttggtattagactcgggcaagtcacttccctgttttaattaagctctaatgtcctcatctgtgcaattcaaggggtgcactcacaagatttttcaccttcaatcctatggctctgtaagttctgcaagtcacttcctttaacaactaaaacttaatacttcagagattaataatatgttaactcagcagcccaagtgtacatagggaaaaagccccctgcctttgctgcggtttatctctcaaggtacaaggtttattattcccagtgagcgctgaatagctggtacactgacttaacagaccacatctacccataaaagatctttattttttactaagctctaaccgaaagacagcctttcccttatcaatgaatagttaacgaacaacagtgtgaatatctgtgactttctcatcctcagaaatcagctctttttatttgctgccacaatactcagaactacatttttattaaacccagccctagatcttgctactgaacattggaataaagtagcatgtgtcttcttttgagaaggtgtttataggcttcaccagacaaccaaagggttctgtcacacagaaaagctggaagacatgctctggaaggatctcattagtagaagaggtagtatgattccaccaaggttctggacatggtttccactaagggaaccaattaaagatgctatacccatccggacagtgcaccgtcgaagaaagcatataggtcttaaagatgagacctgtgttagaaccctgcttctgtgtgacctccagcaaatgcttccattcttggagcctcagtctccctagtcataagatggagatcattttttctctgtagggtttttaggattaagatataattgtatgtttagaaatatttgttccttttctttacaggcatg

SEQ ID NO: 587238 - DNA, 4001 bp, Homo sapiens
tcattatgctaagtgaaataagcgaggcacagaaagacaaatactgaatgttctcagtcatacataggagctaaaaaagttgatttcttggacctagagaatagaataatagataccagagaccaggaagggtgggtggggggcaagagaatgaagagagattggttatgcgtacaaacatacagttagatagaagaaataagttctggtgtttgatagcagcttagggtgactatactataatagcaacaataccgtgtacatttcaaagttaccagaagagaggacttgtaatgataccaacacgtaaaaatgataaacattcaagtctatggacaccccaaataccctgtcttggtcagtacacattctatgcatgaaacaaacactcacatgtattccacaaatatgtaaattattatataccaataacagagaagaaactaattataattgacccataaagtcaagggtgagttgagtctatggatcctggttacaataaacgtcttcaagcctctgtcccctttgctaatgttttcataaccgagtaactcacttcagcctcacagcagacccatttcccagacaagaaaactgagacacagagaaaagtggcttgaggctgtaacttgatttgtgaaagaaggctaattttacccattttttccatcggccattccttattcctgcaaaacacttgcgtttgagtctgaagacagttcacacattgcacgggacacctgcagtcacctgcctccttccaaagttggctatgatcaggtctccaagactcaccctgaacctctgccctagagtggtgccacaagaggaaaaagactctaccaacttaacctgaattgcttgccgctggtggaactaaagtgggaggcccaagcttcctctacagagcctctctctccttagaaaaaaaaaaaaaatcaaccaggaaaggcaaattgtacagatgccactaaaaagaaattcccgcttagtattgcttcctctgcacccagcgacttttagacaagcagaagacgaaatgccctgcccgcgactaaaccagactccttttcacttactaccctttcagcgtgtgtgtggcctgatgtccaactctgggctctgaatccatcactaaactaagaaccgtacccaacaaaggacactgacacatggcacaggctggccgtgctgccaggcagagataggacgggttctatctacacagggagaacaagaaggctggagtggccttgctaacgcgccattatcacttgaaaaatatccatgagagcctatctccccaggccacgccgccgctctttcccttccttcgtagacatatttctctccatgaattaacaacataaattaaaagaaccgagcaggtgtgaccatgagaccaccggcctccgtgagtctttgagaaaacaagccaaagtccccttccaaatgacagtgacagccccctagccgggtggcccaccccgcagcctgtaataacacacctacaaaacgcagtttagcagactcaaaggaaagcctctaagatctcaatagatttggactataatccaaaaaccatccctccccagcgctattgctgacaggacataattcagagacccaggtagttggaactcaatttgacagcaaatctctggatgtaaaaaatatgaaactggcttcagcgagtagggcagagtccacctgctgccttcagctacaaggtcgatgtgccgctatgctaaggcagggagcccacggggaggcgaggcgggtggggtgtgcaaagctgctcttgctcgcgtgctgcctactggcgcggcctgggtggccccctcctgacatctccccgtccacccgagcagccgcccagtactcacttcgcggaagcccacagaatagggcatgccggtctttcagcaggggcccgccgaagggccttgggggcttgaggaggagcagctggggctggcggactcaccgcagcctctgcggggcctgtgacgtgcgggccaggcccccgagggccttatcggccccagaggcgcttgctgtcgggccgggcgctcccggcacgggcgggcggaggggtggcgcccgcctggggaccgcagattacaagagcacctcctcccccaaccccaggaggccccgctccccaggcctcggccggcgcggacccctggttgccccggggtcgagagcagccggggagagctgagttcagagcccagagttggacatcaggccacacgctgagagggtagtaaatgaaagggagtccggtttagtcgcgggcagggcatctcctcttctgcttgtctaaaagtcgctgggtgcaggggaagcaatactaagcgggaatttctttttagtggcatctacacaatttgcctttcctggtttttgttttgttttgttttgtttcctaaggagggggaggctctgtagaggaagcttcggccctgggtgcccctgggttgggagcagtcggggagcgctgagccagggcgcacgccctgtcggcgctgcgggtgtggggcgcaggagtccttctggccggcccctccgccccccggggaggctggagctctccaaggccggggagcctcccgaagcgcgctgccccctctgttctccgcgtgctttcactagggccccatgctgcttagtggccgatttgcagggaatctgggcacaatcttaataacaccagggccaaaaataacaacgttcctgggaaccgaggtgagtcaccgcaaacagcggctaggagggcgtgggatggcgcgggcaggggggcgcccaggcggtcccgcagctgccagaaggtcggggctgcccaccagccaggctggaccatcccaggccaagctcctgcaggcctggcctaggaagccgccttttgcaacgtccgcccgtccaacaacgggatgagatgtcatctgcccagaatggctttatcagtgagaacaccatatcctggaatggcagttggtggctggcagagggaacaggtgaccccgaggagctgagctgcggggccaggggcatggcagcctccctggaccctgggggtggtgccattaaggtgggggctgtctccctccatggtttcctctaggggtgggtgtcaccgctgggggcctctggtgcagtcctccctgagaagggtctctccagccttcctcacgtgatgcttggcctcctgctgggcccacgctggtccaggtcccctgacgaggccgccatctggctttagagctttcccgcagcaccaaactggccttgccatgagggcacagctgctgcggaaagatgccaccgagatcagcttcatgacccgtctgtgttttccacagcagctggagcgcaccccatggacgctgggccatctccccggggactagtgcctgacagagctgacagagttctaggccacatgtgggctagaaggaaccgccatgtctaccacagcacagtccttaagcaggagccttttgaagcacttggactcaaaacaatggctgtttgttgttgttgttgttgttgtttgtttgttttgagggagccagaaagctaaaaaatgtaaaagaagcaggtcacattagacatgatttcagacagcctccccgaaggacagatgatctcacttggcaacacatactgggccaggctcactcatgagggggcagcgtggcatgcaccccactcaggggcaagaatgaagcttaaatattagctgactcagaacatagcaagtgctcagtaatggcttctggaacgaacccgtggttgtcaccagcaggagtgacgaaagctagaagccgtttcaccatccaaggaagaggaggaacaatatttttctctttggagttcccacactcagaagagagaacaccagcatatgaacacagagtgtcacatgatgtaggaaacatcctgtaggtagagagtataattccaaagcttaggatcctgctagttccttg

SEQ ID NO: 587239 - DNA, 4001 bp, Homo sapiens
cattctttttatttgaggaggcccatggtaggccagggatgctcaaactgcttgtttaacagctgttttcagggttaggcatcatgggactaggtctgggatgtttcctgggggctggcccttctggaaaagagcagcagaagctattcaggttgactcagacaaagcggttgtgaggacaccatgactggactgcagatgaccaaagctcccagctcctgggccctccatccctcctgagcacgggggcagccagcctggctgtgctcacctgctgtgagggcagcagggagaagccactggcttctaccaccttttagcttctagcccacctgcctctccccagcacagaggggaacactctgcacccaccttcttggtgacaatgttgccctgctcatccgtgaattgctcctctgtcacctgctcccctggaatattctgaaactcattcccctggaattagagaaagggagaaaatgcaagattggtgagtgggagtctgggaggaagggtggaggacgaggaaatgaaacagcagtagccacaatagccatggcccaataactcccccagcaggaaacccggctcagcatgtagcaggagccatgccagggctcccagggcgtgggcggcgcccctgagggtctgggaggcctgaagacgaacggtcgagctcacaattgtgcacttggccctcacaacaccccctgggaacctgcaaaatgggggcaattatgcaagtctgacggaggaggccctgagagaggaagtgaggcacctgtttcctatttttacagcactttgcagtatagaaaagcccttcgacaggcagcatcacccagaatgtgacttgcttgaaaccccagagccagttggtgacagaaacaggacgatccgggtgcaatcccatggtggctcacgcctgctatcccagcactttgggaggccaaggccggaggaccacttgagcccaggagttcaagaccaatttgggcaacatagcgagcccccatctctacaaaaatttttttaaaatagccaggcatggtggtgtgtgcctgtagtaccagctactcagaaggctgaggcaggaggatcacttgagcccaggaatttacagtaagcccaggttacagtgagccatgagcatgccactgcactccagcctggactaaacagcaagacttcatctctaaaaacaaaagaaaaaagagaagagaagagagagaaagaagaaagaaacaaagaaagaaacaggatgagcgcagcctcccgagacccaaagctgagtgtttaatgtcactgtcacaatgcactgggcaccagagggcaggttctggtgggcgcacacacactctggctcccagggtggaacatgatccctgggggcctcctggtccttttcctccggcgtctcccaactctgggtccggagctccccacagcagcgtcccctcagccccggcctccggcgcccacaccaccagccctgccggcctcctgccaggcggttaccttcaggaagacccgccgccggaccaccctggtggagatggtctcctcgtcgtcactgaggccctcgctctcccccagctccttgtccagctcctggtggatgtgctttagcacaaagcacagggaccccctgacaatgtgcatcacgttctgacagctgaccaggaagaagctcagcagcaccagcgtgaccaacagctgggtgacgaaagtccacatcctcgcctcctcaccagcccggtcctctggcagccagggccccggccaccacggggggcctgcctctcattctccactgggactcctgagtcccccagggaccccttgcattccccctccctatctctctggtttgctctcttggtctctcactgtttctctctctgtgggcaggacaccgaatggccctctcggctgaagcagcccggcccaagtgcccttctgcccagcagccaggctctgccctgagtggcccgggtgacatcacgctcctataattttacctccccaaaccagctgccggagctgtccaaccgggctagaaggaagccggcaggtgcccatgtcctgagcactgaaagcacaagtgaaagtcactgtgtgagtgacacccgctgctgcctaaccccgccctgcccagagacctggaagtgggggctcggcctctcacctatcctgcccatccccatgggaactagaaagagttctgcccagggaaagtttcttactttcagaaaataatacagtccgagaaagcagctacttgtgtgtctccttgggctgctactgcggtgatccaaatgctgttccccggcatggtagggatgagaccagctaataccctgggtacttagcggtctgtttcaaaaattgctccaaaagggtgagtgatgggctcagggacagtcaagtgagcccagcaggggcccagcacaggtggtggggccacctggaagccggtctgtaattcctgtcagcccacaggcccttgcacccttcctttatggggtacagcctcccaaaactgaagcatggagctggtgtgtctatttaaggcctgttcttaaaggctcttccagggctgggctatcaacgcccactgagcaggaacaacgcgtattaaacttgtatttacagagctgattcacaaatgtagccgcagcagctgcggctggaaaaaatttcactttctagatcaggttgttcctctctgagtggcaatgcagcatggcagaaagaacacagatctgggacacagcagactaaccctgcaactcacctactgtggggtcttgggaaggctggggaccttctctgtgcctcagtttcctcatctgtgaagcacggattaaagtgctctccccaccctttctcaaggctgctgggacaatcatgccgcttatgaatgctaacactatgaatgataatggcaaacgcttgtgatagtgcatggttctatgtggatttcgcattaattcactgacacctcaccacagtcctaaccaaggaggttctatcgtcttcccattttacacaaaggaaacagaagcaaagtattctgcctaggtggaggagtaagtaaacggaggagtcacattccaaatgcctctcactccacaatgctgcttatttcaacaagaaagcacggggaaaagtatgtgcaaagaagccggggaagcatctggttttggcccagtcaagaagagtccaacttcagatatttcctcctaagtcctcagagaaatcagctgggtcacagtcatttcaggccacctcccaagtcccaagttacatgcaatctctctatctccatcactgttttcagaggtccagtggaaatactaataagtgggtgctttgcaaaccatcaatcaccttcaagggcatccttatcagccctcggggcctgtgagatgggcaccggcagcagcctgccaggccctctgatcggcgtctccagttccaggctgggcatgctggccttgcacgtgcatgctggacgtgaggatgtagggcttgggaactgagggatctggaccctcctggtccctgacattggtccactgtgtgaccctggagaaagcccttggctcctctggtccacagtgccctcatttataattgagggagttggatgtgtgatctagaaggcccttccagttcccctcaccaaaggctgaccacagaggggcagtggaaaaaagtgctgtaggcgtctttctctttccccagggattcaggagaagagacccagttaagatcatgtgtgctctgggagcaggagaactaggcgcccaggagggcctgatggaagaaacggacgggccgcctgtggtgaggagtgcacacaggcgctggccctgcccggggcacatacttggcaggggagcattctaaataaaacctgactgaattcctagcagttctatggctggcagctcagggccttccttccagagccaccctagtcctggagtctaagg

SEQ ID NO: 587240 - DNA, 4001 bp, Homo sapiens
agcatcgcagcgtagagccagacttcccctgcctgactcacaagacgggctctggtattttagaccccagcagagggacctgcggagattctctctcggtggcaccaacccaaactctgattcatcatcggtttgaaaaaggccccttttcggtcctctaaaggggtggtgcctttgtgaaactactatttacacacaagatggcaatccctcaagggaggtggggacgtcagtttctgaagggtacaggaaagcctagagagtgttggttacttcctttgaaatcagagagcatctctaggaagaggatggatgttggtctgctgaccaactgtcaaggggtgtgtgacccacagacagcctgctccccaacactctgctgtcagctgcaggctccaaacttctttctcggaatgagacagtttcagggaaagaaaacgtgtttccttctcaaccaaggccagagcctctccctggaagcctgaggggccccactccttgctggggagccgtgcaggctgggccccacatcgacttcttcgggtgaaaatagctctcctgaatccagagttcagcatctccgattcccagaattacacccacgtactcttggcctcctccgtggctctaaggtgccctgacttctgtcaccgtcctttcaccatcaaaggtgtttctgacctaaggtgcttctcaaggtgctttgatcaggggtaagaggaccccagaccccaaaagggctaaaaacagcaacagttgcccctggaggtctgggtctttgcgggcctattttgtctcggcaccccgacacagaaatacccgggatgtctgcccatgggcagagctggtctctgaccaggcctttgggccaggctggagcacccgtgcctggcttccaaaggaacttcccctccctggcatggatggctcatcttgagtgacctgagcataagatgttgcaaataccccgggtagaggagaaggcgccttcttttctgctaccagatccggagggtcaggaaaggtgctccctgagaagggtcaaggaagggcaggagcccgactctcgttcagagacacctgggaaagacgctctcttcgtcagagtgggtcacctagggagaagccgggcagagctgcccccccccggcccgctccccggagcctgcagccgcgtttacccaaaccagctctcctggaaagccagcgggtgcggcgcgcccgagcagggcagcccaccacccgcagccggcagccaaggccgggaaagttggtcctagagcagcgcgggcctgccgggtgctgtccaaggtgctgaaaggtctctgcgggcagctggcgggaggattctgcgcgccctcagcctcccggccacccgctctgcccttccagcctgccgccctgtccccttcccggccgcgcagaagcctccgtccctcctctacgcccaccgagccttccccgctcgggtgccgccaactccgccgcaccgggcgccgcgccccaccgcgtcccgggccgcccgacccctgcccccagcagccacttgcaggtgccgcggtcgctgggctttcaccgccgccccctcctaccttcttctttcggtcacgggagcggtttctccgcttcctgttggattcctccttctccttctgctcctggagggcctgcgcctcgatgtctttgattttcttcagctgtttggccgcttgagccatggcgggtcacggcgctcccgtccccgcctcctggacccctagcgctcagcgatccccgaggcgacaccccctaagaaggggaagggggtctctgctccacagaggggacagcgttcgtggcgccccgagggccggctgctgcggggtcgcgggaaggcgaaggcagttccggacgcggagggcgaggggcggctgcccgcggcccgggatggcgctgccgccgcggccggagctcgcttgccggcgcccgggacgggctctgggcagggcccgccgcctccctccctccgcctccctccctctcctgcggcggcggcggcggcgaagcgggggggcgggggcggggaggcggctcgtactgcggcggcggcgggcggtgagcggccgcggaaggggcggattcgggcgctcagcgcgggaaggcccgggggcccggccggcgcggcgaggctgggcgcactgggcgtccgcacggggtcatggcgagcgccgagcttccgcctttgcagagccccgcgccgtcgggcggcgggaacaaagcggccgctctaccccggaccccgctgcgggccgcagggccaagccgggggaagaggggaggctgcggcgggcggcgcgccccgcgcccgggcgacccggcggaccagcgcgcctggcggcggcgagcgcggcgacatcgcgggagcggaggctcggcctagagggcgggcggcagagggcaaggaccgggcttggggagcccccgggcggtggccgctgagggcccggacgcgctactcccgagcccggggtgcggttcctccccgggcgccctcggcgtggggcgcgcgcctccggggctccctggggaagagccggttccccgcgccgcacgctgggagcttgatttgcccctttcagaccatgtgggcctttcatttgcatatttccgaattatagatgaaaacgtatccaggatcaagtgaattgttttcctttgagtcctcttgggacagaaaaggaagtaggtccccgctccagccccgcccgtcccccatccccggcgctcccgcgcacgcctccctggggacgccgcctgcgcccgtgccccgcggggaagagctgcacttgggtccgcagcgccagcccagcctgcggcaggcggagggggcctagggctcagccaaccaccccgtcacgccgcacaggagccagccggggtccccggctcgggagctgccgcccacccactccctctccatcccgtgggacgagcacttcttccacaaacggctaaggagggagttgtgaaaaacaatatttgagacttggagaagagttattatgaaatagtctgcctccttctgcctcccctaagctgagggcttgctgtagacatttacccagccaggctagagccgagaaaggaggcgtctaccaagctgcagagaacgacgtcctgggcctgcgagctgggccccacgcagtgcaaacttgggagcaactgggccttgcctctaaccccctgcagcctgcaagcgctgcctcacaggacctccccccgccgccccccccaaccctgtctttgcccttccatccccctctccacctgcactcctctggcaaaagccttgttttgaagacgatttcccagggctgggtccttgactgaggtctcactctagacgcagtgcgagccacaaattccaattccatatggaatttaaatttgcaagtagccatatctttagaaaaaaaaactggtaaaattaattttaataatatattttaattcaatatattcaaaatatttcaacatgcaatggatttattatgaataggacattttacattcttttactaagttcaacattcagtgtgtatttcacacttacatcacatctaaattcagaccctgcacattttaattgcttaatagttacatttgactagtggtaactctattacacagcacagctctagactgtctccctaggccaactcaccccctggccggggctgtaatcaacctaccgacaacacacataattaatctccagcacagcactattccttgagcacaggccccagggccactgttcccctgggcctcctcacagtcatgcctccattccctctggccatccgcctgtccaccctccactgcaggatggactgcacatcacagatgtggctattgtcacttctccacttagcatccttcctttttgctcctgaagatcagaatctgttacaccgcctatgaggacctgaatgatcaggcccttcctacccactgactca

SEQ ID NO: 587241 - DNA, 4001 bp, Homo sapiens
gtccccaacgccttcagttttgcttgagtcttttccatggcaccagtccttattttaaaactgcacctgttccttccttggtgcttcctatccccctttgctactttatttttattcctagtaactgttaccatctgactccagatacgttaactttcacaaatcccgcttatcgtccccaaccccaccttcctccagtgacatgttagctcctggaagacaaggacttcattttgttcactctcacatcccccagtgcttagaacagagcctggccatagaaggcactcaatatacgcttgctatatgaatgccgaatatgcaaattcttaaatctataataggtaaggctaagaagtttgggactataaagcccaacttatttccacaatgggaaatacaatttcccttttgataaagaactgtgagaatcctttgttttccatagtaacacaatttatataacatgccaaaaattccttatcacttcacatcctctctccagtgcctttcctgtattctgtaaaatattaacttactatcatcaaaaaatctttgatttccctctggtactgctaccataataatgcaaaggcaaagtgaactcactaaaaaatggtatggaaacataaataatgaagaaatgtaataaagtgtgttaacaaccaaacaaattcatctctatttcaaatcaaattgtactggcacagtgagaaccccagtccaagtttaactttattatcactatagtccttaatgagctaacagttttcttactaaactccttttaaactaaaaaggagttcatgtaggactcctgcatataaccatgaaaactaagcctgagagaaatcagttcaggctacaaatctaattgataaaactcttagacagcgctacatgtttggctagataacagacgcagggatactgaagtaagggagatgagaccaaatctcgctcagcctttgctagctttctgaccttggagaagtcagactctcggtgcctcagtttccttatctgtataatggaaatggtacctgatagggttgcttcaaggattaaaggtaccaggtatttaaagcaatggcaccgtgtctgacataaaataagcactgaaaatagctattactagaacataaaaataatccccacaccactcatattacagctctttaagaggctcctaggtaccaccgtcattttttaaagattgagaagcgctactattcaatggcatatttttaccttattatgttctgtagccaattccgaataccgtggaacgttacaaaaaacagatgttattttcttgaggtactgttgggaaaacctcagagagaacgatctgctttttagcactgcaagccaattaagggaggaagtttgcgattacccgagccctaagtggaaggtgtgcaaatccttccttttaacccgggcaccccggagccatgtgccattctggagagctcactcacaccccaacagcttgtcccggcgcctgaactgtgcgctcctgcaagcacacgccgcgaaagcaccgtctcgccccggccgagcagctggacctgcggcgtggcttccgcgctccaccccccgattaaccgcgagccagggctgcccgcgctgcccaggggttccccggaccacagccctaacccgcaagcgcaaacgagaaccctcgcaggcctctgcccggccctcgtgaacacacagaccgcgaagaagccatcacggacccgcggtcgcttcctcggcccggctccctccagtcgccgcggaaggtgtgggaagcccgggcaccctcgcccctcagggccccggccaggcctactggacctccagtgctacagggacggtgcaggagatatcaagtggctctagcccaggcgctgcccacaggccccgggccaagtacctgcgactcgaacgagcagcagcgacagcggcagcttcaaggaggcggtgacgggcggaggggaggggccagacaggggtagtcggagtccccgctgggccagagcggtctcgcgctgcagcccccggcgcgccccctgcaggtgggcggtcctcacggtggctcgggctgctctgagtcagagactccgggaaagcctgctctgaattagggaaagcatcaaaactgtggcttcagaagagaaagacagcctagaagaggtttatccgatctgagtccgggagcattttgcacttttcacgtcctattctaaattcacatcccatccccttagctaaatgggggcttcaaaggcaagggcagtttcattaggtgctataagcatcaattaatagttgctggcctctaggtaggtcttctatagacccgaaattgacatattaggaatagccactaatgattggctgcactatttctaaaatataaccctgcatttttacttttttcaaaagcagtttgaatctttttttttttttttttttttagacggagtctcactctgtcgcccaggctggagtgcagttgctcaacctcggctcactgcaaactccaactccgccttccgggttcaagcgattcgcagtttgaatccttccatcctactttgtagggttccttgacttattgcaacatgtacagccaagactaactaaaagtgtggtgggacattcatatgctggaaacattctttcatgcaaaactagttttttctttttttcattttaccaactccagtcctacagccaagacaactctcactgcacagtgaccgtcctctgaattctagcaccctcatccaaccaagccacgctctatggcaaacttgtccaacccctggcccacacctgcaggctgcatgcagccaagacagtttagaatgcagcccaacacaaattaataaactctcttaaaacattatgagtttttttttttttgcaatttttttttagctcatcaacaattgctggtgttagtgtattttatgtgtggcccaagacaattcttcttccaatgtggcccagggaagccaaaagattggacacccctgctctagggtatctcatggttcattcattcaaggaccacctacaccatctaataatttgttcttgaaagtgtcatgtaaaggtttaggactattgtcatattagaggaaatcactattacatttctttcatgtaagaattataagatctggccatgcacggtggctcacacctgtaatcccagcactttgggatgctggggtggacagatcacttgaggtcaggagttcgagaccagccggaccaacatggtgaaaccttggctctacaaaaatacaaaaattagccaggcacggtgttgcacacctgtaatcccagctactcaggaggctgaggcacaagaatccttgaaccccaaaaggcggaggtcacaatgagccgagatctcaccactgcactccagcctgggtgacagaacaagactccatctcaaaaaaaaaaaagttataagatcttagggcatttcacattttattgtgctatgactaatcagcaatattacttgttaaattgatgacatttattaatcagtttgttattgatgtcctccttctggttgtgtattgagtttataatatcttcactgatgcctataaactatgacaaattagcaaggaaattaaagcttttcccaatgtattaataagatttactcttcattagttgactcatccaacaatctgagagcctctccattacttctattcaaatttatctcttcctcttcatgaattactgcttttgattgatatgaaaaaatgtagggatggtgaagacagcttttttctctgatgagattaaagtgaactgcatgctgcacatattctatggctccttcatgttaccacacctgggcactttgacacagtggctgttaggagctgatatggtttggctgtgtccctgcccaaaatctcatcttgaattataataatacccatatgtcaagggcaggaccaggtgaagataat

SEQ ID NO: 587242 - DNA, 4001 bp, Homo sapiens
ccctctaacaagactgaagggttctgggcttttgcccttgcttggtatgctctttccctagacagctgcatggcggtccccaacgccttcagttttgcttgagtcttttccatggcaccagtccttattttaaaactgcacctgttccttccttggtgcttcctatccccctttgctactttatttttattcctagtaactgttaccatctgactccagatacgttaactttcacaaatcccgcttatcgtccccaaccccaccttcctccagtgacatgttagctcctggaagacaaggacttcattttgttcactctcacatcccccagtgcttagaacagagcctggccatagaaggcactcaatatacgcttgctatatgaatgccgaatatgcaaattcttaaatctataataggtaaggctaagaagtttgggactataaagcccaacttatttccacaatgggaaatacaatttcccttttgataaagaactgtgagaatcctttgttttccatagtaacacaatttatataacatgccaaaaattccttatcacttcacatcctctctccagtgcctttcctgtattctgtaaaatattaacttactatcatcaaaaaatctttgatttccctctggtactgctaccataataatgcaaaggcaaagtgaactcactaaaaaatggtatggaaacataaataatgaagaaatgtaataaagtgtgttaacaaccaaacaaattcatctctatttcaaatcaaattgtactggcacagtgagaaccccagtccaagtttaactttattatcactatagtccttaatgagctaacagttttcttactaaactccttttaaactaaaaaggagttcatgtaggactcctgcatataaccatgaaaactaagcctgagagaaatcagttcaggctacaaatctaattgataaaactcttagacagcgctacatgtttggctagataacagacgcagggatactgaagtaagggagatgagaccaaatctcgctcagcctttgctagctttctgaccttggagaagtcagactctcggtgcctcagtttccttatctgtataatggaaatggtacctgatagggttgcttcaaggattaaaggtaccaggtatttaaagcaatggcaccgtgtctgacataaaataagcactgaaaatagctattactagaacataaaaataatccccacaccactcatattacagctctttaagaggctcctaggtaccaccgtcattttttaaagattgagaagcgctactattcaatggcatatttttaccttattatgttctgtagccaattccgaataccgtggaacgttacaaaaaacagatgttattttcttgaggtactgttgggaaaacctcagagagaacgatctgctttttagcactgcaagccaattaagggaggaagtttgcgattacccgagccctaagtggaaggtgtgcaaatccttccttttaacccgggcaccccggagccatgtgccattctggagagctcactcacaccccaacagcttgtcccggcgcctgaactgtgcgctcctgcaagcacacgccgcgaaagcaccgtctcgccccggccgagcagctggacctgcggcgtggcttccgcgctccaccccccgattaaccgcgagccagggctgcccgcgctgcccaggggttccccggaccacagccctaacccgcaagcgcaaacgagaaccctcgcaggcctctgcccggccctcgtgaacacacagaccgcgaagaagccatcacggacccgcggtcgcttcctcggcccggctccctccagtcgccgcggaaggtgtgggaagcccgggcaccctcgcccctcagggccccggccaggcctactggacctccagtgctacagggacggtgcaggagatatcaagtggctctagcccaggcgctgcccacaggccccgggccaagtacctgcgactcgaacgagcagcagcgacagcggcagcttcaaggaggcggtgacgggcggaggggaggggccagacaggggtagtcggagtccccgctgggccagagcggtctcgcgctgcagcccccggcgcgccccctgcaggtgggcggtcctcacggtggctcgggctgctctgagtcagagactccgggaaagcctgctctgaattagggaaagcatcaaaactgtggcttcagaagagaaagacagcctagaagaggtttatccgatctgagtccgggagcattttgcacttttcacgtcctattctaaattcacatcccatccccttagctaaatgggggcttcaaaggcaagggcagtttcattaggtgctataagcatcaattaatagttgctggcctctaggtaggtcttctatagacccgaaattgacatattaggaatagccactaatgattggctgcactatttctaaaatataaccctgcatttttacttttttcaaaagcagtttgaatctttttttttttttttttttttagacggagtctcactctgtcgcccaggctggagtgcagttgctcaacctcggctcactgcaaactccaactccgccttccgggttcaagcgattcgcagtttgaatccttccatcctactttgtagggttccttgacttattgcaacatgtacagccaagactaactaaaagtgtggtgggacattcatatgctggaaacattctttcatgcaaaactagttttttctttttttcattttaccaactccagtcctacagccaagacaactctcactgcacagtgaccgtcctctgaattctagcaccctcatccaaccaagccacgctctatggcaaacttgtccaacccctggcccacacctgcaggctgcatgcagccaagacagtttagaatgcagcccaacacaaattaataaactctcttaaaacattatgagtttttttttttttgcaatttttttttagctcatcaacaattgctggtgttagtgtattttatgtgtggcccaagacaattcttcttccaatgtggcccagggaagccaaaagattggacacccctgctctagggtatctcatggttcattcattcaaggaccacctacaccatctaataatttgttcttgaaagtgtcatgtaaaggtttaggactattgtcatattagaggaaatcactattacatttctttcatgtaagaattataagatctggccatgcacggtggctcacacctgtaatcccagcactttgggatgctggggtggacagatcacttgaggtcaggagttcgagaccagccggaccaacatggtgaaaccttggctctacaaaaatacaaaaattagccaggcacggtgttgcacacctgtaatcccagctactcaggaggctgaggcacaagaatccttgaaccccaaaaggcggaggtcacaatgagccgagatctcaccactgcactccagcctgggtgacagaacaagactccatctcaaaaaaaaaaaagttataagatcttagggcatttcacattttattgtgctatgactaatcagcaatattacttgttaaattgatgacatttattaatcagtttgttattgatgtcctccttctggttgtgtattgagtttataatatcttcactgatgcctataaactatgacaaattagcaaggaaattaaagcttttcccaatgtattaataagatttactcttcattagttgactcatccaacaatctgagagcctctccattacttctattcaaatttatctcttcctcttcatgaattactgcttttgattgatatgaaaaaatgtagggatggtgaagacagcttttttctctgatgagattaaagtgaactgcatgctgcacatattctatggctccttcatgttaccacacctgggcactttgacacagtggctgttaggagctgatatggtttggc

SEQ ID NO: 587243 - DNA, 4001 bp, Homo sapiens
ttacttttttacatgtattcattctttgtgcacatgttgagttcctttactattttctgaaatgtcatagtggtcctggtgtagcctcatgtgcttgatttcaaggagttgttaatgagacactgttgggaacagaaactaagcccctagaagagttcatttttacattacctgtaaatacagtaacaaactttttgcagggaaagatttccctgcttggaagtcacacctgatgatggctggtggctggtggagggtccaacatgacagatcactgggggctcatattggccccatgacagagcaggggtcatacctatgatttggggggaaaataaagtgcttacaggctgtggggcctctggctctccattccgtgatgggtggctgagaggctgcacgactgtcgagggttgggagtcccctttaggcaactgttgactgccttctgagagggtgtacgactggctctgaggattaaaaaaaaatacataaaaatgctggtccactcctaaaggccagctgctccctaggttgactttcaaaagacaaaattatcctcctaagctgtgaatgcagggtccattgattattcctggggtcctctgcatctatcagaaatatttgaaaaataggcttcagtttctctgaaagatacactgaacggatggctcataatctctgctggtatgaaaatgctatttgtagatgatttgaaaaacaatgcctttcctaagaatatatttgtaagtttgtaaacatctgagtgcagcttgaatatatagcgaaggaaaaaccttatagacaaagtaacagtttacagaaagttttggagttttattctctgctcatagtgtgcatgaaatatatcattcttgctgtggaaatttacagcaggtacacaaaaccttattaagatttgtattggaatagctttagatatacttcaatgtaaaaaatattcaagattcaactctgatctgtcctgtgtgtagttggttccaaaaggtagtgttttagtcagtttttagtcattaactatttatagacacactattcaggagcctaaacatttcaaaagaaatgtaaattattaagtccattccatggatatttgcaaatatgtggatgtttagaaataataatggaatattttcaccttgcaatccaagttgtgtggacttacatgagtatttaccttggtctattaatatttgcaacatgaacctatctttcccacataactctgaatgggcttagtttatgaagttttatacaaatttgctacaaactaacagctttagttatacattctacagatacatattaaccatttgctctctgcaaggcactatttactgccttattttacatacttctttctctttagcccctcttaagagatttttggccaataagggaataatatatccccagtgcttttttttttttttttttgggacggagtttcactcttgtagtccaggctggagtgcagtggtgcaatctcggcttattgcaacctccgcctcccaggttcaaatgattctcctgcctcagcctcctgagtagctgggactacaggcatgttccaccacacctagctaactttttttttttttttaatttttttagtagagacagtgtttcaccatgttggccaggctgacctcaaactcctgacctcaagtaatccgcccactctggccttgcaaagtgctgggagtacaggtgtgagccaccgcacccggcctcaatgcattttaaaagcatggtatgctgttgctaaaaccaatattaaagggtaaccatagtgataaagtatacaagtatcagtcatgattttatagtttaaattcttccacatgctaaccaaaattaaaaccaattcccaaaggcaatgagtacttacatgacgattgcccattttcctttttctgagatggtttttctgtatttcatcaagagatcagtcctcctacaggcaaagtttacaacagttttccccccggacataatatctcttgtgtttaataagtaacttttggcactgaatttgaatacattgttggggatgggtagggagtggctctagctacagataaacttagactgcccaggtttccttggtacccatgtttttaaaataatatacttcttaataaataaagtttaggcttttaaagttgaatagcttcttcccacctaaaagactaaacctgcctcacttctgaattgttgagttattctttcatattctggtgttcatttaaaatattatgccttttagtaatgaaagcattaaccaaatagaaaaatattactattttttactaacattgttattattattacagagaatttttcgaaggctacattgcattacactagatcatttaaaaaattttactgagttttgaatttaaaaagtaatatgtgcagatggtaaatttgtttctaataatacataaaggtcctgtgaaaagtcggcctactgacttcctttttccttcccccagaggttttccgtgagtccttcctgaagtggtccatgcatattcagctatgtccgtcggtctgcctgtctagttacctacctctctgtttatcttgatccaacttgtcttttcttcctcaccaaatgggtttgtacaatgtattctgttccatgccttgcatatttcttgtctttcctttttttttctgagattattacaacatgtttctttttttatttgtacaaacttatgtggtacataagacattttgttacatgcatataatgagtagtgatcaagtcagggtattgagagtgtttgcctgagtacaatagatttctgttgagtacagccaccgtactctactatccaacactgaatttattccttccatcttagtgtgtgtttgtaccctttaacccacttctcctcttcccccgcaactcaccctttccagtctcttttctccatctatccactctctaccttcatgtgatcaattttttagctcccacatttaagggagaacatgtgatatttgttataagggagaacatgtgatatttgtctttttgtgccttgcttatttcacttaatatagtgtatatttcatatactaaagagatatttgacactggcacatttctttttcagtggccatgtagtcaactgttatggatatgaaccaaaccttatttcatcagtctaccgttgaaggtcatttagattgtttttgatcttttgcatgaatatctcatacacatctttgttgtgctttcttatctgtagaataaaatcttagaatagagttgctggctaaagactatgtgcactgaaaattctgatagctgttgccaagttgtcctccacactgacataaaatgctggaccactcttaaagaccagctgatccatgaggcttactttaaaaaaatgaaaatttcactcccactatatgaatataccagtgtgattttccctacatattggctaacactaaatattgtcaaactttgtcatttctgccaacttcaaagataaaaacatggtgttttattaaatttacatttctttcatttgatatcctggaaattgtatatcccatttctttaaagccatttgtgtatttttttctgtggtttgcttgtttgtggtctttatttttcttttgagttattagtattttcattatttgtttgtaaaacactttatttataataaaatctaggccttcatgaagtgtaacaattatttttccccagtttgttatcttttgtctttgtttgttttgagggtatatatgtgaagaaagtattagctctgatgtattcaaatatatcagtcttttatttttgacttgcttagaaaaaccatttctgcattaagatgcttaaatcttcttgcataagtgttcctccaagttcttttaatggcttaattttcaaaggcttatatctttgattcatctggaattgattttgacatacattaaggaaggaaggg

SEQ ID NO: 587244 - DNA, 4001 bp, Homo sapiens
ccactcggtgaagaaactcaatgacaaacagaggggggacctccgtctggatcacggccacaaaaaagatcttgtggcggtaaacacttaagagatagtggtgaggggtagggataaccggaggcacattttctgcctcagtagctctctcttgcgcctcaaaaaagtaatcacaaacagaacggctgaccacacttttccaatgtttctccaggaaaatgtctccagaggagttgatcaagaaaagactatggatcatggtggcgattgtcagtgacagaagaaagcctttttcagtctgaaagcctcaggactctgtaagttttcaactctaaaaacaaaagcagcgatattcagttccattcaaccaaaaggccctccccatcttttcccaacagtccaagacttacccatctttcaagaccaggcccaatcttcccctcctgcatgagcctgaagatagccctcccttgaattcgaaacgataatgatcagtcatctgactgtcaatcatatactcccagttatctttactatcgcccaaattgcatccatttaaaatactacttatctgtgggtgtctattttctcaaccgaaccgcaaactccttgaagaaaagggccgtgcctcatgttttgcgttgcctgactgcaacacaatcagtgttctttgaagagggcttccaagaacactgaatttgatgtcatgttttggcaacagctcacacatacacaagaaatgcgcagcttaatacgatagccactatgggaccagcgagcacttgaaaggtggctggtgcggactgaggtgtgctgttaagtgtaagacacacgacaaatctgaaaggctttgcatgaaaaaaaaaatttcaaatatcttaccaataatttaatattgattatatgttgtaataacattttggatatcctgggttaaatcaaatatattaaaattaatttaacctgttttattattttaaagtggttaccagaacatgtacaattacatatgtggtttgctttctatttctgcccaccagaattggtgggaggaatggaaagctgcccttgggggtctttattcatccaatcagagctattctctgagcactccttaggcacttgttaatgcagtaagacatttaaaaagatcccttggggctcccgcctgtgatcccagtacttagggaggcctccgcgggcagaccgctggagctcacgagttcgagatcagcccgggcaacagagggagaaccccgccccctccacctccaaaaaaaaaaaaaaatttccctgggggacagacaccccaaggccctcagacggttgcatctctctggtgccagtcgccaggatgtggccattccgcgaaccggcgcgggtggtcaaaacgcagaggcctgcggtgcccagcgccgcctggaggagacagcaggagggagagacagccaggcagcccggggtgcgagggagaggcagcggcctaggcaggcggtccctgcgcaggccccggcccagagccggcggcgacggaggccgcggggcgcaggcgggcaggggcctggctgaaggggcacgcgcgttccggggtgaagagcgcaggggtgccgggccgcgccagcgagcgcacgtgcgctgccatggcaacagtgtcccctccgcccgcagccgcggcgccgggaaggacgccctccccgaactctgaacccggcccctcacctctccccgccgcgtccgcagccctgagaggccgcccggctgcatcctgagaccccgccccgaccctcgcgcgcccccactcctgccccctctccaggctcggggtcgtccctactcctcacctggccttgctgctctcagcgcccactgctcctaggcgcggacaggccccgccccgcccgccgcgcgcgctgaggcagccgctcgcccgctgattggccggcccgcggcctggctaccgctccgcccacgatctgcgcctgaaggccgctgattgggtatctgggagccgctcctcccctctgattgatcgctgttggcggcttgccctgttgtcgggctcgagtcccccgattggccctgttgaggccacggtcatctccgattggtacagctccgagaccccgagtcctgattggaggtcgaagacagtgcgtgctgctcggccccactcatccagtcacaaagggctggggcggtcgccgcgctcgcgtgtttgcggagtgcgcctggagggggcgctggagtatgtgtgtgccggggcggggtggcttccgggcacgagttgctgacagcgcctcgcggttgataaatcctgagggcggcggctaccctgcactccatcggtgcctttgggaagcgccgccttctctgttgtacccggccgtgggtcaggtcggcgcggctggcggtggagtctcggacaccgagccctggaccccgactctggaagcccccagccccactgggccgcggcagggcgcccaccctccacaatctcagttcccagccggggagtgaggggctgggcgggtctctccaccgctttggagacctcaggacttggatacgcttttgagtggtcccagtcgtcctgatccacgaaggcgtggagtggaagtcaggaccaggggtcgccccagtgacgcaggaagtcaagcccagatgcggtgaggcgtcgccagccttggacccagcagtgggcgctggtgacagtggcgacctcgccgatgagaggttcgccctccctagcattagttgtcactttggtgaaatggagcgtgggtggcagctcctccacacacaagccctttgctgaggtggtgcggggggttctctccacgcttgctaagggcaggtagttggctgactttgaactatgaagaaaagccagaaacaaaatggcagaatggtatgactctgggtgggcttagggacgctggtgccagaggacttggcttgaacccgctccaacacttacaacctgagtgaccgtgagaaagaactgtaactcctctaaacttcaagttcctcacttctcaaataagaacgtgaatagtacctccctcctagagttgtgaggattgagttagaaaatgctagcaattgttatgccctaaggaacagcacaagatacaataacacgtgataatgtgtgtcgaaggtgcagaaatgcagtcgctgccgtgagaatttctcattcattcactgaattaacatttgccgaaaacccccacgtatcgacctgtgctggatgctggagatgctgcaatgactgctgtcacaggcattgtccctgtggttacagggcccagcaggaaagacaaatgagaagcaagggattgcaatgcagtgtgatgaataaggaacgcatagggggtgggaggagtgctgtagagatggctgacctagagtcagggaagaccctctaccttgaaacctgaaaatgagaaaggatccctcaaatgcagggatagatggacagagaaaaaagtacataaggaaggctctgcagatgagcaagttaagtatagctgagctggaatggtaggaagagcgcagggagatcaggctggaaaggtaagtagggagcctagtggttgtgaaccttggaaatgttaatatttataaaacactgtgtgccatacactgtgttttataatttgtaagtaccattccataaatatttagtgagccctaccatgcgccaggcactgttccagtgcttggatacataacaccagtaaacaaaagacaaaaatctcttggagctgggcgcggtggcttacgcctgtaatcccaacactttgggaggctgaggtgggcggatcacttgacgtcaggagttcaagaccagcctggccaacatgatgaacccctgtctctactaaaattaaaaaattagccaggcgtgatggcacgtacctgtggtcccagctactcaggaggctgagacgggagaatcgcttgaacccaggaggcagaggttgcagtgagctaag

SEQ ID NO: 587245 - DNA, 4001 bp, Homo sapiens
caggggctcacctgaggggccaggaagcaccgggacatcaggtctgctctgctgcgtgtgcgacttctactctcccctgggaggagggggccgcgctgcccgaggctggccagctgccctgggaggcagggagggcgtcagctggctctgcggatgccgggagagggcggcggcgccggaagtcgaggctccctcagcattggctctgccctagcttctgctctgggtgtcccatgagcttggtggccgctggcccctgccatccggacacttggttttctggatgtccagagggcctgggtgttgtagcagaatgaggaagctggggtgttctgtgatggcctgagagtgtggagggtggggtccaggccggaaagacagacggagggagggtgatgggtggagccctgcaggggggagggctctttgccgctgggtgcggtgctcacatctggatgacacgagtgtgtgcgagtccgcccggagctcgagggggcacccagctggaccagggcttcccctgcaggagtcagccccagctcaaaagtcctggtgggcaaagccacaggctggatgtagtgggcaggctgggggctccgggatgccctctactcgggctgggtccggtcactggccacggactcgctgttgggggcgggcgtgagggtctccgcctcatcctccaccgggaggtgggggccggccggctcggccgcctgctccaggtcatcctgcacctccatgcccctctggatgagctgctccagggtcttgggcagggggtggcgcaggaaacgcttgagcttgggctgcagggtgcccaccacgtactggatgatctcctcctcgtccgcgtccacgtagagcgtctggtacaggtcccgcttgcgccacaggaactggtccagcggctcgccctgcttctgcggcaggtccagctcgcgctggatggcctctcgggacagcgtgccctcgctgtactgcaggaactccttcttgaactccacccagttcttcacggagccctgcttgaactcccaccacttcttggccggcccgttcatgtgattctggatctgggacagccagtactcctcagagccgcccacctgccgcaagtactcctctaggtggctcaggaactctcgagggtcctcgaagatctgcgtgtccacgccggggctgggctgcccgtcctcgccggggacccacggctggtactgctgggcctcggcgggctcctgcccgggcagctcgccagcggctgggggcggggtgatggcgtaggggctgacggtgtagtcgtagccgtctgcctcgtggcagtagctctcgggaccccccacgcccacggaaacggtgtggcgggctgactcgctgcccaccgggtacttgccgcccgtggactccaggcggtcggcccagcgctccaggcggtagaacacctcgcgccacacgtgcatctcgcgcttgacccagcgctccaggttggcgatggtctcctggcagcggcacaggcaggccttgatggacttcttccagcgctgcgagtcgctcgtgggcacgtagccgtccaggttgctctccagcttcccgaccgaccggtgcagccccttcagctcgcgctccacctgcttggacacctcggccagcaggtgccggtgcgtccgccgcacgtgctccagcatctcggcccggcacttcccgatctgcaggatcacgttgggcttggccacctgcccgccccgcggcccggggtaggcgtggagcccgccgctggtccggtggtccagctccatctgtgcgcaggtgctccggcaggcggcaaactcctcggggcggacagagggtggtccggcgctggggtccggcggcctgggtcccgtgcggagctgcggggagcgcctgtctgtcgctgcgggccggcggcggggccggcggagcacgcccggggaggcaggtccggctcggctgctgcggagggaggacgccgcgcccgagctctgcgctgagtcctggccgccggctctttatgcagccagcgaggcccgtgggcggccggctcgccgagcccggtttctcattggcccagccgcaggctccccgccagcgccccgcccgcgcccctgcaggccccgccctgcgcccactcggctcccgggcggcaagggacgggaggtcccaccccctgcacacatggcggggccaggatgactaatccctccgctccgtacctcccaccccggacggcggggctcattcagcctgcggggaccgagggactgagccgggcactgggcgcccctcccacgccccctcccgggcgctgggcgggctgtcatctgctgcctcccagggtcccaaggtggccttcctcctctccactcgcctctctctttgcggggctggagggggctggcgctggccactgctctcctgggtcctcactgcccctgaccccgcccacccagctctgcaggatgtgcagctgagcccgggaaggaccctcaccatcagcctctgtgcccaggggctcagcaagtctccatgtgagctcccagatgtggctttgagctcccactcactcctgcccgggtcctgagtccaggtcttgggctctgtgtgagggacgcacagccaggcagaggctcgctctgcctggccctggcgttggtgtgcatgggtgacaggggcccacgtggcagtgactggacagggctgccccatgcccccatacgcaggtctctggtgaggcccaatacttttctgtgtttccagggaaatctggcagctgctacctggggggctggggtttggaggacatggaggggacatttagcccccagtgaagggaattgggccctgaagaccctggctatatcaagaacctggccagaggctccaagacttctaaggggatggaagaggggaggagagagggagacagggagggaggtggaaggagggaaaggagaaggggagggaggagaggcgaggagggagagggaggggggccggtgctggcagcacagtgccatcaggagaggcagagggaagccaagcaccatataaggagcggggctccggaagccgagactccctcgggagggaggtcccttctgcctccctggcaacctggcgggggtagggacgcccttcctgagttactccagtgctggctggataggcatgggtctcaggtcctctgatgttacccaggcaggggtgacacacaccattccccacagccagagggccatgaggacatcatcgctgacaatcaagacatcttgttcctgctgccagctgccctttccctctctcagacacacacatgctgcacactcacacccccacatacacactcatagcccccactctaaccccaccccacacactcatgccctcactcacagcccccacacacactcataccccccactcatagctcccacatacacactcataccccccactcatagctcccacatacacactcataccccccactcacagccctcagctccccccagcatcccctgtcttattcaggcactcaagggcacacaggtgcccacttgctggaatcccccctccctgccaaccctctgagcccccccccaaccggctctcccggggagccctctcccagcctcagagccagtctgtctcctccttccttccgcccctgggggggaatgtctttctggcaaaaaaactccccaaaaatggctctcctggcatttctaattaaaggtaagtgggcggacagagaagggagggcggaggggcaccgcggagctgggagggggagccaggcagagaagtctccagcacagggaccttcccgcttctccactgcggaatcccagggagaggagctgggtgggcacatgcgggacgggcagacgccagcagccttgggtgagtgcagccagcggtcaccgagggccacatgtccgggttggggccagcctgagcctgtaggtgttgtctgggtg

SEQ ID NO: 587246 - DNA, 4001 bp, Homo sapiens
taacaattcttttaaaaatcctgaaatcactttctccccagtctcactccaatttaatattattcctttcaggatctagatataaatacagtttttgccactagacaactgtcttctcatacaccgggaacagtcttttgttagctacaaaaataacaaaatgcaaacttctggtcgataagtaaggtgaaaaaataatcttaagcccctaatactacacattcaaatgttttaagatgaaatttcttcgacgtttttcatattaccaattttaacgatctaggaaaaaaaaactacagtatattacagcaaattaaatggtagtcttccatttaataattaaaagctaattttaagttgtctagactccttaactctagcatactttaagttattgtggatttttcccctttcaagaatgcttttttgtaaagcccatttaacaagcttccttttcttgccaatttgacctagtgtatttccagtgctataaagtgtaaacattaggaatgtatctttgtgttaaatgttctggtctctcaaacgatttcaactttgatggatgcaatagatctaacaatgttccccctttaacaactcctcatctgcctaacctcataggtaggaggtattgtttggattttccctgctgcgggcttcattacactagatctcttccatctgaactataaatcacaattcaagcttgagagcagctgccactgtccagacatgtggctggtgggtgtcattgtctttttcattttcctcatttcaaaccctcccttcccttgtcacctaaagccattttatctaaaggttctttgcttccctgctttcatgccgccacccccaccctcaccccttaaccaccggtcttgttcttccaggtcagcccagtcagatacaatattactctatgtttttcctgtggcggaggcggagagatgtcagaacgggctgcacctcttgcaaaccccttctcaagactgtcaacaaggaaacaacttcagcagcctatctccccaaagtacctcgccaaacgaaaaagttattgttaattatgatacggaacctttcccacacccaatcttgacataccagccccacctcaatttccaagctaataaacaacagctcatcttctgcttcatcacaaagggtggtatccagtccgcacctcacggaccaccaacaaaatcctctcactctcaagtcgatccctcgaacccaggtgccccgcgatcctaagccctgccgcgtttcccgagcccagctcactgcccttcctcctctaccccgcctctgccccacatccagccgagttcctgtcaactccagacagggaacagagggctccgcgagggcttcccgaggtcagaggcgcgggcctcgggcaagccccgggcgaccccacccccccacaggcgcccccctccccgccccacaacaagcaccccatcccccgggcctcctccccgctcacctaacgccacctcgcaagctttgcgcagctgggagtgatgcgccttcttcacttccttgtcggccaatatcttctccagagcccgggtcaggaacatgttcttcgtcttcttcccctcatacatggacgcagagaaggaggcggcggctcgtccgacccgcggctcccagcggctggaggggaggaggaggagaggaaggaagagaagagagaaaggagagggggtggaggtgggggattggaggcgtggagggcagcggcaggatcaggaaggggcgggcgagcgggaccagccgcggtgtcggcgaagggcgtcgaggtcctcgccgcccccaagaagccgtacctcgagggccgcgcccgtcgggcctccgcttctcccggcccgggggtcgcgtcccggccgcccctctcactcgtccctccggccctggtggcggtgagggagcccggcccgggcggctgtctgccgggaactgagggacgaggtggcggcggctctcagaggcaccgcgagagaagggctaccctggctactgtggggattagcacccgccgcggccgcgaactggcccccatcaccgccgacctgccccggccgccatgttgggaggaaacgacgcgtcacgcagcggccgaacggctgcagacgaggaagcggcggcggcggcggcggcggcggcgctccctgcccagagctgccgcggcgccgggaggctgggggcggagggcggcgcgggaggagcggcccgagccgcagcgctacggcggcccggcggggcctccagcgttcgcctgcagggcggcgtggggcgtggcgggcctctggtggcaccgcgcccagcacttcgggctcttggtggcggccgagctgcgggaccagagatccccccactcggcacccctgctcctgccgagtgaacaggactcctggctactctgcactggctttctaactttctgatgggggtgcagtcctttgcattccaggggtcacagcaacacccgcatcgcccgttctcagccgcagggtctccgcctgcatcactcgactctaaaatttccttccctagtgcacggaactgctgtccaggactctgctctccgactacctcagggaggattctgttttgggaaaagtaagccaaaacctattgataagggttcaaaaatgtttcacttttttctctctctgtcggataaatcggtcaactctagatttcaggtcccttctgaattgactcagttaaggtgaatggttgtgaatgaggtcccttagagttctgtgtttctgtgcctttaatactaagatttagtccaggacatgtaaaccagtttagaatggaaaagctttaagtacaaacagattaacacacgtgaccatgtgtttgctttagtctgagtgtagaactcaaatttctgcagtatttaatttctacagtttccttctgagcagaaaaagaataccataaaaatatttgcaaacattatatatggtgatctagggtcacgtctccaagttctaagcttctgtggctccacgcacacaggttccctaatgtttactatgcatctgtcactgttctgttctattagattgccttaactataggcttgtcctaacgtaaccatccaaacctaaggaaggagaaacttaagtgactctgtgaacttagtgaagtgaccagatttaggaaggctaaaacccagaggaaataaaatggaaaacttgaaggtgacaaattaaagtggaaaaatagattaatttttttaaactttattgtcctgagaaacaaatctataaattcattaattttattttagagactatctctagattcctggaaatgaaggattcattatactcttagatcagatataatactgatttctgtgtatacgttaataaacttttttagaacaagttccatttcttttatttttttcttcccttctttcacaggtgttgatccatttctaattcatctttgtttcttcataatggagtgttgtgccaggtactgttgagggtactagctgatcaccaaacccatttactcttctttcttagtatagaattgcattgtccagcctcccttgaagttaggtgtagccatccaggcttaacctattgttaaaaaaccaacaagaaattcccacaagcaatctttcatgctgtttcccttttttttttttttcttttggtagagatggcatctcaccatgttgaactcgtggcctcaagcgatcctcctgcctcagcctcccagtgctgagattacaggcataagccaccatgcccagtctctcttttcccttctatggccacagctgaagatggcagaaccacaagttaggagtcttagtttctgaattggaactcttggagaagaaccatctagaataactattttgtactttacatgaacgaagcagactcttcggttatgtttagctgtcagctttatcgtaaaacatacttgggattcattgatgaacaagacaagctggcacc

SEQ ID NO: 587247 - DNA, 4001 bp, Homo sapiens
ttcatgtattttatagctctgttattaggtgcatacacatttacagtgtcttcttgatgaatgaactcttttatcatgaagtatctttatcctggttgtttcctttgctctgaaatcagtacatttgatattacagtaactccggattgctttacatcagagttagaattgtgtaacatttatccttcttttacttataacctatttatttatttaaatttaaagagggtggcaaggcacagtagctcatgtctacaatcccagcactttgggaggctgaagcaggaggatcccttgaggccaggagttcaagaccagcctgggcaacatagcgagaccctgtctctataaaaaaattagccagacatggtggggtgcacttgtattcccagctactcgggaagacgaggcaggagaatcgcctgaatctgggaggtggaggttgcagtgggccgagattgcaccattgtactccaacctgggtgacaagagcaaaactccatgtaaaaaaaaaaaaaaaaaaggaggatgaggccagaggattccttgaacccaagaggtcaaagttgcagtgagccacggctgcaccactgcactccagacagggcaacagagtgaagtgagccacggctgcgccgctgcactccagccagggcgacagagtgaggtgagccacggctgcgccgctgcactccagccagggcgacagagtgaggtgagccacggctgcgccgctgcacaccagccagggcgacagagtgaggtgagccacggctgcgccgctgcactccagccagggcgacagagtgaggtgagccacggctgcgccgctgcactccagccagggcgacagagtgaggtgagccacggctgcgccgctgcacaccagccagggcgacagagtgaggtgagccacggctgcgccgctgcactccagccagggcgacagagtgaggtgagccacggctgcgccgctgcactccagccagggcgacagagtgaggtgagccacggctgcgccgctgcactccagccagggcgacagagtgaggtgagccacggctgcgccgctgcacaccagccagggcgacagagtgaggtgagccacggctgcgccgctgcactccagccagggcgacagagtgaggtgagccacggctgcgccgctgcactccagccagggcgacagagtgaggtgagccacggctgcgccgctgcactccagccagggcgacagagtgaggtgagccacggctgcgccgctgcactccagccagggggatagagtgaagtgagccacggctgcaccactgcactccagccggggcaacagagtgagatcctgtctcaaaaaaaaaggtttattttagcccacatatatgtgagtattgattttttatgcaatctgaccatcttgctgtgtgttacctgttctatctgttctcttttcctcttttctgccttctttggattaagtattttatgtgggtcaactttatctccactgttcacttatcagctgtaatttgttgctttgctattttagtaaatgcttttgggtttataacatacatctttactttgtcatactctgccttcaacggctattctaccacttcaaatatatgcatttaccattttcttctctcctggccttttatttttgccatttttgtcaaatattttatttctgtatatgttataaattcctctctgttacacagttactattcttaaacaattacattttagagagatttaaatatcatgtatttacccatgtagttaccatttccagtactcttcaattttctgtatagatccagacttccacatggttttgttttccttcagcctaaagcatctgtaacatttctttcagtgaaggtctgctggtaatgaactagttcagctgttgtgtgtttggaaacatctttatgtcaccttcacttaaaagatatttaggtatagaattcttggtggacagtttttttttttttccctttcagcatcttaaacacactacaccattgtcttcgcacttgcattgtttctcatgagaaatctgctgtcatctgtgtctttgttccttcatacacaaaaggccttgctttttttttttctggctgcttttgagatttatctctttgtaactggttttgagtaactcgatgatgatgtgccttgtgtgattttcttcatttcttgtgctcaggggtccttaagatggtcagatcatgtgacatgaatccattggtcaacaaagaaaaaagaaagatggtcagatctaggcttatagtttccatcaaactgggaagcttttcagctatcatgtcctcaaacaattcttctgtccctcccttcccacttagggactccaatcacataattgttaggcctctgaaagttgtcctacagctcaatgatgctcttgtttgttttaaagtatttcttttccttgtttcagtttggagagtgtctactgcttcatctttaagttcactaatcttcatctgcaatctctgatctaccattaatcccatccagcatattttgtacttggacattttcgtttcaactctaatttggatcttttaaaatacttccatgtctctacttaatgtgttcagtctttcctgttgctctttgaacatatggaatacagttataataattactttaataacctgtctgctaaccctaacatctatgtcagttttgatggatttttcactccagtatgggttctattttcctgtttctttccacacctgataatctttggttggatgccagacattatgaatgttacctcttggaaagctgcatattttttgtgttcctgttactattttttttttttttttgagacggagtctcgctctgccacccaggctggagtgcaacggcacaatcccggttcactgcaacctccgcctcccgggttcaagtgattcccctgcctcagcctcccaagtagctgggattacaggtgcatgccaccacgcccagctaatttttgtattttcagtagagatggggtttaaccatgttggccaggctggtcttgaactcctggcctcaggtgatccgcccaccttggcctccacaagtgctgggattacaggtgtgagccaccgtgcctggcccgttactattcttgagctttgttttggatccagatacttggaaactgaaaatgttgactcttgcttctgagattgtcacacagcagcagagcagcatttattctagggctaactgttctccactgggtacgctaccacatgccctgtgagttatgaggtttctcagtcagcctgctggcaacaggcactcttcttagtgttttgagagctctgagtacttactgttccctctaatccttccaggtgttcccttactgttccctctaatccttcctgttctctggtagtttccttatatgaacacaatgatcagtatgatgttgaaaaactaagaggaatcctcagcccatcctttcattccccatttcaccccttacgagtctggatcatgggggcagaggctcacgcctataatcccagcactttgggagaccaaggtaggaggactgcttgagctcaggagttcgagaccagctgggcaagatggcaaaacctcacctctaccaaaaaatacaatgattagctgggcgtggtggcacacgcctgtggtcccagctacttgaaaggctaaggtgagaggatcgctgaccccagaaggtcgatgctacagtgagctatgactgtggcactgcgctctagcctgggcaacaaagtgagacccccttctctaaaaattagaaaaaaaaaaacaagtctgtatcttacagaaaagtgaagcacgtgggccttctgcctcatcttgccagatgtctgcctatactcagctccccgagacacaaccccattcttttaaaatactcatcaatgctatctccaaaaatccattcttgttaaacaaaaacccagcctgct

SEQ ID NO: 587248 - DNA, 4001 bp, Homo sapiens
tcatctctcttttcgaataaaaattattttctataaagcaggtgttcaaaacatattattaatcagcaacagtgaaattgttcctccttgcagcattccacccatatggacattaagtcactcctgcacagaatctagaatactgaccagtccgtactcaggttatggttaaccagagaaaagaattaaaacccgttacatcttgagtcaatgagaatttttacttgcagccaaagttagtgactggaatcaatatcagacaacagcaagttcgtctactgctgcctgggaacatgacctactggccacagtcgggaggggtactcagacctcaccttcagtgcccaggggcccatggaaggggagtggggctgggacaggtgggcagggcgtctgtggacctagggcagtttcctcagaatctaccttggcttcttgggcaccagcgggctgtggggtgcaggggaacaggtggagtacgggggggacagctggggtgcgagggacagctggggtgcagggtaaacaggtgaggtgtagggggacaggtgaggtgcagaggacaggtggggatcagggggacaggtggggtgcaggacagttgaggtgcaggggacaggtggggttcagggagagaggtggggtgcgaggacaggtggggtgcgggggaacaggtggggtacggggagacaggtggggtgcggggggacaggtggggtgcaggtgaacaggtggggtgcgggggacaggtggggtgcggggggacaggtggggtgcggggggacaggtggggtgcggggggacaggtggagtgcggggggacaggtggggtgcggggggacaggtggggtgcggggggacaggtgaggtgcaggggggacaggtggggtgcggggggacaggtggagtgcggggggacaggtggagtgcgggtgaacaggtggggtgtggggggacagctggggtgcagagtaaacaggtggggtgtggggaggacaggtggggtgcgaggggacaggtggggtgcggggaactggtggagtgcagagttaacatggggtgctgagggacaggcggggtacacggggtgcggggaactggtggggtgtggggggacagctggggtgcagagtaaacaggtggggtgtggggaagacaggtggggtgcagggggaacaggtggggtgcgaggggacaggtggggtgcagaataaacaggtagggtgcggggggacaggcggggtgcgggggaataggtggggtgtgggggggacagctgcggcgcgggggacagctggggtgcagggtaaacaggtggggtgcggggggacagctggggtgcggggaactggtggagtgcagagtgaacagggggtgctgagggacaggcggggtacacggggtgcggggaactggtggggtagggggacaggtagggtgcgggggaaagacgccggctttccttacaccggtccttctctgcatcctgaggcggaccgcattcttctcctttaccggaaaatctaagttactgcacgaccccccaggcgaagccagctcgcccctcgggctccttccgccgatcggagttcgctcctgcccctggggccaggggtccctgctgccagtccctgctccccccgcccaggcccgcgccgttatcctgaggggccgggggcgccgcggaagggggagctgctcggggggagggggtctcagccccttccctgaaacatctgcgcagggggtcgggggcgcagccacctccgggtgggacccagcgatttcgggggagccgggcagaagtgcaactctcaaaggaaaccagaagcccgcgaggggacccacggtccgcggggcccgcactcacctcggcggccaggacgcgacccgcagtcccctgctgttccccgccgtcccccgctgttccccgccgtcccccgctgttccccgccgtcccccgccgttccccgccgtcccccgcgtcccccgcgtcccccgcgaccccgtccgtcccggatcgcgcgcccgccggctacagggatgcgcccagcccctcccgcccggacggcctgctccacccaccatgctgtcattggcgggcccagaccgttccgggcgcccattggccgcagagcctgccggtttctcggcagcgccctgccctcgcgcccgcgcattccttcgaggccacgtggccgcccgcgccccctcccgctgcccaacgcccggcccaggctgcgcacgcgtgggagggggcgcgcggcagaggctcccgcccccggatcatctcctgccccgcggaccccgggccgcgctcacttcgggaggggtcgctgggcagaccgagtgccctccccgcccccaacatctggatcctccccgcagagcctgctcccggctcagagctgcgccccttggggagggtgcgccgggcagaccctaaccctctcccagagcaccgccctttctgcggacccccacgggctgagctcacctgagggagggggcgtcgggcagacgctcccccccccagaacatcgcccctccctgcggacacccggggtgcgcccagccgaggagggggcgtcgggaccccacccgacccgcccttgagcccccgtccctccgtccgcagctggccctgcccacagggcgttccgggtcttccgcgccagctgccctggaccagccaaggcttgggcgtttggaaatgcgatgacttcagccacgtttccgaggcagtttttgaagcttgcttcttgccaggaagcgctcgtttttcccgggacctttccagggaatggccccttctgagttattggaattgtttactttgagcatttatttgtcttatacttttaaaaaggaaacagattatcgttataattactattaaagaaaaaaaaaaacgagaaacaaagacatttttaaccaaaataactaaaggatgttatcttttacctggtcagcacatttaacaagtgtgttcgcagatgctagatttatttctatgccttctcctacccaaatctccgaatcatagaagtaattttaagtcagtgttttagaactgtcagacttcttagagatttctagcccctttcacttgttttatagaagaaatacaaacagctatttgggatgctaagtatcacgaaattaatctaaacattaactgcccttaaggcttgtgtgctctggaataagttatttccctgaaaattttggactatgtaaaaatcatagccaacatagaaagactacaatggctggaaaaaataatcgtaggtaaggtgatattttttcaatgtttattattcacacttgctaattttatgaaatcagactgagttgtttttatgaatcaattgaaaaaggtatttgctctcagcgaccttaagattagaaaacttatttcaggtttctattcctagggttctctgggtaccttattcagagatcttctgcacagatcaatggtcagatcaatggtcttgatcaacagaagtaagaaggtcaactaaattagttcttgtttacctaaatacgatgagaaaatcctgatacttgtagtgttttctaaaaaggtagagataagaggaaatagtcctgtgtatggaataaacaactcattttctcaatggatgaaattgagcccctaaactcagggccgccagggacaccactgagtagggccacagagcaatgccttccaggcaggttgggcagaaaatcccctgatttggagctccaatagatcctgtctgtctgctttattcaggcgttcctcacagatacatccctattttcgtaagcccggatatggaagagttgggattttccattgtgattccctctttgacccatgggatatttagaaaagttaggttcacctttcaaatatatggggactttctggttttctttttattgtaactaaagtttaattccaccgggccttaaaacatcagctgttttatttttgtcgtttaagattt

SEQ ID NO: 587249 - DNA, 4001 bp, Homo sapiens
ctcttgagcctagaagttcaagaccagcctgggcaacatggcaaaaccccatctctactaaaaatacaaaagctgaggtgggaggatcacctgagcctgggagctcgacagagtgacagctcatctcaaaataataataataataataaaatttgggaggccgaggcgagcggattacgaggtcaggtgattgagaccatcctggctcacacagtaaaaccccgtctctactaaaaatacaaaatattagccaggcgtggtggggggcacctgtagtcccagctactcgggaggctgggtcaggagaatggcgtgaaaccgggaggcggaacttgcagtgagccgagattgtgccactgcactccagcctgggcaacagagcgagataccgtctcaaaataataataatagtaataataaaataaaactctacaagacgccgggcacagtggctcacgcctgtaatcccagcacttcgggaggccaaggcctctggtactccaggggttgaggcaggagaatcgcttgaacccgggaggcggaggttgcagtgagccgggatcgcatcactgaactccagcctgagcgacagagcgatactccgtctcaaaaaaaaaaataaaaaataaagaccatagcctcactaacaaatgatgaaaatgtgaaaagactttttatacctttactttctcttgtttagttcaacttggacaaacaaatcattctatgacaaagaatacttctcatcgtttaatgagcactctggtcagttaaaggttcctgttaaaaagcaaatgctgattcagtaggtgggagagtctgagattccgcatttccaacaagcttccaggtgaggcctatgctacttgtcacactctgagaagcaagcagttagaagatacatgtgagacacctgtaattaggcagatgcctgcaagatttttccttctcgtacagtcaagattcaccattcaattcaaagatttaattctcacatgccaagagatgcagagggaatacgtttaacctaaatccttattcagttaggtgggctttgataaaaataacataagcattgatattaaatctgactttccccttactcgaagagttaactgtaactttgagaagttaagttcttagagcctcagttatctcacataacaatcctcagcggttatcagattaaagtaagaacgcgaaatggtaaaatcaaacaccagcaattaccaaaccagaatactacttgctcatgtggggacatctgtcctgccaggtgttggaggtaccttctgcactgccctgacacttcagtgcactaagtatcacgaaaggagttgctaactgcacgaatacctacccccgccctcccaaaacacagtcttaaatataaaaatgggaacactggtctctcttgaattaagcctaacacaactatgtctttccgctcttaggagacacgcaggtgcacaaaactaacagaaagttaccaaagaataacctggagagatgaaaagatgagatgacacccattaataatactggggttagtaaaagtcagatgtgaggggggacaaagaagaaatgagcaaagctaacagattcacgggacacgtgggggtagagcgtgctaaagcgcctcactgggacccactactggatctgacaagaggcaggcggggcgcccctcccaggcggattcgctgcctcggtacaggggccgcttcccgcggccttcccggctccactgctttgtctgccgcccgtggaccccacataccgctccagagctttaggagtccagagcctgccacaccatcagggccacacctacggatgaggtagagacccaggcggcgcggagcgagcccttcggttcgcagccccggccgcggcgatcgcaagcaaccggactaactcagggagccaaagagcgaaggcgctggcgggcaaaggctctgcagactcttcccaggtgacctgacgcctctgtcgcttatgccctcctattggctgataatgagtccaacgtgaggataaagtatccaatcagtgaaggtctttttagagtgaagcgctcataggtggtttagggaaatacactaagagtcaagggactgatccaatgaggacccaggaacactatattggccctaactactcgccgtccaccaagccctaaccgaagaaatttgattccggctgggaaactgtcacaccttcacaacctcaatacccagctttgtggggccagcaggacttctccggtcctgcattcggtaattcaaattgagtatttctttagcaactcttgcaattctaataaaggcaatacctaatattttattcgcttctgtgagtcttaattcataaattttttttgttttgtgttttactgtggacgttagcactacattaggcgttccttggattttcgtttatttcttcttggtgtccactgtctccctagcagcttgaaagacgcaaagtacagttttcgtttaagtagcaatttattttggggaagaggtttttttttttttcttgtaaggaatttattatcacaatcttctcaaattcatattttaaaatatcttctatgtagtttatcaaagtaaggatttatatacttgttttatggatggcaatcacttgaagtttttgtttaggcatagattttattttttttttaatttctttaaatacaaacctactcttaacccgcaggcagatctttgagaataatgtatccattgcagtcaataaccccaataaacagattctggattctctccataacagtttgattcggccacgtagctcatgtattaaagtcagaaggaatatgagaggcctctaataggaaaagagtgtggataacaataaatatcccagattgtattcaatgctaatatctcctatacttcttgaatttaaaaaccaagcagctacttcttgaatttctttccgttcccttgttctcggttatcctcttgcttccaatgaactcaaaataggagcaaaataagctaagtagaaaacaaataggccgggtgcggtggctcacgcgtgtaatcccagcactttgggaggccgaggtgggcggatcacttgaggtcaggatttcgacaccagcttggccaacatggtgaaactctgtctctactaaaaaccaaccaacaaacaaacaaaactaaccaggcgtcgttgcgggcgcctgtaatcccagctacttgggaggctgaggcaggagaatcgattgaacctgggaggctgagattgcagttagccgagatcacgccactgcactccagcgtgggcaacagagcgagacggtctaaaaaaaaaaaaaaaaaaagtccaaagggcacagccaggttaaacataacccatttggttgagttactttcttcagtatagttattaaaaacaactaaaaaaaaatcccaggaaattaaacttgctatttttgttaacgttaatatattaggaaggcaggtacgggggctcacgcctgtaatcccagcactttgggaggccgaggtgggtggatcacctgagttcaggagttcgagactagcctggccaacatggtgaaaccccgtctctactttttttttttttttttttttgagacagaatttctatcttcctgcccaggctggagtacaatggcgcaatctcggctcaccgcaacctccgcctccctaattacaggcatgcgccaccacgcccggctaatttttgtatttttagtagagacggagtttctccatgttggtcaggctggcctctatctcctgacctcaggtgatccgcccgcctcggcctcccaaagtgctggggttacaggcgtgagccaccgcgcccggtcagccgtccctactaaaaatacaaaaaattagcctggcgtggtggcgggcgcctgtagtcccagctactccggaggctgaggcaggggaattgcttgaacccatgaggcggaggttctaagccgaggt

SEQ ID NO: 587250 - DNA, 4001 bp, Homo sapiens
tatctgctgaacattatatcaattttaatggctaaatcatatcccaccatgattttaaagaatttctccttacaggtataaaagaagacaatgcacatcttgcttccactttcaataacctacctaaactattcaagaccatcaccatctagcctcaggccagatgcgccaggttcctacttatccgattctgttggcaaagacaaacgcagtctgattgctttataaagaaatgaattatgaaagagtactgggcgtcaagaggctcggacgttacgcatgttcagtaaacaacagtgtaacctctggctaaatattttctcactctaggtctacttcctcttctgtaaaatgaaagagtcacgctcgtccctcactgtctcttgcagttaggaagtccgtagccctgtgacttgctcgtgggaaagagccacgggacaggcgatcccatgacttgggtgcaaaaggccacagggggccctttggggcctgctctgggctgctcgcaccgcccaagcttgggaccactcagcgtttcccacggccctgcagtatcctgggctgaactcctgaacttcttcgggagaaagcacctgaccatcaggcagtctgtccttgattgagtaatgcacacaggtccaccggaacattttatttaaacacttcaaaatgcaagggcctggaactggttattcaagtacactcactcaaatctaagaatgtgcgaatcacacccaggtatcctgcagagactaggatttcctttaaaggagttctagttgcaggtagcaccgaatctaccgaggacggggttcgccagcccgctctgcacccacacccctgtgcacgaaaccacagacccccgtaaagaagctgcccagcacgaggtgttccttgtacccgctcgcgccgccacacctgcgcctccatccgcgcccgcacctgcacgcccctctctgcgcctcggctcaagctcactcaccggcggcgcgtgctgcgcgacggcacagctgacggcggcagccaggaggactaaggcgacgcaactccggcccggcatcgctctagcagccaacgccactccccggactccagcagaggcaaagaagagccggctgggccgggggcaggccacgccccctccgccgcgtgacccgcgacctgggaccgcaccattccaggcagtagggggaacgctcggaggaggcgggactgggaggagaggacggggcttttcagtgccacgaaaagggtggcgtagagaaagagagagagccttccaggctacctgcagaaggagagtcgcgatcgcctttggcgcgtggcgtgatccatccccctcccccaccgcgggcaatagtcggaccgagccggagccccgccccgtaggtggggccgggagcttcacccgtggcgcctcgatggggcgcctctagcaggcgggtgcagcctgtcccgcgtacccaggcgtcctcggtacccacgaaacggatccaaagagtctcaacactaatgtaacatcccaccctgacccatctttgccctctgagaaaagcggcccgaaatgagttgagttattcatccccaccgcggagtcagggacaaggagcagttgagtggccgaggagtgagagagaatcgaatccactcgggtcctccaagctgttggttacccacttgggctttcacagcaaagctgccaaatcccagaattgaggcctcggtgaaaagcgcgctgagacttgggtaggaggcccggtgggacccgcgagctttctctcccagcccgatgcagcagttcattaagcggctgtgtttcctcctaactggcgaaggactcaggtgggcggagcagagctcagcttgggaggaggcggacgcgagtagctcggcagggggactcgcttggctttcgtgccatccgtggacacagtcgcgcgggtaggtgaccgggttggatttcaaagtccagcaggaaatcctgccctctgggttgcacttcctggatgagcctctgacgtctcaagcagcattgttttaatgctttgatgaagctcagcacgctgccgaaatctcggcagtattttttcttttctttttgcatgtgagagaaaggacaacaaattgcagttttatccatttgtattatttctttagaaaactcaacactctttttgttggaggtggggaaatgagaaggtgatgttttgttttgctttttttcctattttttttttttaaaggaggagaagatgacagtgttctccctaaggatgaagtttgacttttgaaacatatcacatgcttaaagcacatttgagctcctgcatgaacagtaagctagcagatggtagaaatattctttattaattcaaaaaatatttactgcggacctacaatgtgccaagcatgtctcctgacactggggataagcagtgaacaacaacaaaaagacaaacttcttccaccctgaggcgtatgttctcggtgagaaatgggcaataaacataatacctaagaaaattatacgggatgttagtgacaaatgcagtggaggaaaagggaggccaggggcatcaagtgtggagatcagaagtggtagagttacaattttaaataagagggacagatagacatgattaaggaggtgaagtttgagcagacagttgagggagaccaggaagctagttttgtgtgtgcccaagtaagagtattctaggcagagacagcagctgttaaaaggctttaaatggagaatgtgcctggcatgttcaattacagcagacgtgtgtgggtctggcacagaaagaacaaggggaaaagaagaaagaagtattaatagacaaagtatttagttaaggagagcagggcaaattctgtaaggcattcagagccatttcactccggaaaaaaaatgtgtaatattgaatatacgtgttaaatgttgaatctatggaattaccttggagcttaaaatgagtgtgcgaagaagaggattcccatcttttagttgttattactaaatcaaatagctacttgattggaagatcattcatcttcagtactcttgagagcgatttaaacatgtcaccaagcatatttttttccctactggaggatgttaattggtgattaggtagtctagcaaaatcagattctttatggaaaaaatttgtcaattgacatactattcttaggcaccactttcgcagaactatgcgtctaactttcaaaggtctattatatattattaatactcttttcagataaaatataaatctagttccctaaaattaaaccatttcatgcatgtcttttttttcttacacatatatctttattttgcctacaccattctttaatactagaaatgtacagaaagtcaaggcaaggtgtgtgtaggagactttgcagtggtttttggcatactgatctgttcatagaaaatggtatttaaatgtgcaaatgcatgattatgtccacggaaagggtggttcatactgcacaaaagcatcaagtttaagacttggataacctgtttcgtgtgcaagagtcgggatatgtaatcagattgtttatggaatagctgaagttcttggcaagctgtggacttcctcatctcctacctaacattcctaggttcctgaggtggagccttgatttaaaagggttgcaacttagccaccccaccctaaatgaaacctatcatgtataacatcacattacctggaacaggtttgacttgatttagtaaaaccgaatatacaaaaacgtgtactaaaaggtcaagagatagagaaataatgtttcagtttgagaaataaacatttttttaactttaaatattgacttttttatgaataaggaagctttttattttacaggtctttgtgggaagaaacaaatcacaaaagcaattaagagagctcaaacaatgggtaagaaagagcacctcaacaactgtattgagctagctgaaattttgctcattatgctttgtc

SEQ ID NO: 587251 - DNA, 4001 bp, Homo sapiens
tctgacactcacagccaggtaagctctgttttcctcctggacatcaacaatcccacagatacctacgtcggataagattattctgagacatgacacaccaagacaaagcaatgccacttgaagattttctctaagaacagacaaaaacaagggcacctgcaacgcacaaaacaccaaacatccccttctcgtgctaaacagaatggctgttccttctttactcagtcagaattgccccaccttctaacagcattctatctacagcaaagcccggttcctcagtcttaccccaaatcatgcaaccgaagttcaaattctgtaatgggtttttttctataacctaccgtccgtcgctcatggtgtgtggtctcctttgcctcaaagaacactaaacccaatttgttcagcttatggtgtgttcctggtggtctttcaatgaagggccctgacagtatcaaagtatcaaagtctctcccaattcccataaaaccaactaccgtcaagcaaattaattccctacccacaatggagcaattttattttaaggcctttaatcgtgtccacatacatgttctgtgtattttcctattacaggaaaaactgtatatactattctggattctacttttatctgctgaacattatatcaattttaatggctaaatcatatcccaccatgattttaaagaatttctccttacaggtataaaagaagacaatgcacatcttgcttccactttcaataacctacctaaactattcaagaccatcaccatctagcctcaggccagatgcgccaggttcctacttatccgattctgttggcaaagacaaacgcagtctgattgctttataaagaaatgaattatgaaagagtactgggcgtcaagaggctcggacgttacgcatgttcagtaaacaacagtgtaacctctggctaaatattttctcactctaggtctacttcctcttctgtaaaatgaaagagtcacgctcgtccctcactgtctcttgcagttaggaagtccgtagccctgtgacttgctcgtgggaaagagccacgggacaggcgatcccatgacttgggtgcaaaaggccacagggggccctttggggcctgctctgggctgctcgcaccgcccaagcttgggaccactcagcgtttcccacggccctgcagtatcctgggctgaactcctgaacttcttcgggagaaagcacctgaccatcaggcagtctgtccttgattgagtaatgcacacaggtccaccggaacattttatttaaacacttcaaaatgcaagggcctggaactggttattcaagtacactcactcaaatctaagaatgtgcgaatcacacccaggtatcctgcagagactaggatttcctttaaaggagttctagttgcaggtagcaccgaatctaccgaggacggggttcgccagcccgctctgcacccacacccctgtgcacgaaaccacagacccccgtaaagaagctgcccagcacgaggtgttccttgtacccgctcgcgccgccacacctgcgcctccatccgcgcccgcacctgcacgcccctctctgcgcctcggctcaagctcactcaccggcggcgcgtgctgcgcgacggcacagctgacggcggcagccaggaggactaaggcgacgcaactccggcccggcatcgctctagcagccaacgccactccccggactccagcagaggcaaagaagagccggctgggccgggggcaggccacgccccctccgccgcgtgacccgcgacctgggaccgcaccattccaggcagtagggggaacgctcggaggaggcgggactgggaggagaggacggggcttttcagtgccacgaaaagggtggcgtagagaaagagagagagccttccaggctacctgcagaaggagagtcgcgatcgcctttggcgcgtggcgtgatccatccccctcccccaccgcgggcaatagtcggaccgagccggagccccgccccgtaggtggggccgggagcttcacccgtggcgcctcgatggggcgcctctagcaggcgggtgcagcctgtcccgcgtacccaggcgtcctcggtacccacgaaacggatccaaagagtctcaacactaatgtaacatcccaccctgacccatctttgccctctgagaaaagcggcccgaaatgagttgagttattcatccccaccgcggagtcagggacaaggagcagttgagtggccgaggagtgagagagaatcgaatccactcgggtcctccaagctgttggttacccacttgggctttcacagcaaagctgccaaatcccagaattgaggcctcggtgaaaagcgcgctgagacttgggtaggaggcccggtgggacccgcgagctttctctcccagcccgatgcagcagttcattaagcggctgtgtttcctcctaactggcgaaggactcaggtgggcggagcagagctcagcttgggaggaggcggacgcgagtagctcggcagggggactcgcttggctttcgtgccatccgtggacacagtcgcgcgggtaggtgaccgggttggatttcaaagtccagcaggaaatcctgccctctgggttgcacttcctggatgagcctctgacgtctcaagcagcattgttttaatgctttgatgaagctcagcacgctgccgaaatctcggcagtattttttcttttctttttgcatgtgagagaaaggacaacaaattgcagttttatccatttgtattatttctttagaaaactcaacactctttttgttggaggtggggaaatgagaaggtgatgttttgttttgctttttttcctattttttttttttaaaggaggagaagatgacagtgttctccctaaggatgaagtttgacttttgaaacatatcacatgcttaaagcacatttgagctcctgcatgaacagtaagctagcagatggtagaaatattctttattaattcaaaaaatatttactgcggacctacaatgtgccaagcatgtctcctgacactggggataagcagtgaacaacaacaaaaagacaaacttcttccaccctgaggcgtatgttctcggtgagaaatgggcaataaacataatacctaagaaaattatacgggatgttagtgacaaatgcagtggaggaaaagggaggccaggggcatcaagtgtggagatcagaagtggtagagttacaattttaaataagagggacagatagacatgattaaggaggtgaagtttgagcagacagttgagggagaccaggaagctagttttgtgtgtgcccaagtaagagtattctaggcagagacagcagctgttaaaaggctttaaatggagaatgtgcctggcatgttcaattacagcagacgtgtgtgggtctggcacagaaagaacaaggggaaaagaagaaagaagtattaatagacaaagtatttagttaaggagagcagggcaaattctgtaaggcattcagagccatttcactccggaaaaaaaatgtgtaatattgaatatacgtgttaaatgttgaatctatggaattaccttggagcttaaaatgagtgtgcgaagaagaggattcccatcttttagttgttattactaaatcaaatagctacttgattggaagatcattcatcttcagtactcttgagagcgatttaaacatgtcaccaagcatatttttttccctactggaggatgttaattggtgattaggtagtctagcaaaatcagattctttatggaaaaaatttgtcaattgacatactattcttaggcaccactttcgcagaactatgcgtctaactttcaaaggtctattatatattattaatactcttttcagataaaatataaatctagttccctaaaattaaaccatttcatgcatgtcttttttttcttacacatatatctttattttgcctacaccattctttaatactagaaatg

SEQ ID NO: 587252 - DNA, 4001 bp, Homo sapiens
attcatctttgggcctgccaggcttgcactgattttgaaaatctggctcgctgtggctggtgaggactggggaggtgtagagaatttcaatttccctcaccaaatggcaagcttgcgaaaagtcctttctctccaacattatcacatactaaaaatgaaaaaccagccattcagagctctcatgagaaaaatagatgggctgcttagctcacaagaaacaggagggctgaaaatcaagtctagagaacatcagagggtacattatgtgctaagatactgcccttttttggacctgggagtttctattttgcacaaaagaatgggatagggaaagtaattccccgtataataagccactcattttatacttcaaatccatttggtagctgaatctccaaatccacttagtggcgttaggtgatttttgttttttttaactccctatctcaaaatatgcagtttgaaataagtgcatatctcaaaaatagcagcattaacaggacagaagagaaggcactaaagtggtgaaggctgtgacgcaaagaagacgtttccaaatctgtttcatggctaacagatcaaaatctaacacagaaggggcatgggactgagcctgaagaagtggaaactactcctggccatgtgatcttgggcaagtcaggtcacctttctgggccttctctgaagggggtgaatcagttgttctcaaagatctttttctttccaaactgttcactgggtgtttccagaagacccgcattttcttaaagctatctggccgcgctacaattgcaaaacagaaaggctttgggatgaaggttgcaatacagataaccctggcctaaaaactgataagcttttacaatcccaaaacattactcagcaatccaggtcctgatgtcatcccagaatcaatcacgccaagataacctaacagagtagacaggggaaaatgcgagagaaagttcttttgctttcctgacgagtacaggtaaagttgaggtcaagttaacgatgatggtctgcagttgaccatccttctccctgagctactggaaaaccacattattaaaggaaactgctttagaagtgcccaagatgaacctcttgggatgtatcaaaccgcagaaaaccggacaccggcaagtttcttttttctttgaaacttcatgtcgctctcagaaaacgcagcaggtcccaaaatggtacaagcagaaaacacaagccacttcacggtccgcccaggagccaaccccaagctccaagtaggactccccccacccccttccctttcgtttctcttcttttgctttaggcaagtggcctggggcctgccaagcagcgccgggtccgggtaggggccgggggccgcggggaactttcctcggctgcaccagagacaatgccgggagggcgccccatcggcggggtccgggccgccaagcacgtcgtcccgggccctcccccggagggggacgcgaaaccccccagggcgggccccgtccccggccccactgcaggggccccctctcccgagctggaggcgaggagacctcccccccccaccgggcggcctcgcccggccccgcagagcctggccgcgcgtcccgcacacgccccagcccagggccggcgccctccccgcggagaaggacaccccgctgcgagaggagccgggagcccgccccgcgccccgtcccggcgcccttcttcgcgcgagagactgggcagggggcgcccgcgactgtgggcgactccgcccggccccgccgagcgcgcccgagcgccccgcaactcaccgggacctggcgggccgctgggcattattccatcgcgggttcggccgggcgctcgcggctctcgggtgggaaagcgaactgcgaccgggaagcgccggctgggcgggaggcgcgggcccggggctgcccagcgcacagtgctcgcccgcggcagcggccaggccaggcgaggcgcgggagccgagcgcggcgcaggaaggggcgggcgaccatgtgccgagggggaggaggccgcggcgacgcgagcggctcgcacgatcccgctcggcggcggagggcgcgggtttcaggaaatccaaacacttcgacaggaaatcggaatcctgactaagcattcccggccccgagccgctccgcgccgggggctcccgcctcgcttaacccttggcccgccggcagccacgaggggggcgtgggaggggccccagacctcggccggggtcgggcgtccttcgccttccgccccatgccccggccggccggcctcctccccgcctgaggtggaaggggtgggatttatccacagaaaaccctggacgcggaaggtgcctttctaaggccgggacagcggcaaaggacgtgcctgtcttccatctgcagaggatggacctgcactgtcctggccgttacccctattttcagtaaaggaatgatttcaccaggctgccccctttcaccacttcctctctgctcttataattttatttttgcccagtgccaagggaacaggaccttcccagtcaggatagtataggaacagtatggagagtaattgtgtgggctgcaggctctgtgtccggttggaatatggccttttttctactcatgttaccttgagtaactcgctcaactttcctgagcctcagtttccatttatgaaatggatgttaattccaccctcataggtttgatctggaagctgaatgtttagacagggactggcacattggaaacgcccaaataaatgatagccatgcttgtccttattattaccattaaaagacatcagagaaaggaggattttaatttgtgggatgtatattgtgcatatctatgtctactttcaaagtcagagacagtagtctttctttagaacttaatttccctcctaatcattgggtgattgtttttctttgcagcatttcagaaacggctctctgcagaggaaatggttagtggctgtggcagacccccttctggtgaaatccgaaacagaaaacctcacaaaatttgggattttgctcctaatctgagagtctgggtgtagtggggagtgggggttgttaaacagtctggagcggatttacaaagtttgggaaaaccaaaatcaatctctgactgggcagagaggtcgggcagccaatgagtgattcattgtggtttcccacggaaatgccacatttcgggggtgtctacctggaggatgcagcttggtggttttgctgtaagtgtttcagattcctttgaaacccaatcagactttgaagagggaacaacatgctcatgagcgaaaacagaagcctgaaatgaacctgctgggaactgaaagttgggtaccagctcgtttactccaagtaaggaacagataccagttttagacccagcattgttccttttctgcaattctctctccgtggccagaagcagtaggacagctctgagctgggcaccaggagtcccagggtcctgctccaggcccactgtagctgccgtcccctctgcctggaagaacccttgtatggctgttcttggcacgcagctcacagcccagaagtcagctccgcagataggttttccccaaccatgtgatctgcttgtctctggcacctacaccccacctccacctctcccaaacatagcgcatcctgtttgattgcttcatagcccttgtcactgtttaatgtagcctacatgattggttgcttattttttatctgccccccactctccccactgcatgggtaaactgcattacagcagtacctttgcctgtttccttagaacagtgctggcccatatgagaccatcgataaacacgtgttgaataaatgaaagaagcaaacaaactagagttgcagatgggacctctgcctgaggtagggtggttcactcggtcccgcagctccctgtggcttcctctttggtggagagattcaaaagggaacgcccagtgcggtggaaggagcaccagatggctctatt

SEQ ID NO: 587253 - DNA, 4001 bp, Homo sapiens
ttataaatgtattagcataatacaaaccataaagaacattacagagagcgagcagtacaattattccaacagacagtcagtataaggaaaaaagtctttcattctcaatcacaatatgattttaattcactagaagaggtacatgattggaaataggtttgctgaggagagtagacaatatacctaaaggagtgagtcagcagcaatgagaaaggaaaaaaaggatggttcaggcataaagagcatgggtcatctcaaattttggacaacaggctttatccacatatatcctttctgaaaaatccaaaacaccaacacaaggtttatattgttctaaatttgtttatataacactttgtaattgcatttttttttgtctccaaaccaggttgtcaactcaaaaggaggggcaatacccaccattgtatctaccagagctgtgccctcagtaagcagataacatgctaagggaattaaaacaactcctgattcaacatcctacttgctgaataggggttaggagacataggaaatactttgcatttattttgcccacaaagtaactgttgagcatgttcagatttattttaccgagcaattctcacaaaaactatgaaaagtactcacgaggtatctatgccaaatgtgtcagccgtgaaccattttgtacaaatcccacattgcagctctacctcacccaactgtcggccattctcttcatccacggagcccgcctgagtatccatcacctctgatgtatccccagcaccttcctgtgtcagagcagttcgagactcaaatcagttgacttgaatgtattttactttattttatttttttaagagacgggggtctccctatgttgcccaggctggtctcaagtgatcctgaggtctcagcctcccaaagtgctgggattacaggcatgagccaccgtgcctggcctgaatgtatttttgattcgcttaaaaatgtaaaaacaaggccgggcgcggtggctcacgcctgtaatcccaacactctgggaggctgaggcgggagaatcaactgaggttaggagttcgagaccagcctggccaacatggtgaaaccccgtctctactaaaaagacaaaaaaaagaagccaggtgtgttggcagatgcctgtaatcccagatactcgggaggctgaggcaggagaatcgctggaacccggggggaggaggttgcagtgagccgagatcgcgccactgcattccagcctgggcgacagagcaaggctccgtcgcaacaaaaaaaaaaaaaaaagaagaagaagaaataactaaaacaaaccctattttgtcttgcaaacaactaaaaatacttactagtgtatcttttccattagatgattctgtctccaagccaccgcttacatcgaccaagtttgcctccctataagataatgaaagcgctcaagtaagaattctcaagacaaacctcaaaatgcctattcccaaaaatgatgatcaaattacagccgaacttcatactcctgcagctttttcagctaagcctgatctcagactggatgcccaaggtactgtcaggatactgagaaggtggacatgtcagacagtcgcggacccacggagcacagggaagcctaaccggcctttacagtcaaatctacctgggttagagttggtcctgggagaggttcaaagagaggcagctctcccaccctgttttcagagtgaccgttacttcttccagtctggcactgcaaagtggtttcttttctggaatatgtgaaggcctcccgttaaagtgtgagctaccagcttcctgccagggtgcaaggatcagagataacgacaggagcctcagctcccaccgcccgtgaaaggtgcggaaggggcgttatccgagatatgcttgagaggggacgggccaagcggcgcagaggcagggcgagccattggcggcggggcctgggttcgcagggggcgggcggcagggctccaggagccgcgggattcgcgaggggcgggcctccctcccgcgtcttcctcgggcggcaggacctcttacccgccttcagcctccccggaactgggctcaactgtcggagcagcagagatcccctctccaggaggagcggctgctcccgctgccaccggcttcatctccccctcttctgcccctgttgcatttgcgaccgctcctgggccaggcccggcacccgcttcctggccaggtcctgctcctgccgccgccatcacggccacccctggacttctcgcgagaatactctcttctctcgcgcgcgttgctgtgtgacgctgtagtcttcaaacagaaaaagcccgcggtgcgtccaccgcctgcctgaggaagcataattccacgaccgctttaaggccaggcgcgcgggcagaggtgggccggcctcccgcgccggcggtggccgcgggcctggcaggctgaaggtggaggaagctagatggttagtgcggctctctggaggacttcctttcgagtcagggactgacgcggcgtattttcgtggctacgactggatattctgcgcagaagagggtccttgagagcgctggccgtgccgtgccgccaaacactcctcaccaccgaatgtgggaaacgtcttccttggagtctagcactccctgcccgccccggatggaatttggttttctgcgcagggtcgccccttggagcccgtttccaaatgattttaagagggaagggaatctagggaggccgattccaggggcgagggtggaaaacccaggccgggcagccgaggagcggcgtgggcactagaagcggctcgccgcttcctactgtgagaggcggaaagcgaagccccggggtgtgccggggcactcggaatgtagacaagtttggtgcccagcgaaaggaagaggtgtggactgaaagtacgaacttgggaagtcatcaacagtagctggtggctggcatcagtggagtgagttgagtctttcagagccatggtctccaaactcgagaatgcaaacctctgagagtgttgcggccaggaacgttttcaggacaccagtgtttatcctatatcctaaaatgttgcctaacgataatacactcttctcccgctttacacaagaacggcgcacccctcgccaatcctcagtctaatcttactgtgatgtgtccaccgatagtgtaggaatctctgggccactggacgccatgggaaatacgtagatattgatttcccaattggttctcaattattggttttcaacaaaattgaagaaagacctaactgagttgccaggttacatttttaaaattgatgataaatacttaaatcaggggttggtactccaaagagaagcaggatgcttgatctaagtatctcctcccaaatacgtagtattgtagcagttttaacatatggtcgcagaattttgtgttttcttgttgttgtttgtttgagacagagtctcgctctgtcgcccaggctggagcgcagtggcccgatcacggctcactgcaacctccaccccaggttcaagcgattctcctacctcagcctcccgagtagctgagattacaggtatctgtcaccacgcccggctaatttttgttagtagaggcggggtttcaccatgttggccaggctggtgtcgatctcctgacctcaagtgatccacccacctgggcctcccaaagtgctgggattacaggtgtgagccaccgcgcacggctttttttttttttttttgaaacggagtctcggtttgtcgcccaggctgagtgcagtagcgcgatctcagctcactgcaacctccacctcgcggtttcgggttcaagcgattctcttgcctcagcctcccgagttgctgggattacaggcacgcgccatgacgcctggctaatttttgtatctttagtagagacggggtttcacctgtgtgttttttttttttttttctgagacagagtctcgcactgtcgctcaggctggagtgcagcag

SEQ ID NO: 587254 - DNA, 4001 bp, Homo sapiens
aatccaaaacaccaacacaaggtttatattgttctaaatttgtttatataacactttgtaattgcatttttttttgtctccaaaccaggttgtcaactcaaaaggaggggcaatacccaccattgtatctaccagagctgtgccctcagtaagcagataacatgctaagggaattaaaacaactcctgattcaacatcctacttgctgaataggggttaggagacataggaaatactttgcatttattttgcccacaaagtaactgttgagcatgttcagatttattttaccgagcaattctcacaaaaactatgaaaagtactcacgaggtatctatgccaaatgtgtcagccgtgaaccattttgtacaaatcccacattgcagctctacctcacccaactgtcggccattctcttcatccacggagcccgcctgagtatccatcacctctgatgtatccccagcaccttcctgtgtcagagcagttcgagactcaaatcagttgacttgaatgtattttactttattttatttttttaagagacgggggtctccctatgttgcccaggctggtctcaagtgatcctgaggtctcagcctcccaaagtgctgggattacaggcatgagccaccgtgcctggcctgaatgtatttttgattcgcttaaaaatgtaaaaacaaggccgggcgcggtggctcacgcctgtaatcccaacactctgggaggctgaggcgggagaatcaactgaggttaggagttcgagaccagcctggccaacatggtgaaaccccgtctctactaaaaagacaaaaaaaagaagccaggtgtgttggcagatgcctgtaatcccagatactcgggaggctgaggcaggagaatcgctggaacccggggggaggaggttgcagtgagccgagatcgcgccactgcattccagcctgggcgacagagcaaggctccgtcgcaacaaaaaaaaaaaaaaaagaagaagaagaaataactaaaacaaaccctattttgtcttgcaaacaactaaaaatacttactagtgtatcttttccattagatgattctgtctccaagccaccgcttacatcgaccaagtttgcctccctataagataatgaaagcgctcaagtaagaattctcaagacaaacctcaaaatgcctattcccaaaaatgatgatcaaattacagccgaacttcatactcctgcagctttttcagctaagcctgatctcagactggatgcccaaggtactgtcaggatactgagaaggtggacatgtcagacagtcgcggacccacggagcacagggaagcctaaccggcctttacagtcaaatctacctgggttagagttggtcctgggagaggttcaaagagaggcagctctcccaccctgttttcagagtgaccgttacttcttccagtctggcactgcaaagtggtttcttttctggaatatgtgaaggcctcccgttaaagtgtgagctaccagcttcctgccagggtgcaaggatcagagataacgacaggagcctcagctcccaccgcccgtgaaaggtgcggaaggggcgttatccgagatatgcttgagaggggacgggccaagcggcgcagaggcagggcgagccattggcggcggggcctgggttcgcagggggcgggcggcagggctccaggagccgcgggattcgcgaggggcgggcctccctcccgcgtcttcctcgggcggcaggacctcttacccgccttcagcctccccggaactgggctcaactgtcggagcagcagagatcccctctccaggaggagcggctgctcccgctgccaccggcttcatctccccctcttctgcccctgttgcatttgcgaccgctcctgggccaggcccggcacccgcttcctggccaggtcctgctcctgccgccgccatcacggccacccctggacttctcgcgagaatactctcttctctcgcgcgcgttgctgtgtgacgctgtagtcttcaaacagaaaaagcccgcggtgcgtccaccgcctgcctgaggaagcataattccacgaccgctttaaggccaggcgcgcgggcagaggtgggccggcctcccgcgccggcggtggccgcgggcctggcaggctgaaggtggaggaagctagatggttagtgcggctctctggaggacttcctttcgagtcagggactgacgcggcgtattttcgtggctacgactggatattctgcgcagaagagggtccttgagagcgctggccgtgccgtgccgccaaacactcctcaccaccgaatgtgggaaacgtcttccttggagtctagcactccctgcccgccccggatggaatttggttttctgcgcagggtcgccccttggagcccgtttccaaatgattttaagagggaagggaatctagggaggccgattccaggggcgagggtggaaaacccaggccgggcagccgaggagcggcgtgggcactagaagcggctcgccgcttcctactgtgagaggcggaaagcgaagccccggggtgtgccggggcactcggaatgtagacaagtttggtgcccagcgaaaggaagaggtgtggactgaaagtacgaacttgggaagtcatcaacagtagctggtggctggcatcagtggagtgagttgagtctttcagagccatggtctccaaactcgagaatgcaaacctctgagagtgttgcggccaggaacgttttcaggacaccagtgtttatcctatatcctaaaatgttgcctaacgataatacactcttctcccgctttacacaagaacggcgcacccctcgccaatcctcagtctaatcttactgtgatgtgtccaccgatagtgtaggaatctctgggccactggacgccatgggaaatacgtagatattgatttcccaattggttctcaattattggttttcaacaaaattgaagaaagacctaactgagttgccaggttacatttttaaaattgatgataaatacttaaatcaggggttggtactccaaagagaagcaggatgcttgatctaagtatctcctcccaaatacgtagtattgtagcagttttaacatatggtcgcagaattttgtgttttcttgttgttgtttgtttgagacagagtctcgctctgtcgcccaggctggagcgcagtggcccgatcacggctcactgcaacctccaccccaggttcaagcgattctcctacctcagcctcccgagtagctgagattacaggtatctgtcaccacgcccggctaatttttgttagtagaggcggggtttcaccatgttggccaggctggtgtcgatctcctgacctcaagtgatccacccacctgggcctcccaaagtgctgggattacaggtgtgagccaccgcgcacggctttttttttttttttttgaaacggagtctcggtttgtcgcccaggctgagtgcagtagcgcgatctcagctcactgcaacctccacctcgcggtttcgggttcaagcgattctcttgcctcagcctcccgagttgctgggattacaggcacgcgccatgacgcctggctaatttttgtatctttagtagagacggggtttcacctgtgtgttttttttttttttttctgagacagagtctcgcactgtcgctcaggctggagtgcagcagtggcggcatcatacctcactgccgcctcaagttccccgggtaaagcaatcctcctgccttagcctcctgagtagcagggactataggcacgagccaccacgcccagctaatattcttttttttttttttctttttgagacggagtgttgctctgtcgcccaggctggagtgcagtggtgcaatctccgctcactgcaagctccacctcccgggttcacaccattctcctgcctcagcctcccgagtagctgggactacaggcgcccgccaccgcgcccagctaattttttgtatttttaa

SEQ ID NO: 587255 - DNA, 4001 bp, Homo sapiens
tatcaaataaatgagctgttactctagtattattaaccttattactgttgatatttactagttccacaaaggaacaaaatactaagttatggaagggattcttttttaagacaccttttttaggggcagtttttatcgacagcaaacaatatactcttgatatgtcatttggtaaatatgctgtgcctagtcccaaagggcagatcagtttctgtccaatgaaactgatgaacgcatggtaagacaaacccttaagagggtttacaactccctaagcaaatctgaaaccagtatcttgttccaaaggtatttgggaagaacatctagtagatgtccctattttctaagatcagaataaatctaagtcttcatttcattttctggcttcatgttcaacctgtagttctgggatcagtcaaagcggatttttactggggtttaagaatactgcaagaacgatgcgattcattttttcccatgttattccatcaaaagtacatgacctccaaatcagaaaatgttcccacataccaccaaacacagaaattactatggcaagcaacagtccaaaatgaagactctccaaaacaaaagccgggggaagggcaatgtgtagttttatttatttggttgaggaaagggagacaagaagatgaaccccagcacttgaacagtcaccagctacttcactggcctactactaactgaattatagatcatttataagttttagttagcattatgttgggaatttcatatttacacataaactctacacatttaaagttttttgaaaaacacaaaaactgtcaagcaactcatcaaactgattatttttccatgctataaaatgtcaccctttgggaatcaaaaactgttaaaagtgcatcagatgcaacagctgatttttcctaactacatggattacctaatccacaagaggagagaaatgtcttccaaaagaactaaaagtcagatacatatctcatattcttcttcatggctacatgaagcactttatcagacgagtcaagtgacccattctcaccaattattcaaataatattcacatagtacatgcttatattctctatcctaatcaaagaatcctttcagttgctgattagacagctgagagttagaagcagttttcatacatctattcttttcttttataaatcttcaacataatgagtgaatgcagtctttcaattaatggaaagactatcttaatttacaaagtaaagcaaaagcaaatatatacaaaacattaaattcaatacatagttaaagaatacttcaaagttaaagagtcaatttaaaatcaaaataaaacccttgtgttttttctttgcatttattgtctgcttcacataaaagtaggtcactttccataaatggtaagtccttgcttgaaccaggtaagtctgttcattaatatgagactgaatttatatctcctataattttatataaaatctaaatatagataattctttaaattcattgtaattaacttataagaataagaagagagcttgtacattttttgaaatttgtaaaatgcagcctccagtagtacaacatactaaaaggtcatctaaattaagacactaaaacatattcggattaaagacagattattcaatgaaatattcagctactatgaaaagtcagtatctccaggagttcaaaatagaaaatgtagacagtacagtcaaagcacttagccaaaaatattttaacagagcaccactgaaaataaagtgaaaagctgtcagctagatctaaagccacttttagcctaaataacaaaaatatacctttatcttcagccattttgatttcttcaatccatgaataataaatgctaaagtaaaacaaaacaaaaaaaaaaactcaaaagtactgctggcaggttttaggcacactgcatgcacttgcctaccagagcttgagactggccaatccctgcactgtaagggcctctagaactgaaattggacctgactacaaactctgctcaccagttatttttagaggctaaatgctgctaatcaccacttaggctgaagtgcactccctaacaacaccacagcctttctcccacttacgggattcttttcccagttggtcctagctaactccaacccctaaaaaatcaagcatgctgaaaaaaaatgaaatggaacaaactgtgctgccagttttgttttcttggaagcaggctttaacggctttagcttaagcaccaattcattgaaaactcaaacaagtcttgctataaaatatggccccaagcccagaaacagtttgatttggcccttcagaatctaataaaatggctacaaggaaagaccattagattgcttgaatgaaacaaaaccatacatagtaagaaattaatcaatgctctagaattcttactcacagacaccatcccaggaataattcctccaacagcaaaaataaagcaccaacataaaatgtttcactagaaaaggagggacagaggactggtgggaaggaaagaaatagaaggaaggctgggaggtgaggagagggaaagaaaaatcttcaggagtaagaataatgacctgggaaagatcatcttgaaagggaactaggaaaagattacacaaccacattctgattttttttttcaacttctccccaacctcatctccaaacattctcttctgggaaataaaatcagccatttattcactgatctaacattagcagttcacagaattcattagagttctgattagtatactaaattaatttagcacaaatagtatctagagcaggcagcaacctttctaagttgtttataagactaaatttttcactcaaatttaaagcttcacaagcaaattaaaaatttaaaagctttgaatactactagtaatttccagtggcttacggcaagaatatattgccaatatttcttctggaagaaaaaatgaaattcttgttaaaaggatatgcacatttttaaaaaatacaccactagatcaatttttcaaaaagggccataaaaattaaatccgtctgagagtgtgtgtgtgtgtgtacactgaaacacatatattcaaagctaaatgttaactacaatattaaattattagcaatattttatctatccttttataatatcaaataaatgaggtgttactctagtattattaaccttactactattgatatttactagttccaaaaaggaacaaaacactaaattatagaagggattctttcctcagatgcctgttttaggggcagtttttatcaaaagcaaacaatatactcttgatatgtcactttgtaaatatggtgtgcctagtctcaaagggaagatcagtttctgtccagtgaaactattgaatgcatggtaagataaagccttaagaggttggtaccatagtctgcaacctatggtaccaacatttgatggtccaggtttaggacagagtgaagtaggtagacatcatggccaactaaacaaaatggtctcaggtgccctctggccaagcgtcctttcccccattattttcttcaaagatctgtcccactaaacttagtgcttgctaaattgttaaatgataatgaatcacttgttgacaggggttaaggtgacccaccatttcgtcaccatacaaatttattaagacaaatattctggaagcttcctttcattgtgttgtttttggagggagaatgacagcaacacgatacccccatgggtgagaccactagaaaccaaacccctacactgatccagcaggcagcttggtatgctttcatacttagacacctggatttgcttcacggcttctccattaaatttgatttgggggaagtcatcaaacttctaggcctgaatttccttgcttataaaatgggtctccgcacaaactaggcatgcaaatatttgttggagtcatcagtgaaacaaacttctattgattcaatcgtgactagtgcataaataacct

SEQ ID NO: 587256 - DNA, 4001 bp, Homo sapiens
gtcaggagaagttaatttaagttactgcattttctaaacctatctcttgcctgttaaaatgcttcaaatagttatggggtaggtctagaaacgtgagacacatttcccagtattagttctcaccaataagaggccatataaagtgacttccctcagatgcaatcagccctctcctcataaacacaaaaatgaaatggaacgaagacatgcttctctggcaaatagctacagaaaccttttgaaaacaactaacattaaagttgttcatcagctttctctgcttagtgcccttagaggcacaatgagaagaacccattctcatttagggatgttaaaaaagagtagcctcagtcggctgaggcaattaatctatccctctgcaggtttaagtaagtgacatttaagaacaagtgaaaaaggaacacaaactttcacttatgtcaaaggtgaattaatatgcttgcattgaacttcaaactgtgtctacatctttacttttagaatacaaatattagtccttagaatgtaaatttgtgcaatggatttaatgcactactttccccatttaaatccattcattcattcactactcaaatatttattgagcacctattatgggaaaggaacattctaggagctggggatacagagagaatgagccaaagacaacacacatgaaagtaataagacaagttcagatagtgacaagtgctataaagaaaatacttctttgactatagctgattcattttcttggtatattatgaatgcatgatctgaagatctcagaaaacaaagagtctaaatcacttcaagtgaagtttacagctcacattccatacacatgtgtattgcagtttcaatatcccaaatatgagtcaaaggaagtataaaagaaaccaagaatcactgaaatatgagacgaaacagatttaaaaatctgttctctctgctggatatgcacacggacgaggagaaaggtgaatatccaatcgatttttattttaagtaaaagtggtaaaaatacagacgctcgttcagtatttcatgacattctattttaaaggcaactgcaacgcatattaagaaagctacatacaagcaaaaatatttaaaataatttctgagagcattcaaatcactcccaacttcttccctccccctgccccccggcgcccccattttcacctcctttgagttgctctgaaacgctgctggttaggcaggaactcactttccctgactttggctcattttcaactccccaaaacacgcaaggcaaacgataaattgttctcttactcccatgttcaattccacggaaagccaagaaacagtcgttcagcaacctctgtctcggctgcgccctgcaggtgaaggaaccgctgggaaggggctccccgagactagcatcccgagggctcggaccccggtccgcctggcccctcgcccgcccgccaggcccgccgaatgcggcctccgccccgcgcgcctaaaggaggagcgtcgcgggggatggaggcggcgcgcggtgggacctggggagatgcacccgcagcgtccgccgcgccagccggctccctaccccgaggcgaggccccagatccccgccccgcagggcctctgacctctccgggccccggggctgctgctgcccgcactcgtgctaccgctgccggagccgctgctgctgctgttgccgctgctcttggcattcttacgctgggccattgcacggtccgcgggggctggtgagggctggcggacctccttcagtgcgcgggggtacacacgcgacgcgggaaccgctggcggcggcgggccgctggagcgggttcgggccgctgctcctgcagcagaccctgtgcctcagcaccgcctgcagcacctgggaagacttcacccgcctgccggctgcgcgcgcccggcctcgcgtgtacgaacctgtgactccctcccggggcgagagcgcgcggctcgccgcccgacggccacgccccttcccggcctcgccccgcccccggaaggctgagtgacggcgcctgggacccaatcgcaagggcccttacgaggcggcggtaccctgccgcgctccccgcccctgctcacttagggctgttcgggcgctacgcagctgcctgtgagcgcgagcctctttcggctttccagtttgtctcggtcctttggaacgtggcaaacgtggaagccgagagggctctcgcgagcgttggcagaccccgctccatagggatgggacagggcgcggtgcggaataggtggacacgtgggccgcccgtgggcggagtgcgccgcttctaggcctttcactgtggattttgtcccctttccgtatacaaggaaaggaaggagtgcagtctcgcttcttgcgaaagagatccctatttcttgtcctgattaatactaagacatttctggaatggtgatattaggactagttcaatgcttaaaccgtagtagttcatccatttggtgctgaagcaggaatttagttcgtttgtgccatcagtattttcagatactcttagttaaggaatgaaaatgcaaatgtgacacaaaaagttcattttcttaccctggatggcaccctctgtctgaaatccctggctgctttgctaacgcctgggcctgtgctgcctgagaattcccaacagagtattaaaatgtcttggcacgtggttgaaccagacaaggacttgagatcagcgacgtctttatcatctttgtgtcaccattgctaacaccatgcccaatgtgtaacaggcaagcaagaaatgcttagtgatttgatacatttctgtcaattgctgaacccacagctcttgatcatgtttcgtagcaacccctgggagtgtctcaggagggctcagggaccagagagagcagttgcattgtggcatctggtttcattcctcttttccagccccacaaacccacccacccgcgccttcagaagcactcccgcctccccccggccccatgccttttcacctgtggatggttggatgctgcttgaccctgccctgatgatgcacagaaaccccccaaaggtcatgttgcagaataaagagaatgcctttctttaccttttgtcaaatagtgttaggctattatcaagagacggtgggaggggagagttcacagagtttttattgaagtagctctctcagcttttatcttgtggcatctccttctgcatccatatatcctttctcccattcagggcccccttacaaccctctattatattatctcaatgaaggaggtggagaactggattaagaaataaatctgagtgatggtgcttcatataaaataaaaatgagagctaaatttcaaaacacaatgctctagccaccccccaccccccacaccaaagatatttttacccttaaattctcacaaaaccctgtagtcatatcaattttttaaagaaattagatactggaagctcagagagataaaacaaagtagggtcactgtattagtccgttttcacactgcagataaagacatatcccagactggaaagaaaaaggggtttaattggagttacagttccacatggctggggaggcctcagaatcatggcaggaggtgaaaggcacttcttacatggaggtggcaagagaaaatgaggaagaagtaaaagcagaaacccccaataaacccattaggtttcatgagaattaattcactatcacgagaatagcacaggaaagaccggcccccatgattcaattacctccctctgggttcttcccaaaacacatgggaattctgagagatacaatttgatgttgagatttgaatgggatcacagccaaactatatcattctgccccagtccctccaaatttcatgccctcacatttcagaaccaatcatgttttcccaacagtcccccaaagccttaactcatttcagcattaacccaaaagtccacagtccaaagtctcatctgagacaaggcaagtcccttc

SEQ ID NO: 587257 - DNA, 4001 bp, Homo sapiens
taaaaatacaaaaattagcccagcgtggtggtgtatgtctgtaatcccagctacttgggaggctgaggcaggagaactgcttgaacccgggaggtggaggttgaggttgcggtgagccgagatcacaccagtgcactccagcctggatgagagagtgagactctgtctcgaagaaaaaaaaaagagcctatgtatttaaccagtattcaatatatcagtacgtatcattatgttcacaggatctagtgttaccctggacataaataatcaatcagtattgaaacacattttctgaacacaggttaagtcaagtaaccaattccagtgcagaagtgtttggcctctccaggtctctgccaattcctggcagatgactgagaaacaaatctttaaagtcaggaaattacttgtcttttcaattcagaatcacaatttcagagactgaagggagtgtagtttttaacccattcccctcagtagagtagcaaccagaatgggatgcccacaaaagatactggcaactaattttatatagttatctaaatacaagatcttaatagaagacttaatacaagaccctgaaatcgtctgctgaactgaagaggattacattgtcacttccaccacacatttcccctgagcctctcattctcattcccaagttcccaaccttctctcaggtcctatttttcctactccatgcctaccctcactcactccaacaccttcagtccagctatatattacttgctgccttaactaaatttactagcgagcttccccgacttcttcaaccttctgtgaatgctgaaacccctccacctaggcctctttcagcagctggggtggggaggtggatgggaggggagtaactgctcagctttaactctgccctgcaaaaaccgtcactgcacttcagacctagaagcagcacttctttcaagaggaccctccttccttccaaacttcccctatagacactgcttgtaactgcagcatgacggcatagaaagggaacgatttaggaggcaggcaatctgagttccaattttagatctaccccttactgtttacctttttgaatccgtttcttcatctgtcaaagagatagcacaactacgcattctcaaagggttatgacgaggcttggaagcggggggcgtacatgaaatgttggtcttcatccctccacattatgcaacctggtattattcactgcgctgttattacggaactcctctggatcgttaatggaggtcagagaacctgaattacaacctgtctgtccctgtgccccctcccccccaacgtttatggcgcagacagaaagcagtcaggggatgcgtgttgcctccaggttgatgcgaacctagggcaggagcctgggcgatcgatcggccagggagtggggggtcgtgcgggcggccgaacagccgcggcttggccccagaccgcactccgctgtggcgggcttcgatttcctcttgcgtaaaagtaggtggtgaccaaatgcttagtcctctcccggccagcctcagctcagcgatccgacccgcacctccgatcccgagagcttccattttactcgtcctcgaccacacttctcccccgacaactgtcaccctgaccggcgccgcccacccccaggcccctccgagcgccgggctgccggcagtccccccgggaaccgccctgggagcccgcctcaggcccgtactcacgcccgctttggctgtggtcgccgcgggtttcttctgcgccgcgccggccgagcggagccgcctccggccgatgtgctccagactgaggaagtcactggacaggtccaaggagcccgtggccgaggccgcggagtggttgtgcagctccaagctgctgcggagaaccaccatcttctctccctactggcctcggcgtgcgcgaccggagagagatccagctccaggcgctcgcagctctggctcttccgcgctccgaattctggcgccacaagctccgcgccagcggccgcagcgcgcgcgcccagaatccctccgccgtctgtcccgcccacgccaccaccgtagaacagcaggctcgaaactctcctcccatttgtagagcgaaggaggccgggccaacgtggagaggaacacaggccgacagtatagaggacctgagcggagagtcctggggaaaacgctgacttctttttcttcacatagttccggctcgctgagctcggcggaaggagacggtgggagcggtgcgtagcccgtttggaattttggcgcgggacggcggcgggggaagggaggcctctgcgcgctctgattggctggtggggtccggcgtctcctccccacccctgttgacacctgcttgctgcttcccgccatccaggattcaaatgcaaaatgcccagtccttgactggagggaaataaagcacttggcctttgacaggttttgactttgagccttaagaactttttttttttttaaataattgagggcttgacgaaaacaagttaaccaccaaaaagaaagaaaacacaaggagctaaaagcgagccagcagagtgccatcgtttagttaaggacgcgggttctgtacccatctttgccattgatcatcccacatagaagatctcgaacaaattattcacctccctgcattctaatttcctcacacgctgaggcaggagaatcgcttgaagccgggaggcacaggttgcagtgagccaagatcgtgccactgcactccagcctgggcaacagagcaagactctgtctcaaaaaaaaaaaaaaaaaaaaaaaagaacctgtttcaaaaaaaagagcaggactcccagttaaatgtgaagttcagataaagaacaaatactttttatacgtatctcggaatgtacatataatcggaaagtaactccgattgtaatacctaaggccctaaagtactattatgataccttggagccgtgcttgcacataataagtgctcaataagcgttcgctattatcacagaatacaagaagatggcttctctaagatggcagttacttgactactttgaaataggtaacacgctgaatgatcagaatgtccgagggctcttagcgaaataaacgaaagctatttattgatttggataactacagttcattaatttaatatttgttaaatacatattgagcctctattatgtaccaggcattattctaagcactggggatgcagcagtgaataaaaagaacaaaaatgccctaatggaacttaaactctagtggaaggtgaaagacaataaactaaatgtaaaagttttaaagtggcaagcattacagagaaatataaagtagggaagggggagggaagagtgcaatttaaaatagggtgattagggaaggtctggctgagaagtctgacaaaggcctaaaggttagatggttctggaagaagagagaggcgggaagcaggaaggggagagtggcgaggccaatgagaacagagccactgggagcaggtcctacgggactctgggtcttagtttgaaacttttgagggcttttattatagcccccaaattcccatccaaaccctgagatgaaaagacatctcagggttttgaacagaggtttgacttattccgactttaaaaataatctgcgtggctgctgaatgaagaatgcaatgtctggggacatataaaaagtatttgttgtttatctgaacttcgcatttaactgggagtcctgctttttttttgagagaggttcttgttcttttttttttttttttttttttgagacagaatcttgctctgttgcccaggctggagtgcagtggcatgatctcagctaactgcaacctctgcctcccgggttcaagcgattgtcctgcctaagcctccagagtagctggtattacaggcgtgcaccaccatgcccagctaatttttgtatttttagtagagatggggtcttaccatgctggccaggctggtctcgaactactgacctcag

SEQ ID NO: 587258 - DNA, 4001 bp, Homo sapiens
ttcccttgatttatctctgaattcttttttttgtttccttcttttttttttttggtatcacaaagatattttatgtattccttgcatttaaatttgcattccttagctcatttaagagcttggctgaaaactaaatagaattcattaaaatgtctcctctcagaaacacttagtcagccctgtgttctttattttatgtagattttctatacgtgaccgacgttctccagtcaccaaactcttattttaatatgctgaagtgacttaggatttggggttttactgtaattatttgtagccaacagaattagttatctaaaaggttcttgctgtttccaatgctaatggaagtgcagggtttgtcgtaacttgggtggttctgtctgaactctggctttaactggtcagaactataaacaagtggcctcaggacccttcagccctaattgaggagactgcaaagtcacctttagaaggttcattggttcgtttttgccttttaatacccttcctaggaggctttattcttagtgctttcttgccttttctagaataatctggaagctttaaaccaccttattattgacctatatgggttttgtaagtatgtttcaaaatcagtgagtgtagctgtttttaataataaaaatactgttacagacgtggaatctttggtaaggttttgaaaaaaaaaatgtggtttagagacaatttccacttgttgagtatttatttattataactgagaacactgagactcagaggcttggagccacaggtcacctactggtgacatgacagaagtcaaatccaggacttttgaatccagggctggccccaccagtaacagctcttgattttttttttttttaacttcagttaaaggtagacttcaaactctcaaatcaatagatactgagaaatgtgatagaataaaattctatagaacaaggttttaaatatatatattttttctttgtcatagatcccttggcagtttggtgaagcccttctccaaatgtttataaatatgtagaatgaaaatacacaggattataaaggaaaccaaatatttttagatatagttgtcaaaatgtctttaaaatgtataagaatctggcaggcatgatggcttacgcctgtaattccagcactttgggaggccaaggcagtcggatcacctgaggtcaggagttcaagaccagcctggccaacatggtgaaaacccgtctctccaaaaagtacaaaaattagtcgggccaggtggtgggcacctgtaatctcagttactcgggaggctgaggcaggagaattgcttgaacccgggaggcggaggttgtggtgagccaagatcacgccactatacttcagcctatgcaacaagagtgaaactccatctcaataaataaataaataataaaggatgagtgtggtatcttacttcaaaatagagaaaacatacatgacatttcaaggtatctgcaagaactttaaagggatatgaaaacattgaatttttgttggtgacagtgtcacagatactacttatctcaactactgtgatttgttgcctacattagtaatgaaagatgttatagttcacttagagattaaaaatagagatttatttttttttcctcattcaagtttatggaccccagaaatctggactgcaggaataaggatctgctcagaactctcaaaccatatgattatgggctttttttctccatgcttctggagagggacatcatttcatttttttttttttctttttaaagggtgagaagagctacacttaccttctagggtctcacactggaccaggttgatatagtcttgctgggtcaggaggctggccttgcatcctcgaaccaggccctccaggtagccatggtccacgttgaagtacagctccgcaccttcgagcatgggggaagagattgaagccaaggtagggtgaaacagctctgtagtcctggacggcccctgaagatttgcactagcctgggaaaagtgcgagtaattatcaggcagcacaagcaatctatcaggtgatagtcagggtttttgtgactagtttcctctggtttcagtggctttcaacacagcacactcagccctgtttatacagcaacaatgaatcagccagatgacccaagtaaacccaggcaacaaaccacgattgggaaaaagagatatgagagtcaggggaggatccaggctcaattcttactctcccacagatgggacccttcccagctttactattgggaggcttcaaactcctgaatgttttgtaaacattcctaccaccagctgagctttcaactgtaatttacactaatccaaaattctttgaggactatcaatatgaacaaagagagggtttttaataaaaataatttaatttaggctggcatgatggcttacctgtaatcccagcacttgcggaggcttagcggggcagatcacctgaggtggagaccagcttggccagcacggtgaaacctcgtctctaccaaaaatacaaaaattagccaggctttgtggtgcatgcctgtaatcccagctactcgggaggctgaggcacgacaatcgattgaacgtgggaggcggaagttgcagtaagctaagattgtgccactgcactccagcctggaggacagagtgagactctgtctcaaaataataatgataattattattatcattattattataatataagtaaatcaaatgtgactaggcaatttgaagagtcatgagaacctaattctaccacacagttcatttgtaagacaaatggtcagaaatgccctaaaattgccaaaggctggtagttgcttcccagccagtcgaagggcatagcccaggaaacaatcctggaaacagatacagaaggctatgattctataataataagccactacctctgcaaaattggactgtttagaaggcactctattttctttttcctacttgaatctcctgtttattctgcaatgtgaatctgcacagacagtattattactaaaatcacaaataaggaaccagccctcagaagctgtgaggcagctcaaaatgcacagctggcaatacagtaagtatttaatgaagctgggacttgtgttgagtttcatactccaaaaggagtgcttgttctgctatatattgtatttagttaaaaaattatgtaaaatatcatgaatgctatttgcatataaagtgtttcatatatattgtgtcaaatctttaattggaactaaagtcccagaaattctccagtctctatcagggtttttccgaactgtttgggagaagctagataaaaaggaatcaatgtaaattctgctttgattgttgaaaatcacagagaatcaaacctagcttttcacagtgcccagactttgaaagtattcaataaatagtagaggctgccattattgttatcattctctatccacccaccacaattccaccatccttaaacatcctgagtgtgttttatgttgaatcagtcacttatttatcacttctgtggtctaaagatggttacatatccacagttttatagagttcaaactaatacaacttaaataaattataaataccacacttatcttttttaaattattttactatgttttactgttatttatgcacttgaggttattatgtctattgtatttgtaaggtagatattctatataatgacatgctctcatgcatctcttctcaactccgggtttaatgacataatgacggtagcttgcagcagaccatggcaggaatgaagtatttataccatgaaaatgggcaaatgctacaaatcagggcttgattcactgtttggttaattgtctggacttgagaaaaagatggagaaaatgttaataaagcaaagtaaaagtatgtaatgtttatagccattatattgtaaattgcaaaaaaatttgaagaaatgttctttcagtatttaaaaactgttatctgattca

SEQ ID NO: 587259 - DNA, 4001 bp, Homo sapiens
gggtaagtacgtacaaaccatggagaaatcatattcatctctcttaaaggtttacaatcttaatcatggagtactctttaaacaacgttatttcagttgatattctctgaattgacactgaatgattaattatatggaaactgactactgcacctttataaccttttttgagaggcaccactaatgtctatctgttctacccaaagaaaggcaatgcatacaaacgcaattaataaaagagaatttgtaattcgtaggtataaatttattgccaaggtttgcataagaatgcaacatctgccgatttcctgaagtagctacttcagctcagataagtcccaacatacattttctaattcgaacaattcccagttactgtaaaaggcacatctcagcaatccaccgaatcaaatgttttcctttttcttcacactgcagtgctatcacatgacccagtgacagatcaggatgtggattagtcaggcttcagatcgcccagactaacacccttcatctgaaatcctttttaatcagtcggccacctagagacagacactctggcaattaaccagtgaaaatgcagtctcaccacctggggaaacatcatgtgcttttcccagttttttaaaaagtctatttcgagggctcattgccagttccgaagaaagctgtgaagaagttggatgctacacaactgcattctctagtaatcaagaaccatttcttttggaattgctgagctatccacttaaacctagttcattaaggcctttttatttaaaaaatcacaacatttaaacaagcctatgcacacacaccacctatgggcaaagccacctggcttccccaaagaaccctgcactcaaccaagtttggttaactggtcagtaaatgaagaggcaacggtagaaaaaggcccagcgagaatttaagaacctggatttttagtccctgctctgccaataattaagtgtctgaagcatggcaaatcctaccccttccagaaccttaggcttctcacctgtaaaatgatagggttggactggatgacctgcaaggtacttttcagctctagcgttctctgatatctaggtgtccttctgcggagcagcccctccaccaaacaccaagccacatctccctctggctactggcctgacctccatccacgaaaggcctgaccacgtcagcgaaggctctaccgtctgccctccgcaggagttgaagaccccattgaggtcctcaccagggggaggggagaaggggcgttccctcgacccctagatatccaaatgaagtcaggggaagattaagatcggagtggcaagaagtggccctcggggacgggaagcaagtgcctaagaaggctccagcctagggaagctggggaggggagggggtagggcaacagccaggagcccaccaaccccaggaaaaagttcccgctggtgctcttgccctcagcccatctcctggaaatattaggtacaggcaaatctccttctaaagagacaagtgggtcagggtcggaggggagacgcgggagggaaaaacaaatcctaccccctacccgctggctaagcaggtgactgggagcaaagggctaggctagggagcaaagaccggagacgtattactctctgatactcactgaggcgaggctgggagaggtagttccgactgactgccagcgcctgctcccgagctcccaccgccggcccaccggtgggcacgggtagctcgggtgcggccccgttgacaatcccccgcatcgcccgcagcgccatcttgtctcctctgtcccgactggcccagcagcgacgccgcgcacgcgcagatataccaaggcggcccgcggcccgaggctccgcctatgcgcgctgcggcgccccggcctcgccccgcccccttcgccgccggccgcccccagcctcgtgacttcgcgccgctggggccagacctgcttgcgagcaagaggagctgaccagcgtgctgggaggcgcgcgcgggcgcagagggaagggaagcgaaagaggggagatggaaggagagaggaaagccagccgaaagagaggcgcacaagcggagtgaggggaggaaggcaaacgcgtgcaggccaacgtcagctgatatccatttcgaatgggctttcgtgacgctgaatggagagaactcaagctgtgaaaaccgctttgaaaaacagaagcaatggaaaacatgtttcagtgattattaacacatgtggcatcatttagttcactttactccctacccaattcgttcacgcatgtatccattcgacaaacatatattggcttgttataggatgtgcgtagcggtgtgaaaaataggggcagatttggaagctgtgtaaggggtgggactagtgtaggatgacagcccaggctggaggccggagcaatggaatggattcttcttcttcttcttcttcttcttttgagagggagtctcattctgtcgcccagactggagtgcagtggcgtaatcacggcttactgcaacttccgcctcccgggttcaagcgattctcctgcttcagcctcctaagtagctgggattacaggtgcccaccgccacgcccggctaatttttgtttttagtagagacgaggttctaccatgttggccaggctggtcgcgaactcctgacatcaattgatcccgccgtcttggcatcccaaaatgttgggattacaggcgttagccactgcacccagaagattataatttttaagtttaactaatgtccaaagttggcacgtgtaaaattaaacaggaattgtaatactttactgataagagcacaattggtatgatatttagaagaacaatttggtgatatctcattcaaatattttggtactaggaacttatcgttctctctctctgtagatatatctgtatctatctatccactcagtgtatgtgacaaatattttccattatatataatacattacgtcatgcaccatatggtatatattattatatatggtctacagacatatacatgtatatatacatacacacagatattcaaaaaaaatttttgtaatagcataaacctagaaacaatctaaatgcccattcataagttatagcctattaagtcaaaggtatttctcaaacttttgaaaagaattcagtggaggctcaagggttgagtttttttttttaaaaaaagtccaagacacattattaggtttaaaataaaaaagcaattgcaaaatgccatgtaaagtagattaacatgtgaacagtaggagaaattttatttttaatttaataatctttctatgtagtttcactgctttaacaggtgtttgtactgattttttcaaatacaatgcataacaacttttttaataaaaattacaaatctagtcttctcatgccaatttttcacaatggtaggtaaatttcatatgtgaatatcagactgttagttgttacaatttttatgttattcttttaggagtagttcatggcttttactttaaaaaaaacctgtttttaactttttactctggtaatagaaattagttgtggtctaatgtgtatacgtagagtggtaaccccaacatttatttaacaaacatctgttgagaaaatgcacatgtgtatcgggtgctgatctaagtcctggagatatatttgtaaataaacaaagactctgtcatcctgatacctgttggagggagaaagtcagaaaacaaacatgtaaataaagtgcctggtagtgtcaagtatgatgaaaaataataaaacaagataaagagaaaagagtgatctagacgaagataagattttagatgatgtgatcagggaatgcacttctcagtcatctgagatctgaatggagagagaaagcagatcatgggaagctctaagagatgtgtggcataggcagagggttttgcaagtgccaaggtcctgaggcagaagaaggaaagtggggctagaatggacacagctaagcag

SEQ ID NO: 587260 - DNA, 4001 bp, Homo sapiens
agtgcagtggcatgatcacagctcactgcagcctcgaactactgggctcaaatgatcctctcgcctcagcctcccgagcagctaggactacaagcacacaccaccactcccagctagttatttttttatttttggtagagacggtggtctcactatgttgcccaggctggtcctgaactcctggcctcaggcaatcctcccacctcagcctcccaaaatgttgggattatagtcacgagccaccctgccaggcctggaatgttcttttcactcacaccttcacattcccttttcagtctcttttcagatctcaggtcaaaagtcataccctctcagagcgagagggtatgaagaatataaataaaattgttttaatctttaaaaagtcatattcttagcaatgcctttttaaaatcttccataatacacatgcccctactacactctttcataccactgttattccttcaaagcacatttcacgcttgcttgatttttaaaatccatcccctctgcttgcctgtaagctctataaagacaattttctaaaccctaccatcagcactgtacctgcatacagcatgtattcagtacacattatttgcatgaataagtaaacgactaccattcaaaagtcctcgttacctgactcccaactttctttcccacttctccgcagtgcaatccactgtaaaagctacttctgactccaccagaagcattccctacccccatcttcaggctttcaaatcctgtggctttccctgcctgtaaaattatccccatttctctcaacctgttcaaatcctgagggcttgccaagactcaagttttctttcctccagaatatcttcccatagtgccagtttacacatgtgtcgttgctccacactttcaaagcacttcgcattctctttttggtaagtatacataaactgcatcgtattttaacgtgtcctgtgtgtagacttttctctccaacgttagtgctaactcctaaggatagactgttcacatcccacccgttccattcccagagcggcgctaagtactgggctcgcactgaagcatgtgatttttccctaacataccagaattttcctctgaaaagaatactagcttcccccttactcctgtttctcaagtgattcaatatgccttatgtgactctcaccaagttcttttctaggggtttgttttgttttgttctgttttgtttgcctaccctcccccattctactaaaaaatagttgagttctctggattcctgttctttctcattcctagagggaccttgtgtactctgtgagggttccttgcctgcagttaggggctcctaggcctttaaactgtcatcccaccacccccgacccccgacacccgcgccccccccaacacacacccagtgaaggcacttgcgctagctgtgacctcacacacaccactccatagcctcacctggacctatcacttcattcccctcaatcaatcaggcggcgtgcattcctacccaagaagaaagatcccagaccgctgtatctctcctttctgcctgtcattaactacccacgagagctctttctctttttccctccttctcttccttagagacggaacctaggcccaagacggtgaattggcgccgagaaaccagacacagccacccagccagctccagctccaacgccacggtctctgcccccgcacccacccgcgtccctcccaggcagcgaccggagctcatgcttcggcctgaccaggactccccatccggggagagccatcgctcactgacccaggaaggtgtcaaacgaggaagtagcagcagtaacaggtaccgaggcagacagcctagcggacgctatcggctcagcgatccatcccttcccgacctaagctccggcctcacggcttcctctacccaagcgaacacagaacaagtcacgtgccagcccagcagtcagctgaccgcggcgcgcgctgctccgcctacgcccgcgccactgcgcagccgcagccgctgccactgccgggccttgggagaggggcgggactaggaggctacggggcggcaaggggaccctatattcggggctgatcgctgttgttccagagtgggtggggttttccgcttcttccagtgttgcaagtggcgttttgtccaccacttgtaaacgtcagcgccactgcaggtttctgcgggtcagaaattgtctccaaccccctacaagggcttctccacttggggttttcttcgtcagctgggttttctacctagtatactggctagtagttcattttagcagattcacattttcctgaagtccacttagacttaatttcataaatggtccatggagcatttactgtgcgccaagcactgcgctcgttcttaggattgcctactggagagaatcactccttgccacgaaagcgcctcatagatagttgaaaccacattagatagtgggaaaccaaaggttttaggacagaggcatagacaggggaaagcatctcctttggagaaaaataggtaacaagctcctcccaggaaccctgcttatttcattagcttggggagatagatagtaatgtcctaatttagaacacagagttttagaagtagtagaaattttgagatgttctaatttaatccttttagatctacagatgaagaaagtgagggcacggagttgttcagcgcaagggaatagataccaggtgttgaatccaggctctcctacttactagttgtgtgaccttactcctctgaatttcagcctgttcacatgcaaagtggtggtaataataccttacacaggtattgtgaggattaaatgaagcctgtggttagcacagtgcctggtacataggaaacaaccagtaaatggtcgtcattattactatgtattataggacccaggttttctgacctatactatgccttttctgctgtgtccccctacagaaattcaccacagaatttctcagagcctcagtattaggttggacagaaagtaacaaccaccagactatccccaacctgacgctttcaccagttttggatgaagttcatgcaattacaataaccagttctataacatggcttcagaaacttatcagaattccagaggcttttatctgccatcacgaaatgagcctaaaggcattttttttttggttaggtccactaaaactttctgccatgatgcaaatgttatcctgtgctgtctgtacagtacccactagctacatggagccattgagcacttgaaatatggttagtgtgacttagtaactgaattttaaaatttatttcactttaattaaaatttaaatagccacatgagaccagtgacaacagccttagacagtgcagttttaaggtccatgcttgaactatcttggtttcttcgtgcttgtgtgtggtcctgaggcagactttttgtcttggattcttaatttctaaactgaattatacctcgcgcaactttccaacatttggggttttttttttagttttggggttttttttgagatggagtctcgccctgtcgcccaggttggagagcagtggtgcgatctcagctcactgcaaactccacctcccgggttcaagcgattcttgtgccttgccctcctaagtagctgggactacaggcgtgcaccatcacacccaactaatttttgtatttttagtagagacgggttttcctcatgttggccaagctggtctccaagtcctgaggtcaagtgatctgcccacttggccctcccaaagtgctgggattacaggggtgagccatcgtgcctggcctccagtgttttaattaccatgttatacttgggaggcagtacaacagagtgttcaataaatgttagctctaatttttatgaggtttaatgtatctcacttaaaaatttaggaaacatagctgggcatggtggtgcatgcctatagtcccagctactcgggaggctgaggtgggaggaccccttga

SEQ ID NO: 587261 - DNA, 4001 bp, Homo sapiens
gtttcccacttattccaaaagtacttccccaggcagccagagaaggtcaaaagcaccataagccgctctgcttccccactagggcgccaagctgtttccaccccactacacttaactccctaagacagctaattattctgaagaggaagtgtttcttccacatttttcagtattttccctgtatttctctcatagaagcatgaccatgaaaaagtctgatgcaaaagcatatgactgtccatgattcacagcaaattggtacttactgaagataggattgccagttgactttgtttgcacgaacttctgcagccttggcagcaataatattggtggggacagcagcatccacagcacctcggatatccattttggtcatctaaacttcgtaatcttgaatgtctttcaacaaatcttcaattttgatgcaaggtaaaaacagaatacgaggtgtttcttttttttacaactattaatattatgattatgaatatcgtgatcactttaatctccccaggcattcaactcaaatattaaatgtcctaagtctgaaagtatcattatatttcaaatattgtccactgctccataaaagagttctttaggcttttgcttttctagaaaaatttttttcattattggcactaacactgcagtaagatttttaaagcaatcacctaatatactgaaatcagaaatcatgattaaatagaataggtataaatatgggaaaaattgtaaatttatacaattgtggttaacttttctcatagagaaacaataagaatatgaatagtacggataaggctagttttataaacatttactaagcatcattttgaagtggcacattaaaaattctaagtcctttcgaaaattactcaaattaaaatacacaaagtgggaacataatttcttagaagacagtgctttccttttcaaacaaaattcatagtatttgcaaaatcaaaattcggagagaaagttttagaacaaatacatattacaatttaggtaagccaacaatggcggtctggctggacgacaagaacctacaataatgaaattctatgtaattctcactcctaaacttccagatacaaacgactgattttaacacaaagcaaaatacaggttgccacttgcaaaacataaattcacggccatggccacaaagaagttaaaatcctacccaaaattatattccgggtttccaacgatcttaatcaatttggaacttaatctctgtatctgaagatttgctgtataaacaaccctgggcagcgcgaacgacagggcccaggaaaaaacaggcttcaactgggccaggctggaactctgcagccaaggaggctcagcctcagcggcccgtcctggcgtagctcaaggtgtctctagacaattacctaagtccctgaactactcgcacccccagcgatccagggccgtggcccagtcctggagaaggtatactttttacccctccccctccactctcctgcccgcccctgacgtttcttccccctgcgagaaaggctccagaatttcgcttaataaacctggttgaggcctggaagaaaagcaatctggcaaccgggggccgaagaacaggagaggaccaagcggcgagacaccagcacgcaccaggcaagctggagaaactgcaagagtcgcctgacctggtctgcagcctgagaccaaacaacgcgagggcggccttacctcgcgaatcctcgggaccccacaacgcacccaaagccggcagggagggtggtccggggcgccggggacacagccgggctggggcgccgcgtcagagccaagtaggcgtctcctgtcaggtccagaggtctgagcagtggagggagactccgggagccgaaagtgaagcgggtcccgcaccaaggagacgttgagggccgcacaggtagaaggaagccagggcggccgcagtagaatgacagaggcgccggtcacgtgatcggaggcacgtgactgctgcggaaggcggaagccgggagactccaaagcagcaagaggaggggcgggcgctgcggcggggcttgttcggtgcggacaactggattcccgagtccgtaacttgggccccggagcgacgcaagggtcgggccccagccagccagggcaggtgggaggcggcgagcgtggcgggcacgctaagacccgccgcccccagacctagtgcctcgcctaggggaggccgaggacctccgcccggaagcagctagcagaggccaaaacgctcttattgtaaccgtcattcttttgaaaagtttgatttcgcgctttcaaattaatttccatttggatttaacagctccatgaagcaggcgttcttattctgattttaaatagaaaactcgggctgagaagtgggtctgaaaagctctcttaacctagggttgcacatttagcaaataataaattccattgcagtatttacttttatactaaaaagttattcgttgtttatctaaaattcacatttacaggacgtctggtattttatccaacagtcccatctggagcccaaattttcccctagtccaggcctcagcaactgtctttgccttaaagtaagaatgtactgccctggaggtgaagtatatatgatagcatgttttccttaaaaagcaatgaaaggggccgggcgcggtggctcactcctgtaatcccagcactttgggaggccgaggccagtggatcacctgaggtctggagttcgagaccagctgaccaacatggtgaaaccccatctctactaaaaatacaaaaaattagctgggtgtggtggcgcatgcctgtaatcccagctgcttgggaggctgaggtaggaaaatcacttgaacccaggaggcagaggttgcagtgagccaagaccgcaccattgtactccagcctgggcagaaaaagcaaaactccgtctcaaaaagaaaaaaaaaaaattctttgaaagggatttataaccaacccatttttactcgtaaaattaaagtcagaataatcaaaatcatgcattgattatgaataaagatatataataacagtgtcaaagattgtactaggtcactcattctgtcttagccagaagtgaaagtctgttgttttgaaagcaaatctaaggggaaaaactttcataaaagagaaaaagaaaccgatcgtgtactaagaaactcccaaaagctgaaacagcatgttttctgtgtaactgagcaaagctggcagtgaggcctgatcttcgcatttcctttctgtatcacctaagccacagactggcgtgatacagcgagtctcatcagatttcgggaggctctcctcttttcctagaggcacaaagttatggaacaaaatcaggaacagtgcagtgagcagaggggactgcttcacaggcacctgggctggcgttctccgagcatcacaacattaccagacaatttgcctggagtagggagaagagaagaggcaggtactcccggcattatctctcttaacattatttctgtaacacttctatcggagatttttcttggtccattcaggctcctgtaacagtgctgtagactgggtggcttataaacaacagaaagtcattttctcacagttctggaggttgaaagttcagaattggggtgctatcatggtgaggttctgggaaggattgtcccaggttgcaaactgctgtcttctcattgtagcttcacatggtggagaggtgagagagctctctggggtctctttcataaggacattaatttcattcatgagagctccaccctcatgacctgatcatttcccaaaggtcccacctcctaatatcatcaccttgggagttaggatttcaacacaggaattttggggagacacagaccatagcggtgatctcagttacctaattatataacatacctggggtccccataccctgggccacagactggtgtggtccatggcctgttaggaacccggctgcacagcaggag

SEQ ID NO: 587262 - DNA, 4001 bp, Homo sapiens
tgtggggtatgtctccccatttcacattttactttattgagcctcagagaagttaagtgatttgcttaagatcaccaaactaatagcaagaaccaaaactcaaatccaagtctctcaactcaaatatctgtgcttcttattagttgtatgcaccactctaaaaaggccacctgcccccatgctgattgccagggcatatcagaccagtctagcaggttttgcccctcatccccttcctccctccgttagcccaaggacattcctcctatgtttcccacttattccaaaagtacttccccaggcagccagagaaggtcaaaagcaccataagccgctctgcttccccactagggcgccaagctgtttccaccccactacacttaactccctaagacagctaattattctgaagaggaagtgtttcttccacatttttcagtattttccctgtatttctctcatagaagcatgaccatgaaaaagtctgatgcaaaagcatatgactgtccatgattcacagcaaattggtacttactgaagataggattgccagttgactttgtttgcacgaacttctgcagccttggcagcaataatattggtggggacagcagcatccacagcacctcggatatccattttggtcatctaaacttcgtaatcttgaatgtctttcaacaaatcttcaattttgatgcaaggtaaaaacagaatacgaggtgtttcttttttttacaactattaatattatgattatgaatatcgtgatcactttaatctccccaggcattcaactcaaatattaaatgtcctaagtctgaaagtatcattatatttcaaatattgtccactgctccataaaagagttctttaggcttttgcttttctagaaaaatttttttcattattggcactaacactgcagtaagatttttaaagcaatcacctaatatactgaaatcagaaatcatgattaaatagaataggtataaatatgggaaaaattgtaaatttatacaattgtggttaacttttctcatagagaaacaataagaatatgaatagtacggataaggctagttttataaacatttactaagcatcattttgaagtggcacattaaaaattctaagtcctttcgaaaattactcaaattaaaatacacaaagtgggaacataatttcttagaagacagtgctttccttttcaaacaaaattcatagtatttgcaaaatcaaaattcggagagaaagttttagaacaaatacatattacaatttaggtaagccaacaatggcggtctggctggacgacaagaacctacaataatgaaattctatgtaattctcactcctaaacttccagatacaaacgactgattttaacacaaagcaaaatacaggttgccacttgcaaaacataaattcacggccatggccacaaagaagttaaaatcctacccaaaattatattccgggtttccaacgatcttaatcaatttggaacttaatctctgtatctgaagatttgctgtataaacaaccctgggcagcgcgaacgacagggcccaggaaaaaacaggcttcaactgggccaggctggaactctgcagccaaggaggctcagcctcagcggcccgtcctggcgtagctcaaggtgtctctagacaattacctaagtccctgaactactcgcacccccagcgatccagggccgtggcccagtcctggagaaggtatactttttacccctccccctccactctcctgcccgcccctgacgtttcttccccctgcgagaaaggctccagaatttcgcttaataaacctggttgaggcctggaagaaaagcaatctggcaaccgggggccgaagaacaggagaggaccaagcggcgagacaccagcacgcaccaggcaagctggagaaactgcaagagtcgcctgacctggtctgcagcctgagaccaaacaacgcgagggcggccttacctcgcgaatcctcgggaccccacaacgcacccaaagccggcagggagggtggtccggggcgccggggacacagccgggctggggcgccgcgtcagagccaagtaggcgtctcctgtcaggtccagaggtctgagcagtggagggagactccgggagccgaaagtgaagcgggtcccgcaccaaggagacgttgagggccgcacaggtagaaggaagccagggcggccgcagtagaatgacagaggcgccggtcacgtgatcggaggcacgtgactgctgcggaaggcggaagccgggagactccaaagcagcaagaggaggggcgggcgctgcggcggggcttgttcggtgcggacaactggattcccgagtccgtaacttgggccccggagcgacgcaagggtcgggccccagccagccagggcaggtgggaggcggcgagcgtggcgggcacgctaagacccgccgcccccagacctagtgcctcgcctaggggaggccgaggacctccgcccggaagcagctagcagaggccaaaacgctcttattgtaaccgtcattcttttgaaaagtttgatttcgcgctttcaaattaatttccatttggatttaacagctccatgaagcaggcgttcttattctgattttaaatagaaaactcgggctgagaagtgggtctgaaaagctctcttaacctagggttgcacatttagcaaataataaattccattgcagtatttacttttatactaaaaagttattcgttgtttatctaaaattcacatttacaggacgtctggtattttatccaacagtcccatctggagcccaaattttcccctagtccaggcctcagcaactgtctttgccttaaagtaagaatgtactgccctggaggtgaagtatatatgatagcatgttttccttaaaaagcaatgaaaggggccgggcgcggtggctcactcctgtaatcccagcactttgggaggccgaggccagtggatcacctgaggtctggagttcgagaccagctgaccaacatggtgaaaccccatctctactaaaaatacaaaaaattagctgggtgtggtggcgcatgcctgtaatcccagctgcttgggaggctgaggtaggaaaatcacttgaacccaggaggcagaggttgcagtgagccaagaccgcaccattgtactccagcctgggcagaaaaagcaaaactccgtctcaaaaagaaaaaaaaaaaattctttgaaagggatttataaccaacccatttttactcgtaaaattaaagtcagaataatcaaaatcatgcattgattatgaataaagatatataataacagtgtcaaagattgtactaggtcactcattctgtcttagccagaagtgaaagtctgttgttttgaaagcaaatctaaggggaaaaactttcataaaagagaaaaagaaaccgatcgtgtactaagaaactcccaaaagctgaaacagcatgttttctgtgtaactgagcaaagctggcagtgaggcctgatcttcgcatttcctttctgtatcacctaagccacagactggcgtgatacagcgagtctcatcagatttcgggaggctctcctcttttcctagaggcacaaagttatggaacaaaatcaggaacagtgcagtgagcagaggggactgcttcacaggcacctgggctggcgttctccgagcatcacaacattaccagacaatttgcctggagtagggagaagagaagaggcaggtactcccggcattatctctcttaacattatttctgtaacacttctatcggagatttttcttggtccattcaggctcctgtaacagtgctgtagactgggtggcttataaacaacagaaagtcattttctcacagttctggaggttgaaagttcagaattggggtgctatcatggtgaggttctgggaaggattgtcccaggttgcaaactgctgtcttctcattgtagcttcacatggtggaga

SEQ ID NO: 587263 - DNA, 4001 bp, Homo sapiens
gggtttatactgatgtgaattttaccctctaagatttaaaaaatagtaagcggtactgagctctatttaatatgcacatactaaagttggaggggtctccaactttactttgaaatgcatcgacaaataaggtaaaatgttaattacagaatctaggtggaagtataactctttttcaccttctgtttgaaaacgtatgtgataaaaccttgggggagaaaggcactgactactcgacctcacttatcaccaccgataatcattttcttttggagtctttcctaaactccttggggcttatttctaatcatgatcagcatctgcacgctctcgtatatgtaaaagaaattaatgaattatgagggcctttctagacaatcatgagccatgtttctgccaacccttgctgtatttgatgtgctttgatgtacttctactttgtgctttgatgcacctctacatcaaccttcgctgagcacaaggcaattccccctcctttgagtccttagattcccacccagtctgggaattcacgatagaaacacgacgggacacagaactaatataaccaagatgccaccacaaaattcagttaaatgtgctgaaacatgaggcggtaaactgtgtccccgactgtttcgggtttctgaaccagcagctttgtctacgaaacacacattcaggataccgtgtaagggttagaacatgttaccaccaccaactgttggcagtcaagacagtagttgataagccacccgtctaccaatctccctctttctgcctaggaaccatggcgcggacggaaaaacgaagccatggtgactaatcctcaggctccaggaggtgactggggtgagtgaaggcgacttgacccaatcaggagcgccgcaggggcggagcagcagcctcgaggcttccagaaggggccaaaagcctctcgctggctacctgacaccggggcttccccgccgccaggccccaagtggcgtcaactttcctccaccagagggggaccgcgctccccgcgccccccaggaatccgacttcctccgcagctgtcaccagaggccggcgcggggcccgccccgctccattcataaccaggaccccagccgttgcagcccacagcgccgcccgcccgccgggcttcgggaggcaaaggtggcggcggcgcaccgcggagtaggggctgcgggaccccggcccctcagggctgcggccgggccccctccccggaaacagcaatgcaccacgggagaggggtgggggccgcacgccgccaggaggggacggcgacccccggcggcgagacccccgcgcgctcccccactggcacacgccccctcgccccaactgctgcggctccggctccgccaagcgtccagcagccgcccgaaggtcctgaggcgcggcccgccgcccagccccgccgccgccgccgccgccgggggcacagacagccgccgccgccatgttcgaggcggccggccgcggggcgctgcggggacgtcttaagggcggcggggcccagccggagccccccagccgccccccaaggccagccccgcgtcctggcccctcccgcgctcctcggctcggtactcacgtgagataacggcccaaagagtcgggtaaagcgtcttctctttttcggcggaatttttaaagagggatgtggttaccttgagcagaaatacccaaggcggcctgggccataggctgcgggaacgacttgggggtaaaagcgcggcaccgacaccagctgtgtgcagcagtggcggcggcggccgaaggagaaatagaacagcgcaggcaaaagaagaaaggcgcgggctgggtgggaagaggattcggactcgtcacactgcagagcagcagagcgagaaaggatgagaagaggcagagaaggcgacggcagaagaaaaaaggaaaaactgcggccgcgatcagagcctgaaagtgtgagaaggcggcgccagcgacgccagtatttatattagggggcgtggcctggtgacatcacagctggccgggcagccgcgcgagcggggcggaacccggttgcagcccggagaaaagggagggggacggaagaggaaggaggactgagcccgggagagagaggggaggggtcggcgcgcgaccgggtcatgcaggtgcagactggccggtcgcttcccgccctccagccacccgcagctccccggcaggcgaagggcggccgcgcgggtgtgggccgagagagggaggcggctcggctggagcgcgccgtccgcccgacccccgccgcctctcgggcgcctgcgctcacgctgcggggcccagcgcattgtgagccgggtcgagctccacgctggcagcgtctgagagctgtcctgggccggaggtggcgcgaaccctgtgcggcctagagtgggcctggggtaagcctgtcggcgccgctgccgagccttcgcgtccagctccctccgctttgtgaggcctgtagtttaccctggggagtgtcctcccgggctgaggcgcccgccctcggtgatgcggtactcctttagggaagcgagttcctcgtggccagaaaggaccggcccagtgtccgggtgttaaaaagggttgtgaccacgtgaaaatgtcctcagtgctcgaacgttgcaatacggtgcagtggaaattttttaaaggaatatggcttttatgtcttcatttttaaaaggattggtggagtcagtcccaagcaggacccgcgttggagaggggattactgatgttacaagcgcacattacttcaatcccctaggtctcattttcgcggtcgttttaatttttctactccacaacagacttttttttactaggggttctaagattacctacatagcttttaatttattttcatcttttttagatgcctcagcactaatgatcatgatcagagaccccgagttctctcgtgctgctacgcttcgcaacacatagcacaaatggaatatgtgttgacacacccctctgaagttaagatctttgatattaagaccctgacttttttccctttcattcttccgaaccctctgtgtactttgagcagcactgtggttgattaataaatcatcaaatgtgaaaggaagaaagcgaccttcctgtgtggaaaagcagggtatcttgcgaggctgtatgagagagtattcggtagaatcaggagctgtggacgcattcctgattttgtttttccttattttgctcggctatatcttggctctgtcttttatttcttcaaagttctgttctattcagaacatttgaaaacacagccattcactagaccctctctggtggaggaagaaaaactagagatgaatacaatatttgaaaccttgcttacaatctagcaggggaaataagacagcaatacaaaataaattgttggctgatacaaataaaatgctgcaaggaccaagtggagggaagagatgattgcagctaagtgagagaaaggctgctggggaaaggtaaagagtgattttgagaaaagcctttctagacaaaggtgcttcctttttcaccaaactcgcctgtttggtgattttgagagtagatgttccagtgttccaggcaagggaaacggatgagagaaggcacagaagtgggtgggtttagagaattgtgaatagcctttctggttccagcataggggcatggttgcaaatgagattgaaacggtagattagggtgacatcaagaagacattggaggctgggcgcagtggcttacacctgtattcccagcactttgggaggccgaggagggcggattacctgaggtcgggaattcgagaccagcctgaccaacatggagaaaacccggctctactaaaactacaaaattagctgggcatggtggcacatggctgtaatccagctactcaggaagctgaggcaggagaatctctagaacctgggaggcggaagttgcagtgagccgagatcacaccattgcactctccagtc

SEQ ID NO: 587264 - DNA, 4001 bp, Homo sapiens
cacacaccatatactcccagtcaccacggcaaccatttcttaaagctgtacttacggggttttggttgttttttattattatttttttcatgctagatcttttcacccttatttcttcggagtacatctctggcctttgactctctgctgagaagtaccatacctccttgggaaaccctgtcacatctaacatttaccaggtccctctaaaaggctcatatctatcctcatgctgacactgaattcagccaacacaccatttggtgacttgctaaaagcattggcaatacaaaataaccattctgattgccactgtgagtcagaaaaactggagacaaatatagtgtaatgtattgtacagctttcacagacagtcctcaattttaaaataaaaccaagtcacaaagttaatgtggaaaaggagccagctttggtccttaaaaatggagaaacctattcttgattaaagtgacagctctatttagtaggcatggatttaagattcttaaccttgtaaaagtaattcgcatttccttcctcttccatatgttatacattatgcttcaaattaaccctattttccattttagatttcattattcaaaaatgccaataatatcagtgggtgaagaaacacttaaaacatttttatccaaatattgaccttgctttggacaacatccatgtaataagtagtgagattttttccttttaatgtcaccaatatgtttatgattaaaggtcagtctgtggcaacagtttgcatctctgcgctataattacttgttctgctaaaaaataaaaaaataaaataaaataaaatcctgacttatgacctgaccagacaattctttgcatctccttttatcagatttctgctggatgaggaatgacctaggcaagagtatttaatttatagtcaaaatccacatgtgtgccctgcctcctgcaaagcattgggacaccatagggtagggagagaagtcctttgctatggaacaactgctccaaaagtaacctaaagtgcagaactagcgatggggcggggtgcatttattttgacctaaactgggattctggtctttgaagcccgcgagtgggctcatttcctagagggagaaaaggggaagcgacaagaaagactccacccaggcgatcccaggcaggcgccttgtgtataaatccagggagagaggggcaccaggtggccaatggatgagaagtcacccggctgggtacgcaggtggccaggggatggcagatgggccaaagcggggcggaggcggccctgggcggatcagggggtgggtggctgagggatatgtgtgcggaggaggtgggctgtcctcccacccaccggtctcccgaccagcgagcaagctttggacaaggccaaagagcattgggctgctggaagctggggcatcggcgcagccttcggtaaggggctctggtcgaccccactccctgggcttgcatctgtccactgatcagtgggcaggtcctgcctctgcttcctcccagccacccccgccgcgccatcaattcctcagggaaccggctcctctctcagtgcccgggccaaggcgcccggggtagcgggcgggcgagggtctgcaggggcccggccacttacccgagtgcaggccgcccgcttcggggccgctgtccggggcggcggcgctgggcggcgcgtccgagtcggtgtaggtgagccaggtggattctgtctcccgggtccagctctcgtagtagcggggctcgatggcatccgcccggctcccgccgcagcccatcctcctgcgccgcgggagcgcccagcggctgctcggctgtcggctctggcggcggctcagccccggaggcgcagccccggcccgcaaggaggcggcggcggcgacatcgcgtccccgctcccgcccgcgctgcagccgcgcggagctcctgcggtgcccgccgcccctagtccgggccctctcccagcccgtccctcctctccgcctccaaggccctccctcccctccggtccccaccgcccagtcctccctcccagcgccctggccgccccaaggcccccgctcgcccgccccctccctcagggctccgtgacggcccgggagcaggagcagcggccccgcagccggaggagggctggggctcccgaggcgctcggacccgtctggccggcattaccgttcccagtctctggcccatctatccatccatccatccatccatccatccatccgctcacccgctcattcattcatccatccatccatccttccttccttctttccatccatcctggaaagaactgaaactcttatcacgggaccccaggctttctggccacctgttacaaaagcaatggaactgggagcaaccccgcaaaactggtcagggagtattgccactaagacttaaggaacagtcagagcctatgcctgtcgtatctgatttggggaggcaggagtagggctatgatttttaagagagttaggctaggcagtgtcacttacaccccttccagctgtggtacttcatgatcctctgaactttaaactcgagaaagcaatagatcacctggaaccacgcagcatcctgaaccccctctctgggcaaggcttggaggcatggccggtcccttcaagcccagggtggccttgacattcccgggatccagttgtcagcctttcttttctcggtgcaccctcaggtccatgcgggttcagacctagagctcagacttgcgtaggccaatgaatttacctgttccaagaatccagaacaggtggtgaaagatgaaaatcttcttagccttcaagaggggggtaggaaagggaagggtttggaagaataactcttcaatgaccaagctctgctagaatatggtattaagtatcatattcattcattcattcattcaatgtatatttactaaattcctattgtggcaaaagactgttctagtagacataatacatatataatatattttgtatattatccattgtatgtagactatagggtgtgatgtttaatatagcatgtaaagcatagagaatatagtactcattatatcctatataatttatagaatgtacgagagtacattgtctataacatttagcacgtagcatccaataggtagggcaagttcagagcattgcctggcacagagtaggccctcagtaaatgtccagtgaattaataatgaagtatctttttatagtaatttgattcacttaaattattgtaatttgggctaaagatgatccagttgagggtagagctgtcagacattcctctggcaggcactcaccagaatccataatgtggaagggagcaaagattcatggaactgtggccagggtctcctcctcctcatgctgagcgcagcacccgttcgcaccccaggactcaggctggcctcctctgcaggctttgcttctccttttgagatggccttgacaggactcttcaaccttgttttaggtgtaaggtggagggagtgcagttatccgggaagtggtggcttccctagtcctttggaattcagatgccctgtgcctcttttccttcccccctgaatattttgatttcagaagaaccagctttcagggagagagaatacttaacatctctagcagagcctgtgctttcctcagttctacggcacagtgctcctttcataaccagccacttcgtgatgtcaccacccaaagagcagacagaccagaaagagtgtctgagttagaccgtcctgggggagttctagaaaacgaaagaaactgaaagagctagagcttggtgagcacaggaaacagagtaaacgtgaggtgaagtggaggggtatcctggggccaaatagaaacccacatgcccatatgtctaaattgtaaaagctataaaccaagtgagcaagtttaattgaaacatgggctgtcctcataccttgacaagttatcttcataaaaacttaaaaggccaggttctaa

SEQ ID NO: 587265 - DNA, 4001 bp, Homo sapiens
acaccatattttgtttatcgatgcatcagtcgttatgtccttacaacattcctgtattcgaataaagaaccagggctccaagaggttcactcactttataactcaaataataaaatgacatttggggccgagcgcagtggctcacgcctgtaatcccaacacttcgggaggccgaggggcaggggaaagggggatcacttgaggtcaggagttcaagaccatcctggccaacatggcgaaaccccgtctgtactaaaaatacaaaaattagccgggtgtgatggccggcgcctgtaatcctagctactcgagaggctgaggcaggagaatcgcttaaaccgggaggcggaggttgcagtgagccgagatggcaccactgcactccagcctgggcaacagagcgagactccaactcaaaaaaaaaaaaaacaaaaaaaacgacatttctactttttggcgattatgaataatgatgctatgaacatgggcggacaagctttatgtgaacatacgttatcagttttcttgggtatatagccaggagtgggcttgctgggtcatagactaattctaatgcttaatgttttgaggaactaccaaactattttccaccattttacatccccaccagcaatgtacgagaatttcactattacattttcaacaaatgaggataattcttgaacgaacagagaggtatgctgccaccgcagaacgacaacccactacccagaagactgtattaacaaagcagaagtatatgtccggcaggaaaacggagaataaaatgttgcaggtccaagtgtattaggcaagtgagttaacctcgcagagccccggttccttattcgaaaacaaaaaaaagggccgctgtaatgccattttaccttgcagtcgccgtgaaaattaaatcagtcaatccgcgtaaaggtactttacaacactgattattcatgattcgatctcaggcaaggcattaggggcaaacagctaaatgcccagatccctcctcctcgcaaaggttccttcccctcgggagggtccctgagcggcatcgggggctgcagccacttcccttccccgggagagccggcctgccagccacgcaggataaattgctagagctggagcagtagatccgtgccacccctacccagcaccgctcccaggagagagatctgcagcctgctgctaagcttagtaagtccgcgcaggatctttcttttttaaatggtaataaacatattttttggggtcgaagcagaaaaggaggggcaaagggaacacaagcatgtccccccaacctctgatcttagtctcggtctctccaacaccccccgcaacacaccctcctccacataaggaaaacaagtatgaaacccgatcctttacgaaccccagccccaagggccctcacctccccgcaaggacagagggtgcaaagcttacctggtggcttcctccggctcgaccaggctctggccaggcgcctcccgagggatagtagccatcgcctcctccgccttctcccagccaggtggtctccgccgggccgcccccgcgcacccgccaggaaatgggaggctggggaggttcagggcgaagaggatataagggtggaggtgggtgtaccggcacatctccacccccaggcccgtagtagcggccgtaggacggaccgtcactggggccgtagcccgagcgcctcagggccgacatgggatccgctgccctgaagcgcttcccgccccgctccccacggccgacccatcgcgcaggcgcccgcgggcgattgcgaatggagagcagcgaagggggtcggacgacgccagccaatcccaggcccgggcccgccccttctgctgccgaaccccgaaagctgagggacggaggtcagtgactctggggtctcgggaacccggagacgaaggaagacaccgtgttccttaagagggagtatacgtttcctcgccatttatccaatggagtttcctcttacctacttaacaggaacagggaaagggtgtcccccaacggtacggctgccccgcctcttcctgggggcccacacgtgttacaggaagtgggtaagggtaatatggaggagcttccggcagcccccggcggctgaaagccggggcagaagtgctggtctcggtcgggattccgggcttggtcccaccgaggcggcgactgcggtaggagggaagaggttttggacgcgctggcctcccgccgctgtgcattgcagcattatttcagttcaaaatgaactatatgcctggcaccgccagcctcatcgaggacattgacagtgagtagtttatctcctcccggtggagcccggggttagacccttcctcccgggcgggcgcctcttccgaagaagcttgtagaatgagtcccgggcggggccggtgtgttctgagctcaatccgggcgttccgcgtcgatgtcctccacagctgcggtacacaccgcttgcccacccagtagcctgctgctacttctgcccctcgcagcctccgccagccctctagctggtgagccccaagcgatggaactcattcttgcttccgtggatcgcggcagcagaggcccgaacacgaaagaagcccggggagggggggggcttctcccccgtccactcctgcctgcagtatttcgaagtatcagcgtgttaccggtggatggatcggaatacctagagagaggattcattaaaaagcgaaaatattaagacagcggcagttggacttaattggcagtaaatgtaggcgctctacggtgtggccatttgctagcttattttactgtgagggtcattagcaccttcaggttattgtagtagagaccactgttagacatggtattgacttttctggaaagaccaaatcacttgcaaccttttttttttttttaagacaatttacttttgcttttactaagaagacctcccttattcctggtttttgtccggaagaggagctcagtcctatacaaaagcgaaaagaaccgtctgcagttgttctggctttccttttttctaaattccgtctgtgcattattcctcaagcaacattttttattgttttaatcatgtgatctttctcattaacttgtttcaagatgatttacacatagttttaaataagttgcaatcgtctcagttactctgtgaatacgcaatttagaatctatggttaaaatttcattttacgggcctggcgcggtggctcacgcctgtaatcccagcactttggggggccgaggcgggcagatcgcctgaggtcgggagttcaagaccagcctagccaacatggtgaaaccccgttcctacaattagctgggcactatggcggtgcctgtaatcccagctactcgggaggctgaggcgggagaatcgcttgaacccgggaggagaaggttgcagtgagccgagatcgcaccattgcactccagcctgagcgacagagcaagactccgtctcaaaaaaaaaaaaaaaatcattttatggttgacagatcttttttcttttcttttctttttttttttttttttttgagacagagtcttgctctgtcgcccaggctgtagtgtgcagtggcgcgatctcgactcactggaacctccacctcccgggtttaaacaattcttgtgcctcagcctcccaagtaactgggattacaggcgcctgccagcacgcccagctaatttttgcattttttggtagagacgaggtttcgccatgctgggcagtctggtctccaactcctgacctcaggtgatccacccacctcggcctcccagagtactgggattacaggcgtgagccaccgcctccggccgacagatcatttttttaaacacaaattacttattgtgctatgtaagggaaatgtagtgtaattggactaaatatatattaacatctatatgaacctgttacgtgtaacaggatgttttagttgctcgaggatgctcttttgccctcatctctc

SEQ ID NO: 587266 - DNA, 4001 bp, Homo sapiens
acccatctcctgcactgaggcccacggggcctccacagggctctaccccgaggacgctgctcctgcgcacgctcctgtctcatgagcaggaaaagccagtgtcccagaggctggcagccccacaggactggcccctgcccctctgtgctctccgggcacaaagccacccaggactcgccacttgccgttctctcttcctggcatgaggttcccccacctctcgcagagctttgaacaaggtccctcgtcctcgcagcctccctgacctccaggtacaatggcaaccctgccatgaggggccagccctgcccggttctagtgcaaggctctcattgctgcctgaggcctggctgctcgtgtcttcgtgcttagggccttcctctctcccttacgcagctgcctgagagcagggctctggagggttttcactgctgcagccgtggccccagcacctagagcgtgtggcagaggtgattcatccaccgagagcatactcaacccgaaacctcatctgaccacgtctccacagagcccacctgccgacccttccacgcagcccgagtccccaggaccatcatccagccccagaggctcctgcagtccccagccccaggccgctgcagcctctggcccattaaagttgtcctgccggagagaaagggcgggccctctcccagccaggaggatgaccctttcccatcctggagggaattaggccttcaatgctcaaccagcacccgccgtgtgcccgggctggccctgcacacctgcagtgaccttcactcttactctgtgcacgggtggatggagcaggcgcctgggagggtgccagggtacacactctccagacagcggtgctagcagggcagccctgcggaagaagaccccggtccacctcccctacccacccacctccgcctgcccgcccacctcctctgtccgcccacttcccccatccgcccgcctcccctgtctgcccgcctcccctgtctgcccacctcccctgtccgaaggtttccccgccagtcactcacctgtggcgccgtgcccgccccggtcctgggtcaggctggtgaggcagttttcagggccaccagccaccgcatctctcaagcagacatccccgcggggggccaggggtcccgcggcagggccgcccgcctcgccgcccaggcaggcgcagggggtctgcatgatcccgcaggggtgcgagctgcgactaccggccagacacgcgtccagccagcggcacagcatctggcaggcggcacggctggggttgcggttccccaccaccaggtactccacggagaagtcgtcggtggggcccggcggcccggcccggggccggagcccgtcgtgctggggcggctgctggcgccgcatctgcaggaactgcttgctggcctgcaggaaggccaggggtgcggaggggtcgcagagccgcagcacctcgtcgaagctctccacgcccaggtaggtgcgcgtggactcgaggaaggagtcgaactggtaggtgcgcacgcggccggggccgctgcagggcacgggcgccttggccaccttcatgtagagagtgtagcgccgcgggtccgggttgcgtagcgtccaggagcagcgcgaggcgttggccgggaacacggcggccgcggagaagtagccgaagaactttccctgcaccagcgtggcgcacggctcgggcccgggccccgcgtctgctccggcggccgcccgcgcgcggcgtcccagcagcagcagcagcagtagcagcggggcgaggatccagacggggcccggggcggcggcctggcccctcatcctagctcgcggggccgccggggttccgcgggctgggcaggcaggcgcggaccaggtcttgacatgccagggtccggcggcgggcagggccggcccggtgggggcagggaggcggggcaagggtgggatgggagagggccccgcttcaggtgacagagagggcagcaacggcttctaaagtccagggccctggtgccagcctgtggccaccagcagcagctggaagagaaagagcagagggtcagagtgagcacttggggagacgtgggctctgggcatgggggtgggctctctcagaggaggcagcttagcctgctaccaacgagggcaggaggactttgggccgcagacacaggccctggcaccctcccaggcacctgctccgtccacctgtctgtctgccactcaccaatgtgaccacctgcaggggcagcggcccagcttggggaacaaagtacctccgcctccacccaagcctgagcagggaggggctggcagtccacctggggcttttggtggtacccctttgcccacgcagcctggcgtggctcccgggggccctggcctgcctgcccactcgctcaccacgctctgcgtggctgcccctctgtgagtggagggtgtagctctctcaggctctgtctttcctgctgaccttggtccctcctctctaaccttcctccttcccaggaagattctgcaaaccccgtgggaagggaagtgggcccggagcacaggagaaaggttactcgggccattccccagcctcccgtctggcccccgagccctttctaaaggcttggagagcaggaagggggtgcagagcctcaatagcaatgactggatctttggggtgaggggagttcagatttggtgcccccccaagactgccctctgcagcctccagcagcctgtgcccagctggtgctcctgccaggaagctctctttcggccctcccacgtgtgccctcgtgccctaaagctacaggcacagggcctggggagggatggaggggggatggagccaccaggagccacctcacctctgcccttcctctgcaaggctagcattacttcctatcattcatgatgggaaaactgagacacagagagaatccataatttacccgtcacagtgagtgggtcggagaacccatacgtgagccccaggctgaccctaaatttgtgccaccaggagacacctcccagctccaggagagggcccaggttgagtgactgcccactcacagcgccacgggtgagcagaggtacagtgaaggccctggatccggggctgccctgggcccagcgggcatccacctcgctgtggaccttggcaagttccttctgcctacagacctcagtctcctcaccacccccaaggcctctggccaggccgtccatcccacccagcagttgagcctgtgcaggagggaggggagctgtagccagtccccctcccccaggccacccggcctcctggtggggatgcctccgctctgctgaccgcacaaatgccggtcgcccgcccacgggacttgccgcttcctgctgcccaggcccagctggctggcaagacaaggtcggtcactgctctgcagtcccctcctggcgtccttcctgcacagccttgtaggcagagcagggagctgggcccaggcagcctcgaggtctggccccagcctgagcagaggctctgagcccatgggagccaggaggccggaggctggacttgggctgtgctcctgactgcacagtggcctcggacacatctctcaccacaaagcctcggtttctccatctgtaaagtgggatgggcaccccactgctctcaacaagagattaagagctgggtgggggaattttagccagggggctgcaggaagtgcttccagcagggggaggaagctggctggggcttctggatctgggaacagacatggcccaacctggccctctgtggtctcattcctggcaaacattccgggctcccaagagaaaatttttttagaaagggacaaacctacaaaacaatcttcccatcctggcgcattcgtggcagacctgggaagatgctgccatgtcccctgcctcctggaagccctcctccagtcctgcccccagacacgcttggctgggtgggcttggacaaggcatggaaaagccgggctgtcctgggcgcc

SEQ ID NO: 587267 - DNA, 4001 bp, Homo sapiens
ccacttcctcgcggtctaggctgccaccaaagttgccacttttctgagaaaaaaaagacatccatactccatcccaactccacctccctcctccctccctccccaccccaaagaccgagattctggggatgtcaaggctaaaagtcccgtttgtctctgatacttctcctcagttcttgcctctgctttgtttgctctgcaagtgtttcacaactacgagaggaccaaaataaagggggtggggagcagcttttcgctttcctctagattttgggtcggtcttgtgtttttcgggggtgtgtttaaggcttctccgtgcactgtttgcagaggctggaggagacgctgttaaacagggcgcacttctccgggcaggaggcagccgggggcagtccggcgctgaacgggtagccggctgcctgctcgtaggcgccgagcgccgggtgcagggcagcagctgctgccgctgcagccgccgagctgggcagggaggcagccgagatggcctggccctggttgaggtaggcgactaggcgccgcatctcctccagggcctgcgcctgcatgaggatgtagttcttggcgagcagcagcgtggcgatcttggagagctttcgcaccgaggggctgtgcgcgtaggggatcaccgcgcgcagctcgtccagcgcgtcgttcaggtcgtgcatccgccggcgctctcgggcattgatgttaagccgcagcgccttttgctctttggatttcttgctgctgctgctgctgctgctgctgctgccgccgctgccgctaccgctaccgccaccgccgccactgctaccgctgctgctacccccgccgccgccgccgcccaggccccccggggggacgctggcgccgccgtggaggtgggcattggagcagccctcggctgccttcgcgccaccacctcccgctcccggggaggcccgcgggtcggctactccggcccgcagcacgagctcgcagcgaccgtcgctgtcgtcgtcggggctctgctcgccgccgctgctctcggccaccgagccccggctcgcgctttcgccgtacttgaggcaaagggcggccccggccggcaggctgcttaggctagggtcgcccccaacgccggctgaacctactagcagcccggggacacccaccccgccgccgccgccgccgccacttcccgcgctgccgccgccgcctcctccaggcggcggcaacagcagccctgccccctcggggtcagccggctcgaagcagcccaggggcgacgaggaggaggacgccgggcgttcccgaggcggcggcgccagggacaggtccatgcccgggggcgtggagcggaaagccgcttccaagcgcttggaggtggaggcgctcaggctcttgtgcaggaagaggtcgtcctcgccggcggccgctgcaccgaggtgcatcccgcgctccatggtcccgcgccggcgcgcagcccgggccgccgcgcccgctgccgccgccgccgcctcggccccggagtcaggcggccccacagacgcgcgcgagctgggctccggagctggtgcgcgcgtcggtcctggtgctgccgggagccctctccccttctttctttttctttttcgccttcccccgcgctcgccgcctcctcttcttcttcttcttcgtctccagccgatggtgctggctgctggggctcaccatgggccgcggccccgcatggtgggagggtgggcgcggagggagtggagccgccgccgccgccgctctgagcccagccccgcgcctcctctccgcaccgtttatcttgcttggattcaccttcaagagatttccggacccatcaaacagccgccgccacagacgggggagtcttttacatcattatctctgagtaggttattatgaagaagactcgcctgttgggacagcgctttctacccaatcaggttaacgttttaattaataggattaaaacggtaacaaacaatcgcaggcgctatctggccgcaagtctgaatagtttcatttcccaggtctgaagacaggcagcagctagagctttataaaaggcgcctgctccattattctgcctgccatctgtatacacagcttagcgcatatgtttgcaaggcgctgggtcctgttagtaacccaacaactgcctttagcttgacatgtgtggcgactttcactcatcaatgagcacactaaaagccctacttagagccgaggatgttctttgctccttcagcaaattgtagatcggcggcgaagcctgggagtcctgtggaaagcagacgcccccacccaccgcaccccaccccccactgcccttccctcgccactgctgtctcagcttgtgctaaattacccttccgggcgagaattatactccacccctgttcgtaggatgactggtctggatttggggatgggactttccgagagaaggtggtgtcccagctggcttgcccaaaattcactctaggttttcagctggtcagagagcaaagcagtcgtccccccgaacactctgcctcgtttccacacccgccactgcccatttcctacccagattggaaaaaaagaaagaaaaaagcaaaatgaagagcaagtgatcatgcagcccatttttttttaaggtggggtggcagtgattttgcagtggtctccaaataactgttacagtgatggtaattgtgaagtacacaatttcctaaacaggaagaaaacaaacaaacaaaccggtttctcaaactttccttaagatgaaaatctgattgcttcaaaagagtcaacttcaccaggagtcaaatccgctcccacacgaagtgaggcatttatgcatatttatttacccggaagccatttaaggacatctggatcagcctcggttgttcttggagggttcgggaagggagaatgtaaaaacaagtgctcctctccggatgggcactggtacacgcggtcatctcactcctgagttcggtctctgggtacacatggtatttagcagctggttttcatccttatgacataagtaaaaacaatatttcccaacaccttccaataactctttcttatatggcagaagtactgaagactatgcaatttttggtttctctggtttcattaaaaaccttttaattgtggctttcggagttggccccaggtgttggactcttttcattacattttgctctaatgtgatgaaattctaattctctccttaccatatggttaaatttccccactgagaattagttgaaaaaggagaaataatctattaatctctgtaatagattcacaaatgaggttcgccacagaacctgtttttgaatggtaatatcagaacagttgggcaccttatttcataaaggaagggtgagggcgacacaaaaatgtctgtattttcacctggaaaggatgaaaggggctcagcagtatcttccataataattccctgagatccagtcttccggggacagaaatactacgtagacgtcggttacctacgctcctttggatgtcctggaacctaaagactgagaaagatcaggcggggctacgggaggctcttgtgcctgggaccgagaccgggggttctgcaggcttgagcggtcccacttgtctcgtctgggaccccgaggctgtttacatgcagggcagcccctcgctcaccgcacccctcccaccgtccctcccccggcgttcgcagctgttaacctctccctttagaaagctaaagacacgctagtgttattgtttttcaattagcagctttgttttcactgggatcataaacaaaggttctctctaaacataggtgggtcgtgtatgcatgacactaacttatcaaagtccttgggtcactttcgggagggcggaggctggcccggtcgtggctctgggcaggatggggacacatctcacaatgtctgacttagttctccagccagcttgccctttttgtgggctgccaccttctgcggggcgccaggatt

SEQ ID NO: 587268 - DNA, 4001 bp, Homo sapiens
ctggctgtgactctcagtccaaggagataccaagatgtgcatgtactggtaaattaaagctactagatgaaaatctcagctcttgttagacagttgtcaatctcaattctctccaacctgacaggataacctttaaggaatgggctactattttttcagaagggaaactttctgtgagacaggtggaaacaacctgcttcggatcacccagagaatcatttacctttattagtttctgctgtgctcttctcccaacttgtgaaggaaagattggttcagtaaaggccaatctaggcaatataaagcatctgtactgcctcattttcactttgaaaaattaggtaagaacactccaaagattcaagacgcagcagccaaaaggatatctatattgcaagactggggggcccagaatgacactgaaaggacgtaattcctctgggaaagggaactgaagaattgccgctttgcccaccactaactaggttataacaagacagggaaggtagctttttaaggctccagccccttattggcctcctggagcaaatggtggagggaaaagcagaagctcctgccggggcttattaggacattgcttcaggctttcctcccgtgcttgcggtgattgtctgacatttgtccatcaatcttggtctaagaaacaggtgggggaggggacagatggttcgcattttactttagagaagtatccctgacactgactgatatcagctgcttgcgttctccactgatggccaaaattaagcttcaaaagccttcctgaaggacattctgttatcttaattcattcataactggttatcatgcgctttgcataaacaaacacactagcctctgaggacagagtggcaaatatgttccctatgtccatgggctgattaatcttgtacatctctggggctcaatttattcacacactatagttgaatcccctgaggtccagggttgtggctatataggtccttgggcctgacggtaaggtaaggtgctgcatatgagtattctctaacctctaagaaagccccaggaaggcaggcaagtcacaattctctcctgtgaacataaataatcgagagcaacaaatggggattgccttttgggcaaactgagtcttacaaaataaatacaccattatgaagtgtctactatgacccaagtatcacatcatactgcagcaactggaattgtgactctattactctaagactccctggcttcttttctcatggcatgatagttcccataagtttaaacttaaccatgcctatttagagggcaggcagtgagtaatagctctggaatgattaaaaccagtccaatcccacagtggaagggtgtgtgcggagtgtaattctggcccctttaaaaagagaagcaagttttccttgtcttttgaagcctgctaagtcgtgcaaagaggatagttacccagaagggagtgggttttgattagtgaactgggtccaggctgccacagcgagggccacagctctggagggactggcgcggggcagagatgcccacaggagagaaagacgacactgactccacctcaatgggtgtttaaaaaaggagggaacaaggaagtccctcacttcaaggagctaggaggacgcgagtccggcaaaacgggtcagacgcggagtcccaggctaagaggatcatccgccactctccccgggagtcctgctgagagactgcgactccggaaagcaccgagggaacgaccctagggcaggggctgtcgggccttgctctggggcggaggggtcgcgcgggaccggagggagccgggacgcggcactgacacagggccaggggcctcgcgggtccgcgggtccagcagctcccgccgcctgggcctcactcaccagctcatggtcccgaacctgcgtctgccgccggggtcctcagccacaactcgtttctctagggtcacttccggattcaaccagtctccaggaagtgacgtaagcccgcctctctgcccggaagaggcggttgggaggcggagcccggcgcgttaacccttctgctgctgcgtgctcgccgcggagtttcccttgccggcgactctctggctctggccaagcgcttagacacacaggctgcaacgggggatgaggggaacctctgggggcgttttctgccttcaacactgactcctaaagatctcttcacctgaccatgcagggcccttagccgggctgtcccctctgtcaagtggtttctaatccagagacagtggcagcaattgtctgtgggagaagaagccatttgggatggagaaagtggaaaacttacattctctgaatgctctttcctatcttttacagtttgtacaccacacatgcattacctgttacaaacaaacggacgtttcccttccaagatggcacagggctctgaatatcaatagataggtgcttttcaggttggaatgtttcctagagttattcaacacaataagacgcagagtatgagttgttccctgcctttcagcccttccctttggtctcctctacaggactcaaatgatgtaaattgccccattcgttctattccttcatttaactaatactagttgcactaatattagtgtcaggtaccgagccaaccttaggatacagctatctcagagaagtatctgccctgctcttgttccttcccagagctactttcctggagggagagacaagcaggcaattataatcatgctataggataggatagaatgaggtgtggtggcagcctagaaggggaccctgaagtagcacatggggttttggggaaggcttccaggaggagccagtgtgtaagccaagccctgaaggcagaatcggggctagccaggtgaatctgagatgaggggtgacgaggctccaggcagagggaacttaccatggctaagacacagacaggaccaagcaagcagctgacttgcctcgggtctcccaaagtcagaattcagggccttagtggctcacaagttgcctgggattctgggccgacttggtttcctcaccgctaagtacctccctgccttggaagagagacaagaaggcagtgaggcccgtgcaggtgctgctgggcccccagtgaccttctctctaggaattctccttcctcagatggaccgggattgtttcagggactgcttagggggttgctaatcaatgacctagcgggaaaaatatgaccaatgacctagagcagaagtagtgtatgatttgttttgacctcctagggtggagtagagggcttgagcaggagaggtaggagggtgggccacaggatgcagtctctcatttgtgttttctgtttccattcttgagagtccatagtttgactcaattgacgtttccaatggaggttggatccccaagcacatcatgcagatcagcttcattaccatgttgttcctcaggaaacaggccaaaatgagcacaagagcagccttgaagagtaaagaggaagagcagaagtcaccaaagggtagcctgggcagagagtgtgggtaaagggaaagagagagtccttgctgctttgcagagagtgtgacggatggaagggctgttgtgggtttaggagcctcctggcagttagcacctgtgaatagttttcccacctgcttcctcccttccccatgttctgcctccctcagttatgccccacagggataaatatttccaaacgttttagcctaggtaactgctatatcctagtagaagtctgtttcagggctggagggcagcagacacatcctagaggactagaatggataagttctggactacaagtctggaggagtctgcggctctatttccagttcaacctttgacactataactgacctcagataagtcacatcccctttgtggccttagtcccctcatctataagatggagtgggtagatcacatcccaaagtatccaacattgcaaggttccaagtcagctgtcttgttgactctaga

SEQ ID NO: 587269 - DNA, 4001 bp, Homo sapiens
ctcaggatttggctactcctgctctgaggaagaatgagtctaattttttttaactctttattttgcagtaattttagatttggagaaaaattacaagggatagcacagagaatttccatatttccttcaccaggttcttctaatgtgaacaccttacgtaaccatggtacatttgccagaactaagcagtaattgttaccacaatattagcgagaccccaggtcttgttaaaatttcacctatttttccactaatgacctttgcggtgttgctttaggatccaatacaggatgcgaattctgggtttgggtgtcctgaccatcatgtctcctctgatctgtgacgctttgcctgtctttctttgtttttcatgaccttgacatttttgaaggtgaaatatgttgtggaatcttccccagtttggatttgtctgatgttttctcatgatttgactggggttatgagttggtgggaagaaccgcactgtcgtggcagttcacaatagcagcccagcttattcccggtgatgctaagcttggtcccttggtgaagctggcatctgcaggtttctcctctacagagctactatttctccctttccatactcttagtccaaacctcactcaaggtgaggggaattaagtcccactctcccgagggaggaggatatgcacatatcacagcaatttcttctgttactgcaaacgcacaattccttagttccttggtaatgtgggtggatgagggtgaacttcatccacccgcattaccagataaatggaaacgttgtcaaaaccttacaatttacacaaatcctttcaaaatatgtgatcaactatgctttccttttcacagttggtgtttcctggtgaaatagatctcttaaacaagaagatcatcattacatctattcagttaccccattcctgaatgcctgaaaaatggaacaacttcattcagaaacaaacaaataaaacgaaagcaacagtcatttgccttgagccagatgctccccgcctgtgaccactaacctctgtcagctctgcacagtcaatatcacctcctatcaagaggccgagtgactcgccgggagcgcagcagtggcctgtgtgtgcccgctcaaccccctctctacatcccacgtcccttctctcctctgtggcacattcactgccttttccaaaaagcagaatctaccctggatggatgaccttttataaattaaaaattctcaaaactggaaatgcacaaaccatggagcaatctattcatagctgaggcagcgatccattcatgcctcttcctccgtctgtggcacccacagcaatgtccttgcttgcttgccccactacaggccttacagcaccatttgcacaatttaaaggaagacgataaagaacccggaagacgcagggcctcaccttggcaatgcttcagtggtgtttcaccatagctcttcagatcctgacacccttacagtggagcaggctcctagcgacaacgagcaacttccaacaccatcctaaagcaaaagccagtcccagatgaattcttctcatctcaatcagttttcatggcttgtggctttctgccggcagcagacagaggtggcagcacccccggtctgcgatcagagcctccccagtccccagtgagcaagtgcaacaggggccccgccctccagccgagcccttctgaagctcctgtgggctccctgggtttgggggtatccctctgctccaggaaaactcgtgaggaaggaccatgagcagctgccctgtccctggccctgggcaacgtgggtcacaatgcccttctgtcaccagaaagttttctcctggggttttggtttaacagcacggctggtattttttctgcaccaagtccggcagagttagcaaacctccatgctgactctacaaggtaatttgccctgccgtgtggacaaacgctgcagatctcatggagagggcttgggctctgccatgtgccatctgtgtgcaccagggcagccgttctttcagcctcactggttttgctttgtctttaaatgatgctaataatagctagctcacaggatactatcagcattaaatggtagaatgggtatgaatggtgggcatagaattggtgtttggtaaaagctaatttcccatgtgttttacagtaccctagccagtagttagttgacttggatctcagagcctcttcaatggtggaaatttgcttggctatgaaaactcagaggagtagagaacaagaataatggaggtaacgggagaaggatcccaacatctagagtggtgagtggtgtctggagtggtgggtggcatcctgtacacagcagtcaaaggaccaatgggaccaagaaggcttctgtgatgacgtcagagtcttgctggtccagccagacacagtgagccactggtcagctggttcctttccactagtgtcttgatattggcttataagaggaagtcactcggtgggctctctcttctcccttcatagtcttggatccttgagagtgggtgtgggaggcagacagggtagcttctaccccatggtccagaatgtcagctttctcaaggagttcatttccttggattggactgagacaatactgagctatgagttgcaggtttgacaggtgttcatgtcaatagacgcagcaacgcagagttctggggttttaagacactatggaaataatctgtttcacttccccaaggggttttgtgagaataaatggattcatgcataaaaagtatctattacagtatttagcacataataaactgcaaatacctggaagctgatgtgaatgtggctaattgctttaaatcccaaagctgatcttctccacgtggtagcagagggctcacaacaatgtccagaaccctgggcctgctcagtccatggcagctcctgttaatttactcttacattcacttcctgatacctactacatggatccaaacatgaaacatgagttccaaactctgcgagcttctgatttaaaaagtgactgatttgagatgaggtaacttagtcttcctatttcaattcaattaatgcagcactgtttttctgaacacctgctctgtgctaagcacctgctggaggctggggataccaacgcagctacactccatcctcctctgagagtctcagcctaaggagcttggagaaggggcctgataagcagatcactgcagtggagcgtagtagatgtagccacagaggcctcaacggggcacagtgctagaccagaggcggaggcaataattctatcaggggtcactgggggaagctgccaaggagaaggctttgaacatgattcgtgactaagactcctacagactctcagagacagatccctaggctgagtcttttactgaaccaggatgttgtgacgctgcctgaaccgcctctaacattttttcaatagggcctaaatagctgacgtttggacaacttttatatacttggacttgagggtatagagaatgtagtggagagcaggaaacccagcatcctacaaagaaaatacatggtctgtctacccaaggttagagtgggaggggatgtgagagtttgcagggaggtgtgctggcccttatgtgatctgtgataagacatcacctttatgcccaccccaacagacagaggttggaaaataacaataccagacacacacacacacacacacacacacacacacacacacacacacacacgattccagcagccactcagaaagaaaacaaggaaatgactttgctcatgggttccagatgtctgagcagaagtgaaagttaatttcagccattttcaccctcacagtcacgggcccatgagaaaggcggaagagaggtggggaaaggaccccggggagaagatgggaacagtgacacttgttaggggaggctggggagccttttggtagaaaacctcaaagcggttttctcaaggcgggactgagactagaccctagctct

SEQ ID NO: 587270 - DNA, 4001 bp, Homo sapiens
cagtctgaggcacagaaaacagggagtagggagcccacatttatttagcgctgactgtgtgttaagcactattaagtgttttatgtatgttttcatatttaacccttaccaccaactctatgggaagatgcatgatcagttccattttacaggtgtgaaagtggcagttcagacatgatcattaccattctgaggtggtacagctataatgagtagcagggtcaggattgaaagctagatgtgcctgccttcaaagtccatgcgcagtccactctgccctgtacccactcccagcccccagcgagaaaaatgacagcaaatgtcctggtttacccgcagcccagcaggtgtagaggggtaagggctgagggatttgccctgatttcctccattggatggtctcttattcctgcctgtgggccaccctcccaggagagtccctgaacagggtctccagagccaggactagagcaacctgcccctccgcccctggtgccccacacaggcagtccagttctagcaactatgccacttcccctggctctggctatttggagatgagctgaagtcagagaggcaggaagtcaaggaaaagttctgatatcttgtccctgtgtgtccccaaacagcctgcccagggtcatccaatcaggcaaatggcccgagtgcctggccatctggtcactccaggggcaggacccttctgggctcagcaggagtgatggggttacatagagtcttcagagacaaagaacacacacacatacaggcaaacacacactccggggtcctgacctcagctaattagcctctggtgtctcgggggtgacagagctgatatacaatatctgggttctctttgtattttccctctttccaccccaacttggccttggcgggggtctctgggcacatagggacaaagttaagtcccccttctgggttggcttctctgactttgacagctgtctcctaagtcccagaaagcttcagctactggttaaactacgggatacccagagagcacgatctcagggaatccctggaaaaactttcttcttccacttgggctgggtggtggctgggggacctgctccttggagactcaggcctcccagatccaagccagacagatgtgcagccccagggcagcccagacaggctggaaaacacccagctcctggagcaggagagatgggggagaaggggaaagaacacacacacacacacacacacacacacacacacacacacacacgcacgcacaggagtttggccagaaaagtttcctacagaaggaaaagccgccttgcccgccggttttcccgggacgcaaggagacttcctctggaatcctctgggaagatgagaggcagcggcagcagcttccaccaacagcggcaaaacttcagtccgaaaagtcccccaaatccccctccctctccccctcgttcttttgttccccactgcattgccaaccaggcagctcccggcttcccacactggactgtcctcccccaaccccaagcccgaacccgcccgcgcctccccgcctggcccgtcgccggggggccggggggcgctcacccgccttgcaggggtctttgtagttgaggggctccgagtcgtcctcctccgccaggtcataggtgtagtcggccaagtccagcggccggccgggacgcgggagcagcagcagcccgagcagcagcggcaggcgggccacgccgggcatgctggcggggcggcggcgagggaagcggcgcactggaggccaggggagggcgtcctctcgcccgcttgcttgctcgatcgcgaccgcgaccgctcccgccctcgctccccgacctcttccccttccctctgctcgcctccctccttcctgtctcccgccccccgctcggtccgcggctccgcgctcgtcctcgggctccagccgtctccctctccctttccttctttttctctctttctttctctccctccctccctccctccgactcccccccccctttttagggaaatgagctcgctggagggcgggttttcgcccgagctctgcccccctcggggccgggacagtgctcggccgggccgggccgcgcgccagccggggcggggaaggcggagagccgcgcgcccggggagggggctcgggccgcccgggccgcgggccgcgggccgcgaggccggggctggagctcgggccccggggtgccgggagggctgtccctcctgaagtgccctctagcggcggcctcccccgcgggcgcgcggccgagcccccgccccgccgcgggacacgctgtcaggtcctcgcgccgcccctgccccgcgcccccgcctcgggtcggtctctccgcccgcgtctccctatctccccttcttggaccctcgctctctcgcgtctcgctctctgcgctctgtctctctcgctgtcttggtgtctctccctcctccggagacgccgctggagggcgccgaaagcccgtggatggctccctgcgagcccctctcccccgccgaggtggacccagtgccccagcgccctgggacagagggcgaatggcaaaccccactttgctctcccaaggcccttcccttcttggccggcccccgccagggcaggactgcgccctgcaggaagacagaagcagaccctttgcttttcaatcaggctgctttattctgttgtggcaggagttcccgggcccctgggcgccacctctgcccactcccatcctctccccaagctcccatttctccagggcttgtccctgcggtgtgggcagaagcagcttcttgcccgtctgcaaaagctgcaaaagaccctttgcccggggcgtttcctttcccgttggggcttccactgaccctgtgaagcaaaggaatgttgaggatggacagagagaatcaggggagtgggaagtaccggtctgtgagcttcccctcccccgagttgcctggatgaccccgcttcagtggacgccccagcgcctggtcagcgcgagcgctcctccacagcccgggcaggtggcccgagcgctcctccgctgctgatcaggggccctgggatcacacctgctcaccggaggcgtcctagatgtagtagagcggcacctcgccacacagggtgctcacggccatgcccaggaaggccgggtcccctccggagggtgctgagcctgcatctcgcccctctgcctggcccagcttagacgtaggcactgcgggcttggcctgcagagagcattccatctggaatgtaggaagtgagtttctatcccatgtgcagcccttattgtgggacttcaggtatatcaggcaatctctctgagcctcagttttctcatcagtaaagaggggctgtgctagagtcagaagccaccaggtagtgagtggactcagctgagcccagcagcttggcagtggggtgggaaggaaaggagtcgtgcaggggaataggagaggggcagtcagctggcagccaatgaggaacagtgctttacaggtgacaaatagccaccattcggacactcctcccagcagccctgggagggagacagcccactcttttcacccacacacacacacctggaagttgtggacttttctagtgagagcctcaagactggggatgctctctggagctatcttcatgatgtagcagcaggtgccaggggctggcttgtaggcgatcagcagctaggcacagaatgctggagatcattcgggggtccctgccctgctctctccctgacccaggtccttagccacctccctctaggttgggcacgggagtcatactagaatctggggctcaggcaaaaaaggtctggaggagagggagagatggatgtggatgaagtggcccagctgggtggctctagcagagccttgtcattggtcccagggtcaggaggtctgggcatacccacctgctggtagtcatacaccacgaggccagtggagccgatggagaaggtggcagtggtaaccag

SEQ ID NO: 587271 - DNA, 4001 bp, Homo sapiens
ggagtttgagaccagcctggccaacatggtgagagaccaacaaccccctctctactgaaaatacaaaaattagcctagcttggtgtcgggcgcctgtaatcccagctacatggcgaaacttcgtctctactaaaaatacaaaaattagctgggcgggtggcaggcacctgtagtcccagctactcgggaggctgaggcagaagaatcgcttgaacctgggaggcggaggttgtagacagagcgagactctacctcaaaaaaaaaaaaaaaaaaaaaaaaatgtcctcaaaagagcagtagacaggctgaacatgagaacctctgctttgctcccagccggttgtgaacttggacaaggccatttactctagacctgtttctctacaggcaaacaacaggaggcagttagctagctctgaagtttcttcccattctaaaatctaagacagtatgctaaacatgggcaaataacttaaaattgcataggaatatgtgatacaagtaacgtttaaagactcatacattcatcctaatttactgtgggaaataatataaccatcttacattctggaatatatgacacttaaaggttttgggaattaacccatcaaaacctggagcagcagcatccatcttaaaatctccaaactccatcgctacctggtgagggctgaaactctcttccctaaaataatcttcaggccacactggaagcacctccctcttacgaaagatactgcatgacctttaagcatccaagtggttttgaaaagacttcatctggccatatgctcactgctcccattacctctttcccaagagttgaattaaagaaaggttaggcaagaacccttccaagaaggctcccggttctcacgactaggaacaatctgaggacaagatgtctgggcagcggaatgttatgaaaagaccctggcctgggttgtctatcagcctcgtccgttaactttcaactgcccgagtgcgtttttaattccgtttctttaaatgcatggccccagactccctgacgtgtgcaatcttgggtggttcaggaggctgctctcagctttactgggcgcacaacccatcgctttaaaaaaaaaaaaatcacttgggcaacttcgagaaatctaataaaaaaataaaaaaggaaaaaggagaagcaaggcacagcctctcaccccacacgtgactgaagccaaccctagacgagcaaatgaattttcctgacaaacgtgtggcaacaaaggaatgctcgctggggggctcccgcgcccgccagacgctgcccgcccgcgagccccgcacacctgatccccgacacgtcccgcggcagccgcccgccccgccccgctcccgcgcgtccatcccccggcgtccccgccgcacgtccccatcccggcccacgtcccctccgcggcccgctccgcccacccggcctccccgccccccaggcccgcccccgccccgccccgcccggctccgctgctggggaccaccccccgcaccagggggatccgcgctacccgcgccgctcccggaccgcgagcccaaacggccccgggcccaagaccccaggaggcaacagagaggcccggagcaaggcaggcgcccctcctcttgacaggggacgggagctgtcagtcacctggacatcccatgcctgagccaatgagctgccttctcctcccgcctcccgcgccgcgccggtggcggcggccggggctgctcctcctcccccatccccttcacagagcctcggccccgcactcactgttgaggccggccggcgggggcagagactgctcattttcctcgcagttgttgttgttgttgtgcaggggcggcggcggctcgactaggtgggacgacattgtcggacagctggcaggactgcggcagcagcaggaccgtctccggcactcaggcagcaacacaacaagccgagtccgccgcccccttttctgcgcctgcgccgtccctcccctgcccctgacgtcagggcccgcccaggccacgtgatgacaacacaacaagcgaccggacggggcaggggcgctcccctgcgggccccggacgtggagacgctcgagtcaggctgacgcgcgcgccgggaacgaactcttgcgtgtgacttgggatgaccggatgggatgagtgatgccagtggcagtgggagagaggatgaggagaaacggaatgaggaagtgcgctcctgtgttcgcgcccgtgcctcctctcacacaggctccacagtgcttcacccagccctgcgcacgcatctgttttctacctcttaggactcacttctgcaataggtgtcttggggacacaaaggaatccccaaacccaggtgcctccacgtgtaaactccaaataaagctgctgaaacatcaacactccatacgggaaacaagggaaggccgcccccaaatttaattgttacagaatttttaaaatgtcgattacaaacacaccatcattctgaaaaaaagagaaagaagaaaggggaagaaagaaaaaagaaaaattcaggaaaacagagagaagaaagtactcacccaaatcccatcgactaatcgatttctgggacatgacgtgggaagccgtttatcctgtacgtggatgacattaaactatgttcctgagcacacctcctacttcacatctccatgtcttcgtccagtctccttggtctgatttatgagtgacatatgtttctcgcagtctctaacttgtcttttaatttgtttttttcactctgtagaagcttaaggttttcatgtaatcagatttatcattcttacatggcttggggagacagtcacaccaagattactaatctataattcccttataactttttctaattttcttataggcttaactttacatttagagctctaatccatctgaaatttattttccatatgctgtaaattatttaacttcaattcttcccaattttgtagcccattgacctaataatattaattttaagccatcctttctacactgatttgaaattgcacctttgtcactctctgaatgaccacaaaaatgtgagtctgtttcagggctatctgcaatacctctgttagataactattaaagtttctcttcctttgtctttttcagatgttaatggctagttactcttcagatgaacttaaaaatggacttgtccaagattgaccttgtgttggtaattattgaagctatgtaatacattaaagtattcctctaattttttaatatatttgaaaaagtccatgctaaaaggttttttttaaggattgatttgtcaaatccctttgcaaattcttttaagattttggtcagaaatgaactctattaatagattgagtgctgtttccggtcatacccggaagcaggagttcaagccgcagctggtagggattggcggctgctggccatctgagttttattaaaactgctcgccgcgaagccagtcttcagccagaatgtccagcagaaacaacaacaagctgcccagcaacctgactgcagttacagaatctgatgaagcgagacccaccaccctccatctaggagtttctacagcagtataatcactacacatccaatgtggagattttcaaattgcaaccatataaacccggtaaagaactagcagagctggtggtgtttatggcacagaacgtcctaaatatgtgcatctgaataataggagagaaagagagaaacttcagaagagcctttgctttgttatagattagttactgctacccagggtatctaagtaattttcctcaagtggtgaaagatcttctgtcctgtaatcatactgtattggatccagatcttcgaatgacattttgcaaagctttgatcttgctgagaaataagaatctcatcaatccatcaagcctgctagaactcttctttgaacttctctgttgccatgataagcttctgcaaaagacttcatacacatatatcgtgactgatatcaa

SEQ ID NO: 587272 - DNA, 4001 bp, Homo sapiens
gtcacaaacttccaccaaaagcatccacccaacctgagccttcctcatcttctacctccactgacaagacagcctcttgcctttgccatcgacattttaattcctagcacctcacagggaaggggcttttcaaggacaacctcctcctcttggagctcagctctcatcgcaaaactaacactgctctctaccacccactgacactccggaggccctgtggggtcaggctgggctggactccactgggtccctcagacagcctgcctgagccctctccacacctcaccctggcatccaaggccccagagccaagaggtcactagaaaaggggctgggggctggaagagaaatgggtccccaaagggcttttaccacctgaagcagacgcctcctcatttaaccagattgggaccaacgattgatcagtaaattgaaaggattggctgaagagtcacaggaatgatagagactctaaccgcaaccacgcaccaacccacccactcctctctctgagcaggaccacagctgcctctgagcagagccctgctggctgcgtgacaccggcacacacagtgttcgggtccttcactggccttaaagggtggaacaagaacttagactcttaggaagcagttgaaggccaggcacagtggctcactcctgtaatcccaacactttgggaggctgaggcgggtggatcacctgaggtcaggagttcaagaccagcctggccaacatggtgaaaccatctctactaaaaatacaaaaattagctggtggtggcgggcacctctaatcccagctactcaggaggctgagttagccaggaggtggaagctgcagtgagccaagactgcaccactgcactctagcctgggcaacagagccaggctctgtctcaaaaaaaaaaaaaagaaaaaagaaagaaaaggaaaagaaaagaaaaaggaagcagttgaatgcagaattctagattttactgttttcctaatagtttacaagtctcacttaaggtacgacctgcatgtattagctattgcataccgagtgttcacacaatgcctctctcacacagagtcatgatgtgtcttggtattcagtcggctacacaatcacaataactagtggaaatggcatccgtggcctgggcgcaaacaactggctcctgaggaccgtttagtccaagggtggaagtcgcagaacctggcgcctagagtggcctgcgggccattcagcccatgggagccaggatgagttgaattcgcttcacaaagcaatggggcagtttcaacaacccagcgcggccgcggccgagggggctgtgaggggctggctgtccatcccctccaccacccaatttgatgatccccacaaccaagacagggctgagctagcagagagcaacagtgagttctaatacagcaaatgcagcagacactgggttctattcaggttttcttattctcatgtctatcccatgagcataaaaacgcaattaactagcgtatacgtaggttaagcatttactgggagcgcaagccgagcccttttattggcaggatgcacaaatggaacggctggagaggctgctgcaaggggcgccccgtccccactccccgctcccccgtttctttgcttcccggacgccgtcctttaccccgcagtccgctctgcctgagaccccccgatagaggagctgcacccacgcccaagaccgattcactgggcgcgggcgcccaggtgacagaagccgggcccacccgccccagcgcggccacgtgcccgccgggccctctagggacgcgccccgccgccccgcatcgccacagtcacctccggctcgggctcaggctccagttcgggctcagaccgccgcttctccggccgcacgctcggcgccgccgtgcgccccgcaccccgcgaacccgccatgccccaccgcgcgccggccgccacccgcacagccgcttccgacagcgaccgggccgcgtgcgcaggaggacgcgccccgcccagcccggccccgattggcgggtggagggaagggggtgggaccaacacgcgcaggcgcgcggctgggccggggaccagggcggggtcggggcctgcgtgctcgcgccgggggtgacgcgggagggcggcagcggcggcggcgggagcgcgcccgttgcaagatggcggcggccatgctgggccccggggctgtgtgtgcgcagcgggcggcggcgcggcccggaaggctggcgcggcgacggcgttagcccggccctcggcccctctttgcggccgctccctccgcctattccctccttgctcgagatggatctgcccgtgggccccggcgcggcggggcccagcaacgtcccggccttcctgaccaagctgtggaccctcgtgagcgacccggacaccgacgcgctcatctgctggagcccggtgagggcagcgcgcgggcgcggggcccgtggggaccgggagggagcagggccgcggcggacggcgcgggagggctgcggggaggggccctgccgcacttcagcttacgcgcggtgagcctgccctgcccccgccagagaagggcggcgggtcccgagcctgctcagacccagagccttaagttgggaaagcggctacgagacccacactcggttcaacccctgccccagcgaagtttccctgggatggggagaatggggcgtctcttgtattgggcttctgctaactgttgggcggttgcggaagtgtccgcgcttagggcaagcacccggcttcgccagcggacgctatgccccagaggacatcggcgtccccaggggacagcctacggggtgctgggtcggcaactattaggagaaagtcaggacttggcacgtgaagtggagggcgttgctgtagtggaacaggaaaggcagtggaaacagtaagacgtcatgaagcttcaggttgatctcaagcccgtttccgaatcccaaatctgggtttcccaagaggagttttgtttttcattccttatggggcatctttattcgtgtttctgtcttcagttgcctggcagcaggcttgtttacatggtccgaccctgcaagaccggacagctccggtttgcagaagtaaatcagtgattgtctggagttggagatcagaatctgctgttcacatcccggctgtgacgtcgtgtccggtgaggggcagagccaccgcctgcggctggcaagtgatgacctgaagaagggccacactggccgagtggggtgactcttgcttgtaatcccagcactttgggaggcggaggcgggtggatcacttgaggccaggagttcgagaccagcccggacaatatggcaaaaccccagctctactaaaaatacaaaaaatttgccgggcgtggtggtgcttgcctgtggtcttagctacttgggaggctgagataggaggactccctggacctgggaggcagaggttgcactgaaccaagatcccgccactgcagcctggcaaagagtgagaccctgtctaagaaaaaaaagaaaaaaaagaaaggccactgatcattgggagcttttggaggcaccgtgaccggcagggtgccaccaagcatgtgtggcctcccaggagctaagaccccagagttcttcaggctctgctgagtgcctcccatttgcacagcctctttatgctgttaggaatgaagaaaagtctaaactgaagctgccccaggcaggaggccaggttttctgcttcttgggtttactgaggctctgctttacctacagagtgtttggaaataaagagaagactggaaatctttgctcttgttagaaacactttgtgtttgtcccgctgacacctctgtgttggccttcccatccccaggtcccattaaggcacagtgcaccttcctggaggctggcttcatttcaccatctcttcattctagaccttggattcttgtgcaaaggaaatactcccatgtttctgtcttcttttatccgtctttttct

SEQ ID NO: 587273 - DNA, 4001 bp, Homo sapiens
caggatagttttcttttattattattattattattattattattattattttttgagacagagtctcgctctgtcacccaggccggagtgctgtggtgcgatctcggctcactgcaagctccgcctcccgggttcacgccattctcctgcctcagcctcccgagtagctgggactacaggcacccaccatcacgcccggctaatttttttgtatttttagtagagatggggtttcatcgtgttaaccaggatggtctcaatctcctgacctcgtgatccgcccgcctcggcctcccaaagtgctgggattacaggcatgagccaccgcgcccggctcattattatttttttgagatggagtctcactctgtcacccaggctggagtgcagtggcgcgatctcagctcactgcaacctccacctcccaggttcaagcgattctcctgcctcagcctgccaagtagctgggactacaggtacatgccaccatgcccagctaatttttgtatttttagtagagacggggtttcgctatgtttgccaggctggtcttgaactcctgacctcaggtgatccacctgcctaggcctcccaaagtgctgggattacaggcgtgagccacagcacctggcctaggatagttttctttaaagccactgtgttgtaaaaggtcaattctcacctcgttgctggctgcgactaacttgttcgttttcccctgtgcttcgggaatatgttacctctgtaagataataaacaacaaatagtgtgcttagcctttattcatcagacccctgccctcccaccacacaaaaccaggacgcaaaattcaaatcattgagcatctgctgctgcacagttaaaggccccatctggttttctatgtctacaagaggttccgaatacacagagactgggaaaggttaggactgcattaaagcagctccaagtgttccaaatttccagtcatccttccagtacattccatacaggcaattttcctagcagcagattttgttgttgtttgtttaaggagtttccctctatagtccaggctggagcacagtggtgcgatcacagctcacggcagccttcaacttccaggctcaagcaatcctcctacctcagattcctgggtagctgggattacaggtgtatgccaccatacctggctaattaaaaaaaaatttttttaggcacttgtctcgttacgttaccaaggctggtctcgagatcctgggctcaagcaatcctctcggctctgcctcccaaagcactgggattacaggcgtaagccaccccacccagacaatggctgcagattttgagggctgcactggtcagaaacttggaaagcaaagaaaagtgatgttttgccagtttgtgcttaaaactatttcagggtaataatacctgctataatcgtatcggcaatccttccacaatgaccagacatggcaagatgagtggaacttttgtttctgtctcacttattcaatatttattacacgcaccatctatgcccgatactaagtgctgggaaaacacagatgaatggcagcccccatctccttcagctccctcgctcactttaggtcattttctctcaaattaagtgtgtgcgttacagttaggagtatggggggagcggggaggcaaaaggaatctgatgttaatccctccaccgccccaggctgtccccagggccacaagtacctcggagattgccctcgtcgctgaaggtagtggtaaggaccccctcggtgaccacgcagccgcagtcggagcacaccagctggctctgcgaatagtgcgagtcttccaccagctccgtggagccgcagtccgggcagcggcctctgcctggcatctcacaaccggccccaaagccgcggaagccttcagagactcctgggtctgcaacagcaaccgtgaggcagcaagaagtaggaggggacacttcaaagggttgcacccccgtcttccggccagcgcgacggaggcataggcggttccctccgctgggaggctgcgcgccacttccggtctgtgcctccgcgggctcgggtagaaacgtgagctaggagaggaggttcctgggctgaactgtagctgtctggtttccctgcactctgtagttagtttttgggacctagactggggttgaatttgggaaagtttttgcctacatggacacgtataacagacagaagattgttgtcacccctgaacaaccctccttttaaagtcctaagggaatcgcaggttggtaatgaatgtttaattggccatagaagaaagtatattttttaaagggagagtagtggagagagagcgggagcaggaaactgtgttctgctttccagagctgcttcctaaagcagattccttcctctctttacctcctgtttttctcaactgtaaaatgaggaagttgaaaaaaaaatccagagatgcaaacccaaacgcttttggaggccaggcaggaatgtctaaaggagtttggagtgaaagaatatggagtgatggagacctggagcggcgcaagcacgcagattcagatgttttttaaaaaaccttgagctatctgggcgtggtggctcacgcctgtaatcccagcactttggaaggccgaggcaggtggatcacctgagctcgggagtttgagaccagcctgggcaacatggtgaaatcccgtctctactaaaaatacacaaaaattagctgggcgtggtggtgcacgtctctaatcccagctactcaggaggctgaggcaggagaatcgcttgaacccaggaggcgcaggaggcgcagtgagccaagatcgcgccactgcactccagcctgggtggcagagcgagactccatctcaaacaaaataaaacatacctttaagaagtgtcactcccttcttttccacacccagtttttacacgtgatatccaaacctaaagacaccatcccttccctaagagactgctttctcagagtgtgagaatcactactccttttcagagacatcccgtccattcccatggggatcgctcacattggagggccaagagacacaataatacccaacggtcctttctcttcaatttgaattactttagtatcataacagaagggggcttcagcacattaatcgtgggtgggatccggcagtccaagcccccccgccttttctagacctccccactagcgtgagatacaggatgagagcttatttctggctgtctgacagttaaatattaagatacatttgcacatgcgcacccgcacacacacaccactcagagacatccattagttttagtgtggttgacattcttatttggatgaagaaagtgtccctgaaagcgacataacttgcactgggaacagttccttgcatgatcacacagcagagcatcagactcccctcatccccagttgtgtgcagatcttgaacctaccttcactttttttttaagcgggactttacagagcccatctacctaggacagaagccttgaaatcctgcctgacccaacctgattgattgtaaagtggaaaagcagttttatgatcctgcagccagccacggaaggagaaagctggttgtctttcccagtcacacatgatgtacttactgggagcctaggagagcctggtcctcgggcacacacaggctgggagggggcagggtccaggccagaagatggcgccctctactaagatgtgtaagtttggggttctccactttctcaggaagaagtccatttatttgggaaatgtatttgccttgctccaggaaatctggacagacgtggaaatcatcttggtgccctctccactgctcccagttcttctaagagttatcattcctggtagtgattatcttattttttaattttatttatttatttattttgagaggagtctcactctgtcgcccaggctgaagtgcagtggcacagtctcagctcactgcagcctccacttcccgggttcaagcaatt

SEQ ID NO: 587274 - DNA, 4001 bp, Homo sapiens
aaactcacccagtagcagacagatcttttattctcacatttgaaagcacaggttcagaatggaaaaacgatttaaaccaccaggtggattctgccacttcaggcaaccctattaaataaaattcatgttactccttatcaaacaaatttgagattgaaaataaaaagaaataataaggatgacactgaaagaaataactaagtaccttgctgtggtttgtcgtcatctatgaagttaacagaatcagagctagttaaagaactaactgaagaaacactggactctgtaggaaacaaatgatattaaacaaataaataactggcaaccagacaagcaaatccgcatcatttatatacaaactgtcaagtagcatggtttgaaatcatttattcctggcttgtgaattcatgaattgaaaaactgatcaaattaccaatcaatagaaagctgctatattaagaaatactatgttctactgataagatatactcatttccaaggcaggaaactcactctctccttggatatcaatgttgaatttaaaatgtattataaatgttttcagattcaaaaactaagaaagaacaagaccaagaataaatattgttgtactacattagaaatattacatatatgtatatttaaagttctacagaagtcatcaaatctagaaattaaggaattatttggaaagaacaaacattttgtcttattaggcttgtatttaaaacctatgtctcttataagatcagaatataaaagtaactcctgtggataaataacaccaagtaaatgagcgtaaacttttgtaaaatgaataaatcagtagttgtctctaacacttatactacaaacaacccttgaaagaagagttttctatgtgttgttgccatagatacttgtaataactactaatttggttctgaaatgcttattttattttatgaaatttctcaatcttctctaagaagctacaattttctatttggccatgaatatgaacagatggatagattaataaaaataaaactggccagatagaagttggcctattatccatagcagaagatggaaattagaaaatttttgaagcaaagtcatgctatcttttcttttctaaggagttgaataatactttatttatgtaaaattatcagtttttagtgaatcttacagaatgcaaggtacataaaattaaaatgtactaatgaaacataagccgatgttcactgatttttaagtgtcaatggcttcaacgatacagcgtagctagaacaaagaagtgcctgtcagcactggatcagagaagtccctgaggcctcctgctttcttcattgtcaccaatagttctctcccttaagttctgaaggtaacatgatacctgtgttaacaatatcccacaaacatcacctcaaatcatattatctagggacgtctctatgatgatgcaacttacttcgataatactgatttctggctagaaggcaaccaatggaaggtacggatgccatggctttacccgtgagaaagcacccaagaagctgtgagcattaatctgaaacagcgacagagaaaagagacattgatatgaataacagggagtttccttttcttttttccacgtgactgttacaaagtattatcatttaccatgtaataaatatatgataaaaggaatttaaatgtttacacaaaagttcaaccaaatatactgcaataaaaagatgcaattaagtagtacatttaggtgaaaaagaaaaactatacatccaactatacacaatgcacagaacttactccatctaaaacagacctaaaggtcagagaagtgttaactcagccatgaggtagtcactcaccgatttgttttctccaattcgttcttttaaaataaacgtggttctaaagtttcttcagaaaatacatgctttgaaagaaccagttcttagggattgaagagaggctgcaccacatacgcagggccagtggtaggtccgtgatgggagacccctgagcacaccttatatttagaagccccaggctggctggaacctgagctgtgggtgactcggagtgaggtgggcacacagccagccagaggcagcaagcaagcactctctgcacgtctgccctccagcctgccaaaggccctccgaacgcagcagcctgccaagtttggctgcagtcagcagggaaggacttggcccaatgctcttttggactcagcctctttaatatcacaaccgctggtgactacagagagggaggcgatacacaagtgtctcctcagccttagatacaatcacacactccacctgcagcaccacgctgggcacgtgtgggatgtacaagcagcctgctatctggctggggagactgaacatacctgcccacagtttcagtgaggcaaggcagagtcccacggtcaaagcggagcaagaaagcactctaggaaacattgaagtcttcctgaaagtgggacagagtcagtggaacttgatggacagatggacagtgagttagaaattctagcaggaatgacaagagaaatggaaatcatgggtaataagaggatatttatgacattgtatcaatatcatttactgatacaaaagctaaattttattctgattttagtaacaaatttctcggatagattgctttgcccttttttttttcttttcctgaggcggagtctcactctgtcgcccaggctggagtgcagtggcgcgatttgggctcactgcaagctccgcctcccaggttcacgccattctcctgcctcagcctccccagtagctgggactacaggcacgcgctaccatgcctggctaatttttgtatttttagtagagatggggtttcaccgtgttagccaggatggtctcgatctcctgacctcgtgatccacccgcctcagcctcccaaagtgctgggattacaggcgtaagccactgcgcccggcctgctttgccctttcacagactcagttgacttacgcatcaaattgtggctccctttacattgaggggtgattgtggccattgctgattcgatttgttcagtggctattggttgtgtattcctaacacaatttttgtagcgtatacattgctaaaaaattattcatgtcagctaggttttcaaatgtattcaaaacatttactgtagtatgccatcatggttcctttcaaatattactccagacacaggacaaaaagacagctacatgatcccacttacatgtggaatctaaaaaactgaaacagacaacagaagagtgattacccgaggcagggagatcggggagtcaggagatgttggccaagggtacaaaagctgcagttatgtgggatgaatacttctagagatctaatgtacagcaggattgtagctaatactgttccactgcgtactggaaattttccaagagagcagatttcaggtgctcttaacacacacacacactcatgcacacatacaaaataaaagaaccatatgatatggctgtgttaatttgcttgagtgtagtaatcattttagcatgtatagatatttctaaatgtcatatcatgttgtacatcttaaatatacacaattaaataaaaacaaaataaacaaataataaatatctacttcacctgaccgtccttcctttttgttgttaatatcatttatttaggcctcttctccctctctgctttaataattagttttgctacacctttgtctactaaagccaattttttcaaagaaatatttaatcctctcttgtctcttggttttgtatttctttattttctgttatgctttaattcttcttccttttagttactccaaaattacacttcttgtcatttatttcaaaatattttataactacaattatcacatttcttgagtgtttaggaatgcttcctcttttccaaaagtgtaagactttctttaactttgaagttcaagggtacatgtgcaggtttgttacacaggtaacacgtgtt

SEQ ID NO: 587275 - DNA, 4001 bp, Homo sapiens
aaggaccaaattcaaacataatatcaatgtgaggaaagttccaaacaacaagaacagcaaggaagggtgctctaaatgcttggaaacagaagagaatgccatgaattcagctgagcaagtgagacagggagagggaggaggctgatagaaaatgtactcagagaagtcagtagagaacaactcctacttgtagaggcagtagggatatggattgggttttattttgagcatgaggggaagctttatatgagttttcaacagaatcatgacaatctggttttcatggttaaaagatgtttctagctgttctgtggaataaggactctgaagttatcaaaagtgcaagcaagtagaattaggaagttattgcagttctccatgagagcgataacaaaagattgaacacatgtagtggtagggatcaaattttgtaagttggctatacaactgacaaaataccatttttagcattgggaggaaagtatgtttaaaaaacaagagtggctactagattttccacctaggcaactggtaaaggagagactgacaacaaattgaatctagtgtctttcttgtatgccatggtgtctagaccaagggttttactttggacagtcaaatctgaaatgccttattaaacaatcaaatggagatgaaacagtcacctgaggctcagtacagaggccagagctgtagatggagatgcaagacctggcatttattattcacagatattacttcattattcatagatataagtcctggaaattaccaatgtaatatcatatttaaaaccaaaagtctaaatgggattacctgatggtatagtacatagagaccagcaaagaacacaaaaggctgagaccaggacatatcaacctaacattagaagtcaggcagaagaatgagagccagcacaggaaatggggcctgagcaggtagtgcagtagcagaaattattataagtgtggtgtccaaggtgcaaaatgagacaaagggggcaagaaggaggaccttgcaactgcctcagtgcagaaacctttgatgtacagtagggaagccactgttgttgactctgatggggagtctaggaaaggcatggtgacggctttcaataagactgtagcaattaggagcaggaggaaaatataaaatgaacactacttaacaaagtaaaatcatagagcccagaaaccaactgatccacagccaaggaagaaaccatagtgccattctctaagtagaaagtataaagaaatgtgcacattttaggaaaactctatgagttcagtttcaaacatattgagcttgaggtttctgaagcatcatggagctcaacagcgactggagactggcctcagccagaattaaaagcacacacggaaaatagagctttgaggagcaccaacaaaaaatttaaagaatatattgggcaaagtgagcctgccctacaagattataagggagacaactaagagaacatattgacacatatgtgaagtatgcctttgagtgataatgctgtttcaaatttccttgtcttaatctttcccaaactttttaaacctggcttcaaatttgtgcattaagaacagatggatatatctttaatttcctcccactgtgatcaagaagaaagaaaagaaagccctgtaagagtatacacacacacacggacaaacacacccacactcagacacatatagttcacccttgaacaatgtgaaggttaacaatgtgaaatatcagcccctgagcaaccgaaaatccacatacaactttgactcccccaaaatttaactactaatatcttaactgttgaccagaaggtctaccaataacataaacaatcaattaacaaatatttttgtacgttatatgtattgtatcttgtattcttacaataaagtaagctagagaaaagaaaatattattaaaaaatcataaggaagagaaaatatatttactatgccttaagtagaagtgaatcatcagaaaggtcttcatcttcctcttcttcacactgagtagattgaggaggaaaaggaagaggaggattagtcatgctgtttcaggggtggcagaggcagaagtaaatccacgtatgtatgtgtgtgtgtatatacacacacatacacacacatgcatatatgtatacatatatttttttttctacataaaccagtttcttctgggacacagactttctgcaaatattgatgagttggggcatgatagtagaaagaagagagattctgaagcaagccaatctgaggttgaattctacttctccctctttttcactgtgtagcctttggcaatttacttcatctccataactcagatttcttatctacagatggaggataactaaacaaactccacttggttgttgtagatactacatacaacaatgtttgtaaaatttctaccacagtgcttggtgcatagatgcttaacgggtgttagtctttgatatggttttgttgtgtccccaccagatctcaacttgaattatatctcccagaattcccacatgttgtggaagggacccaggtagaggtaactgaatcatgggggctgatctttcccatgctattctcatgatagtgaataagtctcatgagatctgatggttttatcagggggttccgcttttgcttcttcctcatttttctcttgctgccaccatgtaagaagtgccttcgcctcccaccgtgattctgagacctccccagacatgtgaaactgtaagtccaattaaacctctttttggtcccagtttcagatatgcctttatcagcagcatgaaaacgaactaatgcagtcttcttccagtccctcctgagggtattttagagacctcctatttcaataaaacctgagctcaagaatataccaattgtgttttcaacctttttcatagtttaatagatatacttgggaaaagttgaaataacgcatatcaatagtttttgctgtttagaaatgtcattactttttattgagttaaaatttatatacagtgaaatgcacagaacttacatgtatagttggatgagttttgataaatatatatatacctgtgtaaccaccattccaatcaagatatagagtattttcatcacaccaagaagttccctcatacatcctgatagtggtgagcatcttttcatgtgcttattgcccattcccatattttatgaattgtctattcacgctttttgcccattttttactaggttgtttgtctttattgatttgtaggaggctttatttttgaatacatgtcctctctaccatatgaataaatttcttccatctgtgcatagtcttttcattttcttaatgatgtttctgatgagctgagatttttaattttgatagaggccaattaataatcttatttaaattttaaatctagcgcttttgtattcttgctaagaaatcattgcatacttcacagttgcaaagacattttcttcccttttcacctagagattttaaagctttaaattcatgtttagatgtataatccatcaaaaattatttttatcataaacattaatttttaacaatgtacttttatgtattatgatgtattctagaattttttcagtggctacactttcaaatgttttatcacgtgatgagatgaggtttatgatgaagctttcaaatgttaggtttgtaatataatctcccttttgagcaaacacatttctaatcctacctcattgattagttgccttgtaagctagccgaagtgtgattcaactaaaaaatattgcactttctgcaataaaaacagaaatcaataccaagaggaactatcaaagccacacaactacatgaaaattaaactatttgctccagaaagatgtttggatgaataataaaatttaggaagaaataaaaactcttagaagcatacaaactgagacacaacataccaaaatctatggaatgcagcaaaagcaatgttaaaacaaaagttcagc

SEQ ID NO: 587276 - DNA, 4001 bp, Homo sapiens
tctcccgcagtgctcccaggcttattaggatgaggaaattcccgcctaataaattttggtcagactggttgtctgctctcaaaccctgtctcctgataagatgttatcaatgacaatgtgtgcccaaaacttcattagcaattttaatttcgccccggtcccgtggtcctgtgatctcgccctgcctccgtttgccttgtgatatcttattaccttgtgaagcatgtgatctctgtgacccacatcctatttgtacactccctccccttctgaaaatcactaataaaaatttgctggttttacggctcagggggcatcacggaacctgccgacatgtgatgtctcccccggacgcccagctttgaaatttctctcttttgtactctgtccctttatttctcagactggccgacacttagggaaaatagaaaagaacctacatgaaatatcgggggtgaatttcccccgatagatgaccatctcagcctggggtcagggcagggctcagaatggtctgggtggacggccgtctcagcctggagtcagggcagggctcaaggtctgggtgaatggccatctcagcctggagtcagggctgggctcagacgaccagcagtctttgacctgccatgccgggagccacatctcgtgaccaggtcctggccttccacgctggccagacgcctgcatccaagacgtcctggtccctctgactgcacagtgtgacagccaccacccagccatgccctgtactcctggatgtgatttgctaattagggtcaatggggtaagatgcccaattaaatatgaatttcagataaacaatttttagcataagtatgtcccaaacattggtaaaaatgactatttgttgtttatctgagattcagatcaaactgggcatcttggacattttatttgctcaactagaaattcatgagtgcctaaggagctcaagggacattccagaccccccaaatctgtgtcggacacaggggcagtcacaatggggtgcagtggttgtacctggtgactcaggacattcgtctacctcctcatgtcccccctgcctctagcaccacagtgtcatgccctaccctccagggggcccagaaagcagtgcttttgcccagggccattgtcccctagatagagggttcagcccaaggagggcagccctgattcccaagcctcctgcagcactgactctccactgcagcaggcctggggtttctggccatggctcgcctttggctcacctctccagaaggtctctggaagcttcttccccacagggtcctcccttccactgtaaccttccctggttctgggaaacaaacttgagaggcccaggcgcaccccacctcttctctttaggtctccacagcttttcctctgcctcgtccccaaggggatcactctggcctttcccctctccagtgaccctctccacaccctcccggcttcccccttcctctgagcaccccagatgccaaaggacaaggtgagggagcctttggagaaatgttgcctgacgtcactggtcccccacgctcgggggacccacacggcccgccctgcaggcagccccctccccgcaggcagccccctccccgcaggccgccccctccccacctcacctcacagctgcaggggtcggggctcggaagtgctgggggcagttcaggttgaaggctgggcagcgtgcacttctcccccagcctcctggggcccgggcatcaccggaagcggagtttgttcccactttgtatcagtcgcaaagaaagagcacccaattggacaaaaggcaagcaggctgcgttcctggcccggagtggagaagagtgagcccctgccctgtcagggaagctgaggctgggggttgtgaggagtcccgtgccgggaggaggctgcaggagcgcctcaatgcacctcttgataccacgcatgcttagcaaggcctggggactgtcctctcgggcaggacttccgccttgtaatgacatgtcgctgatttaaagggaactgggggtcaccagctctggtttgtgcaagtctggtgcgttcttatctcccttgtatttggcaggggatcctaaacctctcctggtatgttgagacatctggagctcattaagcctcggcgcctgtagataaagagattaaaggaaaaaagaaaagaaatcccgccctggggcagctggggtaggattagcctggaggccacgcctctgcagggtctcccataggctgggccagcctctgccctccctgcttccagaaccccggacgctgatggcctgtggcggccactctccgcccaccccggagcccagcctagcggggagaaggccgccggcccgttcgaatgtccctctgcttccagggtcagcctgcacgccactctcacagaggccagacgggcggtggggcggggactcagttcatcctctgcctgaggagcaggtctcgggtgcgactgagcttttcaccctttgagaggagtcagggacacgcagcgtctccagcaagctggtggcagaaactgatggagcatcctaatcacaaaataggaagagagtttgcaaaataggagcatttaccagaagcctctctctctccctccctccctccctccctctctctctctctccctctctctctctctctctctctctctctctctctctctctctctctctctctctctctctctctctctctctctctctccctccctccctctctccctctctctctccctccctccctctctctctccctccctccctctctccctccctccctctctctctctctgtgtgtctctcaagtagaagtggggtctctatgttgcccaggctgctctcgaactccgaggctcaagcgatcctcctgcctcagcctcccaaagtgctgcgattacaggtgtgaactactgggcccagccccaggccctcttacaggagtgggctgcctagaaacattccagtgccatatcccactccactccgggtgcagggacaggacccctgccacccccaacccaggcccaaaaggaggggccaggaggggaggggccaccaaggcaggtgagctgcttaagaggagcgagggctgtggacagtcctgcggactgcaggaggggccagcaggatcaatatccagcttctctctcctgctgggctcctgctggggctccctgttggtcaccccaaaacctactgtctctcatcgctgccggggctggccaggctcagctgctggttctgccttggggcacctcctaggtggagtcagggtggctgaaggcttccccactcatgcgtccactgtctggacatcctgcccctgcccgacctccaggagttgcagtgtgtgaaggccacaccacagcccctctctgctgcctccctcatgtctcctccagaatgatgctcttaaccccctcattagaggcccccatccttcccaactgtacctcttgacaccctgagtacagttcaagagaccctgaagaaactcagaaaagtgacaactggaggctctgggagagaagagtgaagtcactcacatttgtttttatttacttattttttttttagagatgaggtcttgctttgttggccaagctggtctcttgaactcctggcctcaaatgatcctcccatcttggtctcccaaagtgttgagattacaggtgtgagccattctctccggcttactctgcgttttacaggatgggatgtgttgatgaaagaaagccaaactctaaaatatttgaagaggtttattctgagccaaatgtgaggaccatgacctcacatgacagagactcaggaggttcggggaacatgtgcccaaggtggccggggtacagctcgattttataccctttagggagaaagaagttacaggatgagatggtttggatttgtgtccccgcccagatctcatgtggaattggcggaggggccacgtgggaggtgattggatcgtgg

SEQ ID NO: 587277 - DNA, 4001 bp, Homo sapiens
ccttctacaatactttgaacactcacttcaatttattgcatattttctaaatgcacctctctctctcttctgaaagagagaacatttcatcagaaaacgaacggggtcttttgcctatctgatggtctcacaccttcacaacagctacaaatccttggaccagccagggacagaccaactccagggttctctgacaacagaagtcctggaaaggctctgcactcaaaacaaacccctacaccaccccaagggagggggattgtttcaggttcggggagacgctaaaagaaattgaacctaaactcttcatcaggcatgtccagagtggctttggctctccatatagagcgaggcctgcagaccctttggctcttctttctggtggctccatctacaggttgcacctgggctgaataagcagctgtcggggagagaagcagcgtatgtcagaactgaataataacaattaacattacctgtacagttatgtttgcccatacaattctaaccaccttgcataaattaactgattaattcctcaaatttgtaaggttgatattactatcatcccccacttagagaggttcagtagtttgcaaaaggtgttagtactactatgtggtagatccaggatttgaacctagctgatctggccccaggaattgcactcaaactgttatgggatatggcttcattgctagtagagaaagccaagacacaaagacatgaggcagctttccccaacccaggagcaggaccaacataggaccatgctctttcccactcctcccagggcctccccgctgcttcccaggttcagtcctaggaagaggaaagagaggtccacgctttctgtttccctgctccctcaggcttccctgagcccatctccttcccccaccaggcttgttgctctgggccttcttcctttcaccccctagacacttcctccttaagttaggccttcctgaatcaaccagtggctagctcctcaccagctctgagagcccgcagggcctcacgccattcggcttccatctgagccctatagtctccaaacaaggagtgcatcagctgcctcttccggggcaagggcgttcttttgctgcgcagggttcggattgctccaatagcctgctcttctgcgaataaaaataaaggactagtgaacacctctattactgacctcctaccaccccgccgcaaagccaacaactccatactctgccagcacctgcaggccaggcagtgccactgttcacatcccccagctctacagaagggtcccttactctgtttcggggtgggtttctgcctcttgaggcccagctccagttgctccacacaccaagccaattcctgggccaactgttgtgcctgtgatggatttggggaagtggctgtgagagggcactggaaaaccatagccgccggccccatcccatgcccctccccgccttaactccgcggaccccagatcacacgtgcccgtggattcgcacccgtggattccacccttcccgaccgaagcccgcccttgcctgggcctcagcgcttaggggaacttcttctggggcgagtttctctgaggccttctcgcctccatttgccacagaggccctgttccgcgttttcttcttattcttttgttttttcgacgctgtgccgccttcatcgcccaacgggtgcgctctggagtcagcgttactgcacgtaggttgctctgggcagagacagacagtggaaggattccgggcgctggaaactgggccgggaagccgggctccgcgggacgcgcagggagtacccgggcctggggccgccgctgcctccccagcaagatgtcccagggcctggagaaaggggggtagcacgagggtcaccgagagccgccaacaatgcaaggcccagccacccgcgcgtcttctccacaccgctcaccgccatgcgccgcagtcgccaccggaactacgcggggcgcagagtccgacgccgaattccgtccttcaagaacgcgcctgcgactctaggttccgcggggcgcgggcggggcgcgggcggggcgcgggcggggcgcgggcggggcgcgggcggggcgcgggcggggcgcgggcggggcgcgggcggggcgcgggcggggcgcgggcggggcggggcgcgggcggggcgcgggcggggcggggagcgggcggggcggggcgcggctggggtgggatgaagctgggacggggcgaagctgggacgcgcctgggacgaagctgagatggggctggggcggggcctgggggttcggggaagaggctgaagaggggtctcggaagaacccttgtgagcgagtgatcgcgggcgctgactacgtgcccggcacctttccggataaaagttcaaagctctccacgagggtgtgtcttctcaaggctcaccttttggtggggagggaaaagcaagtaaacagcacgtgagcagctacggcgcaagagggtggtcggcaaagaccctgggaaatggggaagagcgagggtcagggcgcggtcgtttgagaggccggcgtctcgggacgtggaggctcgggtgaggtctgagagttgggagggcccccgtcatgggcttacttccgttctaacgcagtgggaagtcgctgcaagatgtaaatctgaagagtggcataatcgtagacgtatgttctgcagatctctctgctcttgtgtaacgagtggggcacatggggtggagggacgtggaggggtttcagaagcagacgcgggaagagccttggacaggatatggacgtgagggagggtggcggtatgggggagagggagagccccatcccaccacctctcttcccctggatgcttccctcccactataccttgctagagacctggggtcacacacaacactcgacccccgccgatggaggcatgacaaccgagaggaattgcgtaggggttgaggtgaggctgagtagggtttcaggggggcaacgggctatgccaggagggtgggttgtgttgcttgagaaggtaagagtccgagatgtctgatgattcctttcggggacacaggagtggaaagcggtgtttcctgagacggtggggtgggaagtgttagctgcctggtctgcaaggtctcgaagggttacagtttggtcatcactgatagttatttactgcagtgtgatacattactcccaaaattcggcggattggccgggcgcggtgactcacgcctgtaatcccaacactttgggaggccgatgcgggcggatcacgaggttaggagtttgagaccatcctggctaacatagtgaaaccccgtctctactaaaaaataccaaaaaattagccgggcatagtggcgggcacttgtagtcccagctactcgggaggctgaggcaggagaatggcatgaacccgggaggtggagcttgcagtgagccaagatcgcaccgctgcactacagcctgggtgacagagcgagactccatctaaaaaaaaaaaaaaaaaaaaaacacgcagaatttaaacgggacacgcagtaaaggagatgcggcatacagtaatttattacaaaggagaaagaatatttggaaagttaagtgaacaatagacagtacaccctgagagagagagagaggattgagggccagctgctcataaggttggggcagcaaagacgcatgagggagactccctttatgggggtcttacatgattattcataaggaattgggaagaggtgctactagtgagtatgttctggatggtcctctgagtgcacatgtgcggtagctgtatgttcttacatgcttgttcatacaatgcttcttgtcatacaatgcttgttctacatgctggtatatgattgttcgtacatgtcacatgtcttattagcatcttaaacctccaaccagggctctgttttttactattataatgagcgaaaggtcagtctgaggacaggtaaaatcaaaatgtacatgctctttgcaggggaaa

SEQ ID NO: 587278 - DNA, 4001 bp, Homo sapiens
tcaacgttaaagttgggcaaaaaaacttaggagatcttgcaaatcttgttatgtgaaacccgtcctcccaaaagacctattggaccacacctttgtcctccgcgccctttttttgcagggtcattaactcgcattatttttttgttctccacagttctcacttgcttctcttcagtctttgctaggttttccgcgatctccagtgcagccccttccacttgccgcgattctgcctctctcagacactgacacgtaacctcctccccataccaagccctcaccccaaaccaagctgttaagaacagctacaactgcttctgggagacgtggggggcgggggcaaggcgggggcaaggcgggggcaaggcgggagcacctcgaccctcccgcgaactctcgccgccggtcagtgccccctgaactggatgggaccaagggagtccctccgcaagggcctccacttctgactacggtccgcacgccccacccctgctcagcaccctggcaacccgcgggacgctttgctggtgccaggcttcaatctcttgttctcattttctcgtgtcctcgcgctcttccttctactgtatttttgtcttaaattctttaatggcgagagagagaaaaaaaaacaaaaccagctcagagctatagtcttcttccacaaatacgtgtgtgcttttcagaacctttctccgtccctttctcctgctaacacatgtggggtctgcagtgcaaaggactctcctttcgtccagtgaccaaatggcagtctctcagtttgccaatttcattcatcacgcccgcaccgactgaagcctactcctcaccagttcagctgtcttccagttaattgtattaactgctaagcacctcctccaccttttcgggttctattaccgccctcattaaaaaaaaaaaaaaaaaaaaaaaaaaaaagaaggaaagaaaagaaaagaaaaaagaaaatccaacacgaacactcaagatagcgtgaattcaaaaaagaaagtgtgcgtgtgcaacacagtctgagtgtgtgcatccgtatgcgtcgcctgcctcagcctgcccgggtcctgaacatgtagctgagaggtgcaggacagtcagagggccaaaacttcccctgccaggctgaggctgggccctcccgagctcacctgtccgcgttcaggtaactggctaagtgcccgcccggccgcgttccaggacacctggccgggacagagcgaatgccagtgaatcccagggcgccctctcccgcgcgttggttctctagccctccttccctgggaggggtgggattgggagtgttctgttttcattactgcaccccttcccctaaagacaacgggactgccctcctccacagcgccttacctcaaacaggggaccgatcttgttcttctccaggtaagcctggatccgggtttgcggatgagacgccatggggaacagatgggaccgcgaagagagtgcagggagaacgcgcggctgtgcgcctccgctggggacaaccctccttttacccggactggggccgggacaggagctccggagcctcggctgccctgcgtggctggctcggccccggccgcgggcgtgggtggcagcccggggagccacgcgcgcgtggggcgctgagagccggaagcctgggcgcagcgccgccaactcagacaactccgaggcgaggggagaactcattcatcgcgttctccgcctcgcgcccaccctcgccgctctccgcagcgcccggcgcagtggggaaattcgaggcagaggttcctttctcctctgggcggcagcagcaggaatcagggggcgggaggcgagctgtgtcgaggggcgcacgcgggcggacaggggccgcggggctcgaactcgccaccggtgtgtgtgcgtgcgtgcgtgtgtgtgtgtgtccgtgcgcgcgcgactgtgtgtacctcctttccccggtgacggaacaaacagcccgggctgctccccgaggctgctcgccctaccagccgctccctagcgacagcgccgcttaaaaagccaatggtgaaggtgcttctttcaaagtgcacataaatctggtgcttgttggctactccttggcagctacaaatgcagttcgaaaggggatcgtccccaccgccccttctgagcctctcctcagcaccttctgccctgcctactctagcgcaggggttgagaagggcagagttttgagaaggtgcgtgggtttaagggtttgccgcgaaaaagaagttgccttccttttcaaaatctggtttggcctggagcaagtcgacgggtgaacgcagcctgagaacccagctgaaaactctcaaagtgcaggagctcaaaggctggaaccagcctttcagcatttgacagggagaagagaaatgagcgagccagccctcccctccaaagttggccttcctaatccacgccttgagtcatgtctgtatacctataactgcatctcagacaccacactatcccacttcataatgtttcctctagatactgcgtgagctgctcaaatttagccaatacctttcttattatgcagggatttccgagtcgaaggtttgcagatagcccaggcttcctcacagagctctctttcttgtgaaatacaatactaaggtcccaatgacaatttccctggctcctaaccatgatgtgctgccaaaattagatttatttctaataaatataaattttcagaatgatggaaacagttttcctaaaagctgactgcagcagtatatatttttttctttctttcttcactgtgttctggatttctgttactcatagtttctttattggtgttcatgttttccttctgtattttaaatatgtggaaacatgtaatagataagtgtggaatatcccaggaactattattaatttcatgcattaagacataagaaatctgctagaatagctaggagcttaaccatccctgataacctgaaatggacttgatccagagtggaaagatgtccacattaatacttttacaatcggactcatatgatctgcctagggagggttaagttaaatagcagtgaggtgtccagggttgcctcgtgctttccattttggttcgaaggtatatttacttatgtattttttaatgtgtccaggagaaattaaatacacagagtgaataccaacatttctatttgctaaaaggtatagcgtagagccataaggaaggccatctatgacccagctaaaaagcctactatttttgataccacataaggtaccaagatggtacgcttcctgaaatcaagagtctttctcttttaagaggcatcaggaggatgcttctttaaatgaaataaagacacttattaagtcttcaccatgctcagactattgcacttagggctttgaatagaagagacaaagcttcagctggcaaaatgtgtatgttttaaagagagaatgaagccaagtacaaaggctcacgtctgtaatcccaattatgtggaaggatcacttgaggccagcagttcaagactgggcaacataaaaagaccccatttctaaaacaaattgttttttttaattagctgggcatagtggtgcacacttatagttccagctactgggaaaactgagacagcaggacccttgagctgcagtttgaggctgcagtgaactatgagtgtgccactgcatctaggctgggccatacaacaagactcagtcaaaagaaagaaaggaagaaagagagcaagagacaaagaaagaagagcaacatgaggatatgcatacccatttatgtatgttaaaactctgagcatcccaaaattgcacatttaaaattcagggagtattttcaaagcttttcaaggccaacattaaatatcacctccttcataaagcacttcttggttctttctatttatccctaaacatggcttcattactacaataaacatttattgcatagcttctcagtgacagacattatgttaaga

SEQ ID NO: 587279 - DNA, 4001 bp, Homo sapiens
tttagaaattttgtttatgtactcctttagaattttttcgatgcttttatcttcgcagagtgaatttttataaataaatgtcactgactgggcacggtggctcatgcctgtaatcccagcactttgggaggccgaggtgggtggatcacgaggtcaggagatcgagaccatcctggctaacacggtgaaaccccgtttctaccagaaatacaaaaaattagccaggcgtggtggcgggcgcctgtagtctcagctactcgggaggctgaggcaggggaatgggaggcggagcttgcagtgagctgaggtgggccactgcactccagcctgggcgacagagcgaaactcaaaaataaataaataagtaaataaaataaataaatatcactggaggtaagccaggtgaactggatagtaacagagttggataatactttgggaaatcacacatacacacaccaaaaaaccaaaaccaaaccaaagatgcagcaaaaaaattaacggagatgacgttcttagattgatccaaagttgcctccgtgtaatttcacaagcgtttccaaaatattctaggcaagaggcaatttccaaaagattctagcaagagttactgaaggtcaatattcttatgcaaacattttgttttttttttttgaggggttgtgggggaaatgaggaagtgaaggaaatcctattatttaataattacatggaggaaaaacgactggtaaatttgaaaggtagtttttagataaaaaaccaaaataccttaagaaatgtccttaaatttccatatgtatgtctggcacccttaactagggggccatggagagaaggaaggtagacggtttaatgttcacaataattaacccttttgtaatgaatttaatctcatcttaactccctgagttaaaaaaataaaacaaactgagtcaggtgcgatggctcgcaactgtaatcctagcagttaggggaggcagaggcgggaggacagcttgaactcaggagttcaagaccagcctggccaacacagtgagactgtctctacaaaaaatacaaattaaccgggctcgtgcctgtaatcccagtttacgtaatcccagattacaggctcgtgcctgtaatcccagctagggtaggccgaggtgggaggatctttgaacccgggagttggaggctgcagtgagctacgatcgtgccactgcactccaacctgggcgacagagcgagactccatctcaaaaaacaaacaaaacaacaaaactgagctaaagacaaataggattgacctggggagtggggtctgaggcaatgggatgaggctgtctaacagggcacctcacagggagatgagaaccgcttggccacacagaggcaaaatgcggccgaggtcagcacagccctctcggggttaagaacggggcgcctgaggggtatcccggtccccgactagaacctcctacgcgctggcagccagaaacaggatgaaggagactggcgcggactgcgggctctgcgggcggggcggggcggggcggggcggggcggggcggggcgggggccagccctctggggcatgccggggggcggagtctgcgctgagtgaagaggtgccagaatccgcgaagagggtcgacgaatgcgctgccgcggagggtagggcgctgagggtctgaaccctgatgcaaggaggggctggaggtcgcgggcacgtttcttttgggttgggcggcggaggggcagctctagggcctggagcagggctttaccagaacagtccacccctcccgcccggttaacctgagcgtctctttcgccttggcttggttccggtcgctactgtgggtgccgccgccgcagcctttgggctgctcgaccataccccgtcttagaaggtcaggtgtgcaaaacttggactcgacttcatccaagagctcgtccaggtcctccgccatcttgaatcgcctggccttttcccctccaatcgccaaggctccggtggtttccaggagtaacgaggggacctggcgggctcctgccccgttaggcgtccccgcgcatgcgcaccgcttcccgtggcaacccggcgcccacgagggctcgcggcagagaacgcggtgggttcgtgaggggcgggcgtatgcagggacagagttcggagctgtctctgcagtgtgtctgtgtgactcgcgatgctttgcgtttcttcctttcagcatgtctggcgtggttcctcccgtctccccctcccgggcccacgttgtaaccacaagcacgcattctcgccccttcattctctcctctcccgtttgggtccctgttgtgtttcagccgtttgtaaattcctgaaatctgtggaaggtttgagcagaacgctctaaaacacaaaaagtaagtgttgacggcaaaaagctgacattcccgtagtcggcaggattcgaacctgcgcggggagaccccaatggatttctagtccatcgccttaaccactcggccacgactactggctgtgtgaatttttgcggtgagagtgcatgtagactctgcataagcgtctgctgcagcaataggcacgttttgatgtggaggaaaccattactgagctgttctgttaagagcatatttgaatgttacctcgctcatcattttacagtttgtaaaagtcttagaacgtatcccgtccaactctttgttggaaaaaacggaaattctaattaaatccgagagagagagagagagagacagagagagagatgcgtgctcaaaactattgcacacccacttgcttgcacaatgttggagccatttccaggagagaaccaggaaccgggtaggggccaaccagcttcccgacttccttgtggggctgccagttccactccttcgcctttctctttgacaaacggctcccaggactatcttttcacccattatacattaaaaagctattacccagcgatttaaattcactctgcagggtcagacagtcccaccgtgccataaaagcactactttgaaaagtgtaaagcgtgatacaagtgtaaggtattgtaaatggcattcttaataaatactgtgcatagtttaacctgtgttttgggtatttctaaagtggggtagcaaagaggttggcacccttgggaactctggagatagtttgatccagatgatttgtttgttcaaagtatcttttaaggtccctgaagagcaacatgtagtggtgtgctggagccaatgggacatgctcactcctacccagtgataaattttcaaggattttgggagctagttgttaaatgcaattattattaaatattaaattatgcaaacttgcaattacattatgttaaaagcaaatatgatactcaaaattcatatgctagtgattccactaccttttactattatttataaatataattgagattgtttacatctgaaagactttctctctttaactttccattcagtgatgtcacttgggaagcttgaaatgagccatagtgggtgttatttacatgagggaaattgcaaatgtgacaaagcagggctttttatccctaggagatgaaagatactttgaacaaacaaatcatctagatcaaactgtcatttagtagaacaccccatgttaccatcagaccaactgtgaatattctcagcaaggcaacactccccttttctgcagggctgctctatttattgtctctgaatctttgttttagctattagaatcctggcctaaacacacacacacacacacacacacacacacacacaaatatgcatataaacatatatgtatatttacacacacaggggaaactagcatttttatgcaaaatacttaacattgagcactgaccactcagatcagacactgtcaggatgcttaagtagtatcctagaggcaccctgacatgtattacccttgtagtcagagtagagaactctagagggtggggagacaatgttggggcaaggaggggactcggacacta

SEQ ID NO: 587280 - DNA, 4001 bp, Homo sapiens
ttataatcctgacttgtaaccctcccagcagatgtgaggtaattcacttgttttgacttactgtgatcagcattttgaaaaacactttaggtgtttctaaaatgcttaacttgtggaaaaatttcatttttgttaggaaagcatagcaggcatttacgtatgctgtcctagaaacattttattatagttttaacgggaaataagcaaagagataatattatttctatatttgttcctattaaacaaacagtagtaacacacagaatcttggtcatcactcagactctaaacccaaaacatattgcttgggaaaaatagatgtacacatgtacatagctactgtaatcatagaagaaatttttcaaaagtatgaagagaaagccttttaaaactcatccttaatggatacataaatagaaatgccaaggagtcaatctatgaacttctatatctatattttatattttaagattgggacagagaaacttcccagatatttgacgtaagaatttgttttgaaaaagtttggtaattaatataaaactactctaaaattaacttttattgttagagacacatctttagaaaagtttgtaaatatcaacatttaccatcttattttttcctttgagaccaagcatcacagaccaaaagccacaaagtttacaataatttattattgttgcatgacatttgccagtaaaataaattatagaaactatagagtctttataaactattttgtatatcatattcacttcctaatgcttactgcagtaactgtatgaaatttaattagattacgttttagcattagtcagaagatttaaaaaatatgtaaaatgttttcacagtactttggatttataaaagaccccattattttaacttttgtgcaacctgtttgaaatgtataaaaaaccttttacaaaccaaaaggtggcgtaaggttttactgagttgctgaagacatcttactttcttgaatttctacttaacatccatgtggtgcactttttcaggcattgtaataagtgcaaataaataatcaattattgatttctaaaaatctataccaatagacaatactcaggcttggaaatattttgaacactcagatataaaaattcagtaaacaatttatgcatggtattttctctccctgtcctccctctccctcctcccttcccctatctatttggttaaaaaaaaaaaaaaaagttcaacttcgatttaagtcctagggcctgacaaagtgaccctggataaatgtcatctccagccatctgttttctttagttctcattacatctgtccaggctcttctatcagcatcaatcctttcctgcagggacggaagagttttcaaatccttgctgaaagcattttgttctcctctgtaacagcacagggcatgaaattgtttggagtctttgtaaccagtctgttcagtcctggtccctttccagtcccggtccctttccagcctctggagtcctgacagaagagaagcttgtaaggtagcagcaaaatgctgcatctgttagaatctcacaaactcacttggtctttgaatgtccattcttggataacgtccttatccatcctcttctcttcagtgaactttgatggaatatttccgcagtttcagaaactggaaaagcttgtcttttgtcctcttcttcaaggccatcagggcacgcgttttctcctccacatcttgatctatggcaaaaatgatcttggctctctcctctgctttcttgtctccagagtttctgaagagcctttctagtgattcttggtctgtgttttcaaagatgttgcccacggctttcttacgagaggctgtgtcgaagtggtagccatggatggatgggctgactcgtagcgacgtggacatgatgacggcttggtggcttcgctttgctttcatcgatgtggggatcttccggaattcagctcccaggctttccagagagtctgtagtgaaatcattctgggactgctatttaaagtgtgaacaaaagctccaggctcaaattacactggtgacatcagagtgatctcaaggaagaataatcacagaaaggcttaacagttgagttgccaatatcctgttcttgtgtaaaacattactaaaagctgtgttcagtgattaggcgcaaggctgtgagtactcattttacttcctatgtggcagtaggataatacagacctgggccttcctttaagaaaatagctgaatacaggaaaatgcaaagataagacataaacgaggttgcttagactctcaaatcttcccaaacgacagttagaacaaggggttctgctaactacaggaaagctttcgttcgcagagaagtaattaaagtgcactgcaaacatttggcagtccacatcagtgccctttggacatccatatcaggggcaactccagagctactgagagaaagctgagcaatcaaggataataatttggggtgtgatcaattctaggatgggattttacatacaaaacgctgacatgacacagcttgaaacggtgacttttcagagattgtgtacaagtgctaagtgtcactgaagaccattgtaatttgggtgtagtaataatatgaatagtagaggctatctccttaggcttgtgtatacatccacaacaatagctatcaaaaaagccagcaggaaaagttaatcaagtgttttacgtgcacagtgcccaaaatgaacgaggtgatcttttgttttcaaatttattttggcattacccagacatagagcaataacttctttggaagcatataaatgtgttcttcctgtcttccacaatattcaagccagccagtgtcctcactgacctatggagttgtcatatgctaaatgtgagcttcaaagggtcctggagattctctttgtggatcttacgcctggtccgctttctagtcctttaagaaagcaggacaggtcttttcgtttttctttttatctagtcaagtaagatctagaaaatgcgcaaagggagacaccgtggggaaggtacctcactaggaaattaagttagagactctccttatattttaattcattcattcacttactcgtttatccactcatttatttaatcaatatttattaaaggtgtgttattagccagaactttttgaggcattggaaatgaaacagaaaaccaaacaaaaccaacctaaccaaaccatgcaaagaatcccttttttaccttaatgaagtttatgttctactgggaaatagacaatagaaacatacatttataatatatatcatgtcagagtaaggaatattatgagtaaaaatgaagcagagttgtacaggagtggaaggagagggttgagattttcctaggatattcaggcacagcttcttgtaatgagacattgtgcaaagacttgaaggtggtgaaggaggcagtcagctatatggatatctgtaggaagggtgctgccagagaagcaagtgcagaaggttgaagaaaagagtgtgcaaagagtgtatggagaacagccagggaccagtgtggtcagagcagagtgagcagggcagagtgggaggagatgaggtaagggcgagtaggcagtggaaagagggcaggagcaggctgtgtgcaacctcacaggctttgattgtggatttagctcgtacactgttaggagacaggtgggctttggagaatttggagcagagaaatggcatggttttccttataattttaaaagcttactgacacttcttagaagagaatagatttcagggaagcaagcagggagtggggagcaggaagactagtcaggagatgttcaataatccaagaaagagaggatgaaggcttccactagggagaatgtggaggtagtgagaactgatccaattctggcatattgtgaaggtaaagctaagacgattgctgaaaaattagatgcgaggaatgaataacaaacaggagcccaggctgatctcttctgaag

SEQ ID NO: 587281 - DNA, 4001 bp, Homo sapiens
atggagaaaccccgtctctactaaaaatacaaaattagctgggcgtggtggctcatgcctgtaatcccagctactcggcaggctgaggcaagagaatggtttgaacctgggaggcggaggttggggtgagccaagatgacgccattgcactccagcctgggcaacaagagtgaaactctgtctcaaaaaaaaaaaaaaaaaaagaaagaaaaatatcccaagataggaaaaatcacttctcttgtaattaaggtccattatggaggatttctctttcaaatatttattttcaagaaaattgtagcaattaggtgcacatcaaaactaataccctttatgggcctctattttgcagatggttcatttcaaagcatcaagttctacatacatacatacacacacacacacacacacacacacacacacacacacaacctaatcaggcggtttcctgggcagctacagaagactcaaatgatctcatggacttcactaatgtttctagttggtgccaaatgtttcagaaattttgaggtagtccacttacctaaggtgatactaaacttccagaaagcaagaatttccgtaataagtgaaagaggatgaatgtacaaaaataatactagctttcaattaacatatgaatattgttctgtatgaagaggcagtttcctacccaagtgaaaaaagaataaagctgttgcctccttaacattaaacatcccttcatcactaagaggagactctaaggcctagcaaaagatttgagcctaacattttgggttttttttttttttttgagacggagtcttgctctgtcgcccaggctggagtgcagtggcgtgatctcggctcactgcaagctccgcctcccgggttcacgccattctcctgcctcggcctcccaagtagctgggactacaggcgcccgccactacgcccggctaatttttttgtatttttagtagagacggggtttcaccatgttagccaggatggtctcgatctcctgacttcgtgatgcatccgcctcagcgtcccaaagtgctgggactacaggcgtgagccaccgcgcccggccgggattttttggtaagcagcagcgtaaaaatcactctcaaggtttgagattgggatccagcataactggtgacttgaccttgggcaagtcacttaattccttttagtctcagtttccctgattgtaaatgaagtcaacaccacctggtaaaggtattacaggactggtgtgaggatgagatgatacatgtgaacatattattaaatatgtaaactataaggcaatagtaagcaaatgctagttactattctatgtaatacaggcctaacctttcctgcctatgtcctgatctgtaaaaagaagacaggttgagatctgaatgtctatccactcacttatcagctgcgtgaactttagcaagtcatttcctttctgggcctgtttcctaagaaggttattttttaagatcaaatgatatcgtgttatgcaaatgctgtccagacacatattaagaacttaacacatgatggctcttattattctctggggagtagggtggtaaagagcaaatgaaattaaacctagttaagagaatttgtatatgcacacaaaactctacagacatccaaggtaccgttatttgcactgtaaactgccaaaacatgcaggaaacgagaaatcaaatggcgcctcagtgattcgcactagagagggggagaaggcagagcttccgagaatcaactgttttcccccttatggcctccagcctagattagaccatttattcaacttcccagcccccaatatccctggacatttatttactgtacctttttcactgagagcctttccactcccctccccttctagtagtcgtgaacttcagaccctcgcttcgactcccactgccataactgtttttaaccaagcttccctgaatcctcccctccgcctaaggaggaagtgcagctagacgcaccgcacggcatcctaggaaatgtggtctctcagactctttgccttgggctgcagagtggggaagacgacgaaggagagcccagtaaaactacaactaccggcaggcaacgcgagtcaccatctttctttcgccccttttcctgttgccgtcctcttcctcctctcctctagcgctgaaccgcttggcctcacggtacttgtagttccttctggactcaagatcctagggcttgatggccagcacagaggctggaagactctaattcccagagggcagagcggaagctgcgcctgcgcacactcaatgagggcgtgtatgtctgtgtctgagggagagagagcgagagtgagtgagtgtgagtgcggggtggggtggtggccgttacgttcggggcaacggctacggcagtggagaagtaagaagagaaacaacgtccggcgcttccgccttcgcttaggaggaggaagagctggtagggaaaggaaagtgcttcgccctgggcctggactggaccgagtcgggttggtgggggtctgggctatgagcttttgagggtcgcctgggacgcggagcgagacacgagagccaggagctatgtctcagccgccgccgccgccgcctccgttgccgccgccacctcctccccctgaggctccacagactccgtcgtccttggcgtcggcggctgcttcgggggggcttttgaagcggagagaccggagaatcctttccgggagctgcccggatccgaagtgtcaggcgcgtctatttttcccggcctccggttctgtcagcatcgagtgtaccgagtgcggccagcggcacgagcagcaacagctgctgggggttgaggaggtgaccgacccggacgtagtgctacacaacctgctgcggaacgcgctgctcggggttacgggggcacccaagaagaacacggaactggtaaaggtgatgggcctttccaactatcactgcaaattgttgtcgcccatattagctcgctatggaatggacaaacagacaggccgggccaagcttctccgggacatgaaccagggcgaactgttcgattgcgccttactgggtgaccgcgccttcctcatagaaccagagcatgttaacactgtgggctatggcaaggaccgctccggaagcctcctgtatttgcatgacactctggaggacattaagcgggccaataaaagccaggaatgtctcattccagtgcatgtggacggggatggacactgcttggtgcatgctgtgtctcgggctctagtaggccgagagctcttctggcatgccttaagagagaatcttaaacagcactttcagcagcacctggcccgatatcaagctctgttccatgacttcattgatgctgctgagtgggaggacattatcaatgagtgtgaccctctgtttgtaccacctgagggtgttcccttgggcctgaggaatatccacatatttggtcttgccaatgtgctacatcgtcctattattctgttagattccctcagtggcatgagaagctctggtgattattcagccacctttctacctgggctcatccctgcagagaagtgcactgggaaagatggtcatttgaacaaaccaatctgtattgcatggagcagctccggtagaaaccattatatccccttggtaggcataaaaggggctgctttgcccaaactgcctatgaatttgcttcctaaagcatggggtgtgcctcaggaccttattaaaaagtacataaaacttgaagaggatggtggttgtgttattggaggtgacagaagtttgcaagataaatacttacttaggcttgttgctgctatggaagaagtctttatggacaaacatggtatccatcctagtttggttgctgatgtccatcagtatttctacagaaggactggagtgataggagttcagcctgaggaagtcacagcagctgctaaaaaagcagtaatggataatcgccttcacaaatgt

SEQ ID NO: 587282 - DNA, 4001 bp, Homo sapiens; identical to SEQ ID NO: 587281

SEQ ID NO: 587283 - DNA, 4001 bp, Homo sapiens
tttccttctactttgttttcttctcatatacaagaaatacaaaatcagaggcaatgttttggttctctttctacccttccctaattctccttccctaccttcccaagactactgagatcactaattttatctgtatctttctggtctatgtttttgtatttttctctagatacatatccataaacaatatatagtattggtttatattttcaaatttacagaaatgctatcttacatatataatttttcagcctgcttatttggcactcagcattatgcttagatctacctatgttcacaggcatacatctagtttattcctgttgacattgtatagtattccacagcatgacagcaccacattttaaccattcccctcttcatggacactcaggttattttcagttgtgccttcttagaatcaatgccaccgtgaacatccaggggtaagaggagttccacccaaaagcgaaactgctgattccgagggtcaacttggactttcagagtttccagagggaattccaactcctgcacgtgggcagcagactcccagctcttttccctctctctggatctggcagtaaatgtctaaagcttaatttatgtcctgcaggctgtctctttgtggccaaacggaatctctccctgccccactgtgcaatggccctgtcagcggctgacacaggggaagaaaggaattgtttgaatgtgggctcacaacaccagcaaacacccagcctacttcattcaaggctgacaatgagaccaggggctaagcctgagtcatggaggtggatgggagggggcaagacaggagcgcaggcagagaacagaggcggcaggagagggggccatgcttaggagaggctgaggggactgaccaggaaccagacacttggagtcatcagaaccctcacacaaagcccttaacaccgttcactgaggaccacaagagcttataaagtcaagactctcgtgtcgcattctctggcagcattagttccgggttaagtttgcaaggtggccctgggttctgtggagaagccagcccagggtcagggcgctctctgacggcttcactggacttcaagcagccaccgggagtatttctccgcactttgcatggcacagttagaaatcatacttttaagccagctgttctcatttcagaacccacttgctcactggaaaaaatgaaagtctctatctagctaccctgggattttgttttcacctgtgtgcatagcaatggcttgctgtcacttccattggtgtactggactgttggtactgaattaaatgagacagggagtatttagctgctctcgccttccccttgatggattgtttctcagtgattgatgtttatccttgtgcctctttcccccctccaaaaaatcaaataccatcaaaaccgagagtccatcagaccccagagacctgaggataaaccgtagtaaggcagcacgtgactgtccttcccctcctgcctaagatgccacgttaaggaaacagtcaagggcaatttcactcacccttggaaggaatcacggtggtgaaaacttctatgttctcgtcactgcagctgtaaatctgatgcatcatttcagcctcctcttcccgaagtgcctgggaactggaggcctctgtctctggacccctagtcgcgaggcatcctaatccagtctggctcagggatcattgtgcgggtccacaaaagacaggctggtgctatgagctcatctcgttccagtcttcactgcaacattttctaaacccatctgtccttttttttttttttttttttaaatgaatcctattattgcaaacctttgattgagcctggaggcttcaatcccctcccagctaggatgtatttaacatttttattttgcggtgtctgccgcagtgaatttggaagccttttgtgaggtgacgacgaagtgaaatcgcctactctgttagcgccaagcttggctggagaatttccaccaaaaaggaaacgtgaattttggtaccagcaattccctttctcatttcagaaatgaaggggcttttttttttttctcccctccaggagaacgggatattcagtaatttgtcatgtgctaacttggctctcttagaagtttctattttaaacaaaaggactgtttctccagtgttttcccctcatgccattacatgacaaggctgacatttctcaagggtcctgtgtttggtacctccgcgtataacccttaggtgctcacagagacatggcaacaggcagtgccccatgttcaaggagcaaattatagaaagttatatttgtattaccctatatatcctaatatattatataaaccctattatgctacatatacaggttacagattatatactgtcccgtatatcatatttattatatatgtatgtatatcatatgtatatatgtatgtgtatatatatatatcatatatatttgtgtatgtatatatatcatatatatttgtatatatgatatatgtatatatagcatatgtatatatttgtattaccctatatatatttgtattaccctatatatcctaatacatttatcctatatatttattatcttataaatcctattatgctacatatagaggtcacaggttatatactgttccatatatcatatatatcatgtgtatataatatcatatatatcatgtgtatatatcatatatatcatgtgtatatatatcatatatatcatgtgtttatatgatatcatatatatcatctgtatatatgatatcgtatatgtgatacatgtacaatgatccctgagccggactggattaggatgcctcgagactaggggtccagagacagaggcctccagttcccaggcactttgggaagaggaggctgaaatgatgcatcagatttacagctgcagtgacgagaacatagaagttttcaccaccgtgattccttccaagggtgagtgaaattgtccttgactgtttccttaacgtggcgtcttaggcaggaggggaaggacagtcacgtgctgccttactacggtttatcctcaggtctctggggtctgatggactcttggttttgatggtatttgatttttttggaggggggaaagaggcacaaggataaacatcaatcactgagaaacaatccatcagagggaaggcgagagcagctaaatactccctgtctcatttaattcagtaccaacagtccagtacaccaatggaagtgacagcaagccattgctacagacacaggtgaaaacaaaatctcagggcagctagatatacgatatcatatgcatatgatatcctatgtatgccctgtattttatatattctctatgtatatacacacaaataaggttatggttgaaacatatgtatcatgccaaacccactgcattttattacactgttacagcttcatttcttcatactaatactgatggtgatgaaataataataatgagagttgccacttattaaatgcttgctataagttaggtagtctgatatataatttcatttaatatctacgaatacccaataagactagctattatatttgccatcttataggtgagaaaactgaggcataaagccactgagtaactcttgtgagattaaaatatctagtttgtggtagaattaggatttaatccctagtttgactccaaagtcaaatgtacttaaccgggccagcctcagtggctcacgcctataatcccaatattttgagaggccaaggcaggaggatcacttgagctcaggagtttgagagcagcctgggccacgtgacgaaaccccatctctaccaaaaatacaaaaaattagccgggcgtggtggtgtgtgcctgtggtcccagctactcgggaggctggggtgggaggattgcttgagctcaggaggcagaggttgcaaagagccaagattgccccacagcactccagcctgggcgacagagacagaccccatctcaa

SEQ ID NO: 587284 - DNA, 4001 bp, Homo sapiens
ggcttttgctaaggtcagcagtgcccaatacatgactaaatcatctttacatggcttctctgttgattgatgtggttagacaactatccttctttaaatattcattccttagcatctatgacactatacattcctgatttccttgatccacttgataacttttttcacaatcttttctgcaggtttatttttctctacttagccattaattggcatttctcaagagtttgtatcaaccctgcttctcttcttattcatttccaaaaacgcttgacaatctacggcttcaacttccagctatatgccattgatccccacccttcccccagtcctaccccaatttattttgcacctctaggctatacctttcctctgaagcgcaaaaacaaataatcaaatgtttcttcaaactgtcaatgtgtatgtcccaaatgcaccttatatgtccaaataatcatactcttcaacagttccatcaaacatagtcctcttctggtgttcctgtcttaatgaaattaatgatcattcatccgggcgcacaagtcagagccttaataacatttcaaacatctactatttattaattccccatagccatttgatcgccaaagacagttattactttttaagtttctcttacatccccatactactttgcttctgtaccatcaacatcctggcccaaactaccaacatagttctcttggaattttgtaaaagtttttataactattccaactacaacagtgccttctataataggaaaaaaaaagtgaaagttcttagtcctcaaatctgtgaaggaagcatagtaaagtcttaagttagtttcccaagtgcctgtagaaattatggtaattactcaaatacacaacaaagacatctatccacattacacattatcattaacaatcaccagctctggtttgattagagtaagtcgcttgagaaatggcagagaaaatggtaaatgacaagcactatttccatctcgctgcaacttctgctctgtctctgatctttcaaaaccagagtatctgatatgacttttctcagtcagtcttttccagattattctggggtcatctgaaagcctgggaaagtcttgatgtgcttctccaatacgggtgagaaagtctttggtatgaagatgttcatctattctctcttggagtagaaatgactccagtaaagtcttcttttgtttcagaaaggcagacagggccagctccgctcttttcctgttacaatagggacactgataagatatgtgttgcttagctgctgcctcctgttttggcgttgtcctcatgtttttaaagtagattctgttcaaaagttcatcgggtacagtacaactaaaggcatctctctctgaagcctctacatccaatccaagatgcagctttttatgtctgctgctcgtcttcttcttagaatcccctctacgatgaatcaaatttatcttcatggtgcaataagactgcagggcattcaattcttcatctgatacccgagtgatttctgttggaagtttggtgtctggttggtgccgttcaaagttagagtctttgagcttgaggtagttgatccattttttactcaacttcttttcataatttttatagtccaaaagctcagattgtgtgtctccttgttccaagcttggagtctgcttttccctctccagtttgctcccagaggtcaggggcgaggactgccgtcctccagaggagctgaatgagctggaagtctgtacctcatcagtagagttcttcaaagtctcagtctcatcagaaaggtttgcaagagcacttttgtccgtttgggccaattctgggcagatggccatcacaatgcatcaggctcggctcctcatctcctttgcccaggttaagactggctcaggaacccgtcaggagctgacccctccgggaatggatctcaatgccatcagctctgcggaggtcgtcttccgggagacgccttcccagctgtcttggcaacgcgggccgctcatgcgcagtgactggccaccatgcggcgtcccgccttttcctccgcgctccccagcgcccactgcgcttgcgctgcttgcgccgggttggcgattttgccctgtcttctgcactcctgcttctctttggtgctaaagtcgagtagtcaacgggaaaaccttgcaaactctgtttcccaggggtcagacaggtggcacacgtgtgtgagaccaatagagttaggtggcctgtgacaaatccgaacgtgtacgcccgcctaaatgcatctagatttaaaaatcaagcaaaacgcgctggacaagatgcacaagcaaaaacttgtctgcagtgtttatagccaagagacacctccttgtagagcatgtctttggggaaaagtcaaaatacagaaaccattctgtaagaagtagtgttctgtgctccagcattctgaggacctcgaagtttgggcggggtcgggggtggggagcaggggcgggggaggaccttaattttccaaatcagtttctctggccttttgtccatacaggtcccctctggctagcatatccacgcccgtcctcactcttaatatcgttaatttatcctcctcctccgagtcccatttcctcaggaagggcttaatacccacccctgccttaaactctttccagcatttttttttaaatagtgtccaactatgtgattgtatgagtatctgattatgaaggctgaaggcagaaatcatgtcggtgttgccgactagtatgagcccagcaatcagcagacacatagcaggtgttcaagaaatctctgttgagtgaatggctatggaacaaataaatcttaccttacacacgtccagaggatttggagaaataagtactataagttcagggaactctaaccttttttctaactgaatccccaaacttaggctattacacaggatatattttttattaatggattcatttaaaaaacacagtagagttttattaattatcgtgagaaattataaaatgttaactctagagatggacttttcctaggttataatagttcttgagtctaggacttagtcaatgtctaggataattttaagagcctagacacccttctttctcagttttgtctctctctctctttcttcctgtgtttcttggggattggggggtattattcaggtctagccagatatattccccaaatgttcattctggcaaaaagtgaaagtcaaatattcaaaaagcatctctcaagtatatgagccagcttcctgttgaagataaggagactccaacttcatttattcaacccaaattttattttatcatataatggtagtctttaaaaaagaggtggcatgtaatttgtgagtaactccaagtaatttccaatagggctcaatattttccttatttattatttcaaatctctgcctcattctctgaatatttacacattcatatttacacactattcatgttttagctatatcttatccataacattgaacaagggagctatacttaaaataaaatctatctgtgtcttctaacatgccaaatgtctggggtaatctgtcttttttataatcgtgtcttaaatttctcttgatttttaaaaataactttatcctagaaggagatatatgtgggtgggaaattctataattaatttccttgtaatattcagcgtgacccagtggacagttttacattctagtaagtgtgttatctaaggaagaaaatttctcaacagtactatatttatcaaataagattcatgaaaacacaggtcaaagtttgattttaaacaaatatgaagagtaatagttttcctttggaaatctcaatcttcttgccatctctcaggggctgttgggaatgtcaaaatgctttgtggaccaagctgtggctgaaggctgcttgtggtggggattgggagatatgaagaatagaaaagagagtccagtcaggctctcttggcctaaccttgcta

SEQ ID NO: 587285 - DNA, 4001 bp, Homo sapiens
ggaacacacgcagccggcttccccactgcccagcggggcatagtgccaggaagggcccccgtagctgcccacctcctctgcagaggtggccgtgcacaaatggaactggggtgcagaaagaacctatgacacaacccatcaattaggggcagggagtgccccacccagagagagctccagggagaaccagaggagctaggctgtccatcccactcttaaacccagcctgagagtgagcactcaccgcctcttcttccaggcctgcctctaggtctgtgtctgcctccatggactcctgttgccctgctccaaggggcacttcacgctcaggcttgcttgccagccgcagggagcggtgttgtcctgacaagctggtgggagctgttgggagccggcgggaccgctccaacacctcccccagcttctggctggccaggagtcggcctacctgggcggggggctcagaactccctgaggattcaaagtccagggagtcctgagaaaggcccggtaaggcggccagggggctgtccccaactgccatctccactcctgagtcccgggaggccagtttgagaaagagtgcctccctgccgacacctctgaacttgtcacctctctcccaggatgagcacccgtgggcagcgtcggggatccgtctgtaggtgctggtgactccaggcactatgcagccccgtgccaggccctcgccagccccatctgcatggagagtcagcgtcaggctgggcaggccacccccaacacccccagcattcctgaaggctggcagcactgccccagggagaagtgtcccggagcagtgaggaagggcggtcactggacagccacgggcagcccggatatggccccagctgtctgggagatgtgtggatgggattcccttcgcaacggttgttagcgacagggaacccgtgctctgagctgtgtggtaggcaaagccctggcaggccacatccatcaatcccttagacggcctgcgcctgcgcttcccacctaggatcagcccacgatctcccgagtcagaagtagggagccacaggctcttccgctgctccccaagcgggagtaggactgtatccagcttcagggagaggggagagggtacagagaggaaagcctgggatccaacctgctctctgggggcccctgcggcatcaggatgccaggtgaagtctctcctgcagctcaccgggagagtgataaaaatcaccgctataaccgatttgggcttttgttgtaagtgagcaatagtgaagattttatgaaaagtttaaaatgaaagaactgaagtgaaagaaagggacgaaggggcagcattagcaccccctcactgtcacctccgccaggccctctggcgacggggcgtcctggcggaatgaacggtacgggaaacaggctaggggggcggggacgagctgcggggcacgcgggagccgaatgccaacccaggcccctctgggcaaggaagtgggccaggaggtcactgggtgggagaggggtccgcagccacggagggggctggggcgcgggcggattcccacatcctcagaaggagcgggaaggcgagggaagcggagccggaggaagtggggcggaggcggtggctggtttaacgcctgggcccaaaggggttccagcctgcatggcgtcccctgatgaccgcccctccagggaggcggcgagggaggcgcagcggcgcgggctccgcccgcggggtgcgcggggctgggcaagaaactgagagagggtgcccggcttgggggcgggaagcggctccggggcaggggggagcccggccagcctgggggtgggtgactcaccccggccgtccacggcgaaggcgcgccgccggcccatcatggcccgctcccggccccggccccggccaatgcagccgcccgaggatcccggcccgagtccccgcggagctcgggcagctcagggagcgcgtcccgacccagctgggcgcggcccccagacactcccagcggggctgggggggcggggagcggggctgggggggcggggggcggggcggtggggggcgtggcctagggggaggagagaggaagagcgagacgaggaagggaggggcgaggagagaggggaggggcgagacgagggaggggaggggcgaggcaaggtaggggagcggcgagaggaggggaggggcgaggggaagggggaggggcgaggagaagggggcgaggagaaaggggcggggcaagacgagggatgagaggaacgaggcgagggaggggaaaggagagggaggggaggggcgaggagagggaggggaggggcgaggaagaggagggcgaggggaggggagaggagagggtggggaggggagagggaggggagaggggaggggcgaggagagggtgggcagaggagagggaggggagaggggagaggggaggaaaggagaggggagaggggaggagaggagaggggagagggaaaggggagaggagagggaggggaggggagaggagagggaggggaggggagaggagaggggaggggcgagaggagggaggggaggggcgagaggagggaaggcaagggtgccaggtggggggcgcaggtggccgggtcgccaagaacgaggtcgaaggcacggactgggtggcgcccccaactgtggctgtggccaaaataagggtcccgatcagctgttctgcgaggacccggcccccgcctggggacgccgtctggctcggggcgccggtccgcccggccccgcgggttcacacgcagcgtccgtcttcctgccgcggacttagagccggggctggctggaggaccggacaagagccaggaaggaaatgggagccccacgtgctggcggtgggaagagcgctgaccaggacgcgggcacccggcgctccctagcagtgtggcttgggggccagtctcttggccgctcggaaacctgggcgatgggaggggaaacgatcctgcccaccgggaaatcttttacaactgcagaacgcgcgtgtgtcctcagctagatctgaaccccctcccggtcccctgcctctttctcatcccgggctccctaaagctggggactgggtaggtctcaaggtctggaaagatgcgagccagcggggagccgcctggagactgggccaaagtgtaaatgtccccctgttcccacctcaccctgcctttggcccgtgggattccacccctcagtccccaacctaaaaggagcccaagaagctactgaagatgagagagagcctggtgaccagactggggctggtgtcctctaaagaaggcacctcctccagagggagggggcagggctggaaaaatcccagcaggacccaaatcccccggaggcagataagggagctggaggacgtgcagactagcacctggacctctaggggaggggagaggctggagccagagccactggaaggaagtggctgtttaccgggaggggtaagacagtctgtgcatccccttccctttgctcctttctggaaccagtccccaaacacccactgcaggagcctttatcagagagccacaaactatcagattttaaaactttataaaatggggaaactgaggcccacagccaatctctgcgcaggccagccgaatgacagccaagtgccagaattgctggccatgtctcaacagagtcacattcaagcccaggcccttccctgctagccatgggtcctctgggttgcccccaccctgcccagtcctcctagacagtacccattccgcttctcacaggcagagagagaaccagagtgctgggtctccaggaactgccttatgcaagaccaagaagatgtgtggaatcacaccccggccgtgccagagccctgccagccctccctgggtaggagggagcccagactccctccaaagtaagagggtgggggagggagcctttgccagatcgcgccctgaatttggagaatgtggggcgggattccaaacagtct

SEQ ID NO: 587286 - DNA, 4001 bp, Homo sapiens
ctatacaaaaaaatggtatagtattgcttagttcaggactggattactgctgaagtccctaggtccatttgttcaaaccactgtttgtcaaactatgcccatggaccaaatcaggccaagcacctgtccttgtagtaaagtttaattggaggccaagtgcaggcgcggtggctcacacctataatcccagcactttgggaggcgaaggcagagaccagcctcaccatggtgaaaccctgtctctactacaaatacaaaaattagctgggcgtggtggcacatgcctgtgatcccagctactcgggagactgaggaaggagaatcgcttgaatccggaaggcgaaggttgcagtgagccaagattgcaccagtgcactccagcctgagtgacagagcaagactctgtctcaaaaaaattaattaattaaaaaataaagtttaattggaatacagttatgtccattcaatcatatgctgatatggctgctttcctgctataactatgacccacaaagtccaaaatatttagtgtccgacctttaacagaaagtctgccaactcctggcttaagccatctgcacagtggctatctggcaccaagctatgcgatcgaccttcccaatgttaaaaaccttcaacagttttcccaatgtataaggggcaacgtgccttggcttggcatattactggcactctgaatctaccctaaatctgccacacatatctcctgttacgtccctataaacactgctctagccagcctggtctaactgttctcttgcacagacaccttgaacattcttccttttttacctttgctcagtcgtagtcttgactgaaatttatatcttccttcaatgtagccttactacattgtaagtaattaaggaactacttaactgaaacagcaatgcttttgaacgccaacagtattcctcctacttaaaaaagaatgcagtagaaaatacatggttattacagaagatgcaaaaaataaaatacacataataaaacccctcaaatgaagtactctaaaatcattccaagccgggcgcggtggctcatgcctgtaatcccagcactttgggaggccgaggcggacggatcacttgaggccaggagttcgagaccaccctggccaacatgatgaaaccccgtttccactaaaaaaaattaaaattagccgggcgtggtgacgcgcgcctctaatcccagctactcgggaggctgagacacgaggaggcggaggttgcagtgagccgagatcacgccactgcacaccagcctgggcgacagactgagactcagtctcaaaaataaataaataaaaattaaaataaaataattacaatagtaaccaaaatccaatcattcatctagtataaatcaattgctatatgccacgtgtggtagagaacctatattttatacacaaaaaatatatatggaacataaataatgacagtatatatacggaacatacacagacatgataggtatattgtacatgacactacctataatatacacatggaccatgaacagacagtctacaagtggagaggtttactagagctgtagacctgagcaaggttcgtggagaaagtaatacactagtgggggtgtgcgagtggagggaaattctctgaaaaccacgtagaaactgatcatgaaagacacagcccaaaactgggaccccgtcaggagatgaaagcccaacaagcaccggggtttcgggcctgctacccagtagggctgcctgaggcagagcgcgacggaaccgagcctacaggccacagcggtacgagaccggcccaatccaaccccgacccctgcaaacttcacgccagccctccagaaaacttaatttattaaactctcaccagaagtttaacacttgcgtgcagctttttaagctccaggtaacaccatctggcacgtacggcgtctaggaagttccggggaggatgaaccagtcaggattccgctcacgagccgtagctccgcccaccgaacggagccccgtccataggcggaagtcccgcccatagagtgagttcccacccacctggcgtagtcccgcccatagagccaagtctaaggagcaaggtgcagtgaaaaagcgaagccccacccatagagcgaggttcggaagtccagtctcattagcatcccttgtcttccgcggtgttgcagacttatcctcagctcaagcgagtttggggcgttatggagccagccaagtctccccttgctggcgtgggtacttgtgcagaaacttcccgaggtgcttctgagactgcacagtgaagaccgccgcaccggaggtcagcgctccgccgcggactcccggctgactctgccactctcccaggaggaggcgctgtgcacctctgggtggtttccagggctcggctggcggtagagggagccttgaggttggaaaagatctagagctataatctccgaaaggaagatttgtaatgcactgcgagttagaaatgtttttctcactgcagcttccttgtttcaaaaagagaatttttgacagcactgcaaaggcacaagaaaccaggcacagtataaaatatacaaataaaacaggtaccaaggaacttaaaacattcaacccataacgtcgtctaggtttttctgctttaagaaaattgactcaattcttccaagagaataaccctattaaaggtaagttttcacatgtgcctctatttattttgttgaggtcataggaaaagctggatttcaaacaaacgtagatgtaagaattaaatagaggagagaagcacgaagggtggctttatagtcaacagggacaggtttattttaaataaacctgagactggcagctggccaagttaggtcagagccacactctcttacagactaagagtttttaaggattcagggtgggagagtttaacagaggcttggactgcttctgtgtctctttgctgtgcttatctgggagggagagttgtgtgtctgttcccatacatctttctgcagctgcaggcatacccgcagctaaaagtctgcttttagcttccctatcttagtacacctgaagggaaaggaatgtgcttattaaggcccactgtttcactggggctcattgtatgagggtgaggtttggtagttagccaagagattttccccctacttcactctgcctgagctgtcttatctgtgttttactgactgctctttctatctgcttgtaattagaagagaagtgatttccttgaaattcatgaggctagaaagggagctggaacttaaaaatggcggtgtttgtccgagatgacggtgctcctgctctgtcagtaaaactgacatttatatgccattttgtagcttacaaaagatttcagcctacactatgctcaaaataaggtgataaaaccactcctgttttgcaagtgatgatactactaaggttcagagtttaagccgtgtgctggcagccacacaactaactagaaattgacaaagccagacggttttgtaaaactaagcatttttttaaaacagtttttaaaaaggttttgtaaacttgataattcgcaaatccacattggttagcacttggtcaagtcctctttccaacaaaccaggcacttgcctgcttacagaaagataagcaatttttgcaataaatcatttaattatgcccatcacaaaaaaaattaaggaacagaatatactaaggggagaggaataattgcttgccaatgtatgtttattcaaacttttgtattctttctgacgatccacctgttaaaaacacctaaaaatgctggtataaaatgcccataaagtgtaagagcaaaacaaaaacagaaaaccgttagacttttttataaggccagagttattcacaaatactgaggtgaataagttgggtacaattatttggttctttgaatgtgaggctattgatatatatatacagaaggcaaagaaataaatgtaacagaacgaca

SEQ ID NO: 587287 - DNA, 4001 bp, Homo sapiens
aatgacatgggaactgcagggtatgatgtgggggttgcagggcatgatataggggctacggggtgtgatatgggggctatagggtgtgatatgggggctgtggggtgtgatatgggggttgcagggcatgatatgggggctgcatggtgtgatatgggggttgcagggcatgatatgggggctacagggtgtgctatgggggttgcaggatatgatatgggggctacagggtgtgatatgggggctgcggggtgtgatatgggggttgcagggcatgatatgggggctacagggtgtgctatgggggttgcaggatatgatatgggggctacagggtgtgatatgggggctgcggggtgtgatatgggggctgcagggtatgatatgagggttgtggggtatgatatggggttgtggggcatgatatgagggctacagggtgtgatatgggggctgcaggctgtgatatgggggctgcagggtgtgatgtgtggtctgtgggatgtgatatgggggctgcagggtatgatatgggggttgcagggtatgacatgatggttgtggggtatgatatgggggttgcggggtatgatatgaaggttgtggggtatgatatgggggttgcggggtatgatgtgaaggttgtggggtatgatatgggggttgtgggatatgatatgggggtcggagggtatgatatggggctgcagggtatgatatcgaggttgcagggtatgatatggaggctggagagtgtgatatgggggttgcagggtataatatggggttgaggagttgagaagccatctctactgggtaagacacttttggggtccccacagtggtgctccagagccctgaagagtaactaggtatgtgggtacccctgggaagagctgtgctttggtttctgggcagcactccctcctcctgggacttgctcttcttctaggactttctttcctctgagagttctcatgctggccactgcagcccaggttttgtgtacctccagcaggcctcaggttctgaaatacgatccctatccccctgcctaaaataaaatttgactttcctgagtctactcttaactgactgcagtagaggcattgatctgacaatgaaatttatactacagtgtaagtgactgaccaagaaggggcttggtgaggtaatgctttagcagaaggaatgagtcttgcttggtgaaaattcagacacacgggcaggccaagaggaaaaggtaaacttttttccctgcctagaagtaaaaacccattttacttgagagttcagctggcccttctggaaagttcttataggctcccagcagatgtaggagaagcaagtgccacttaaaggaagtggcaaaaaaatgtttggggtgcagcagagacccacccaccacacgcaagagtgttgctttcctgaggcaagggatcctctggctgggaggaccccaagggaccctggaggaccaatggtggccttagtgacagagggaggcctagagtcctgtcctcggcccccagagactcctcttccactgccaccactcttctgcctaatctagacagcaccccctagaaagcagcagagcctcccccaacacactccctgcacacagtggctcgcaggaccctcagggtcccagaggaggcaggcacagtccctcacttcccttcaggcaggatctgctccttctgggcctgcatgtggcttgaaaaacagcccacaaggtccaggggctggtaagccctggcctgaagtttgggccccacatctcgtcacagcctcagaggtgctgtgctgagccggggtggctgccccggggtctcctgaagaggcgcttccagtgcccacctccctatgtgcccaggatgagccagtttctgtttaaaagccacattttctcttccttcacctgaagttggaagacttctttcactccctggggtgttaagagtgccatggcccctgcatctggttgccaggagacggagccagactgactcagagtttccggaaccctgggggtggccagtgccagctttgttaggtcacgaatggcttctcccaggcttctctcctcccggcccctcctgcgatgcgctgggcctggtcacctgcacctgctcagggacaggaacccccccttgcctctccctcataacctgttctccttcaggaagtgagcattctgaggcttcccataaacacacacacacacacacacacacacacacacacactcttgcacacacatagacacatgcacacacggaggcacacacatgtacacacacgtgcacacacacatgcatgcgcgcgcacacgcatgcacacatgctgcccgtcatcctcatgttcttctgactgtagcctcatgcctcctgcctgccgacaggtcggggtgtttgtctccacggaaaggactgcccgggcttgctgcctccacgtcctccctgactcctcctattagggtctggcctccccgacctcctccactggccagtagcatccatggctctgtttctggtgtcatgactttgctttggggtagagcaaacagttcttcaggggtgtccccaagtgcagtgcccaagcccctgaaggcggcgattgggaggggttcgctccttctccgggccagccttgctcttctctgtcctggaagtcactggcacccaccggttgcctgggaggcaagtccttccttcctctgcctcactgcccagagtcccagtgaggaaagcctggtcctactcgccagggttggtgggcagctgcccaggacccctggctccccaggtcaccccatttccccagggggttgtcttggaagaggctctggccatcctgaaccgtcatcctccttcagccacgtgactgcgtcaaggacccgcccaccttcctcccgtcgtgatggtgatatttcagggccctcactgcccttcctggccacctagtcttcaatgactttatccaaccacgtgacttcaatgtccatccacagaaaatgactcacacatttacgcagtggcggtgttcacccctctctgtcttggagtgtgcgactcaccacacctctccccaaagaacggatacctgcggacctgcgccgcctgtggggtgtccaggggtcctcgggggcttctgagtgtttggggtgtgtcgctggcaggagtcctgatccggggtcagaagggggtctccatgtccaggctcctctggcaggggctgtcctgaatgcagtgctaggggtgtcccccaggctgacaccatgccttggccctcaggtggagcccctcactcgagtccttcccaagtctgtggccccgggacctccccaggatgcagctgggatgggtctccataccccaaggctagagccccttctcatcccgtgtcctatcctgctccattttctcagagtcagtattagtacagcgctttttgctgcaattgtcagagactcagcctgaccttaggccaaatgcgaatgtgctgtctcacatgactgagaaatctcacgtctgcttaaggtaggcgggggccaggtgctggcacggcgctgtcaggaacgcctccctgacccctggttctgcttgcctgttgttcatccattctcagggtcctccctaaatgcacttctaaatccccccacctggccgactcttaactgacaccaccaaactcagcctctacgaaaattagttcttctggaaaaccctccagatccctcttcaaccctggctgatcaggtgccctccactgctcaagccatgcagtggcatgatcatggctcactgcagcctccaactcttggcctcaagtgatcctcctgcctcagcctcccgagtgtctgggactaccggtgaacacccaccacgcctggataattattcttaatattttttttgtagagatggggtctcactatgttgcccaggctggtcccaaactcctagcctcaagccatccccctgccttggcctcct

SEQ ID NO: 587288 - DNA, 4001 bp, Homo sapiens
gtagataaactttagtgtgactggaatagggattgacaattctttactgaaaggacataggaaagaagaattatagatatggtgctattatgaaaatgtcataatggcaaaaaactagaatttcagcaaaggagacagaaattaaggctagaaggaggctccaatgcaaccaaataccaaaaacctgtaggagagaagtctgaggaaatgcccatctaggatactttatttgcttttctactgatttaaatcctatggataaaaaggaaagtgagactgagattgcttgactattgaataaataacgtagggaaaggcagtggcttacacctgtaatcccagcaatttgggaggccgaggcgggcagatcacttgaggttaggagtttgagaccagcctggctaacaacagtagagaaaccctgtctctactaaaaatacaaaattaggccggcatggtggcacacgtctgtaatcccagctagctgggaggctgaggcaggagaatcgctttaacccgggaggtggaggttggggtgacccgagatcgcgccactgcactccagcatgggcaacaaactccacctcaaaaaaaaaaaaaagaaaagaaaaaaatcacttcattttagaatttatattaaattctatgcacctgtacagcacatcagatctgacaaagtattttcatatacattatctcatttcactcccacgataactctgtgagccagcatgtattatttttctgaagggacaaataaggagctgacaccttcaaggcaagtggttaaagccaacactggaattcaagagtcctatctcataaccagagtttttttaatgttctgccacatgatttccaagcccaatccctgttttgagtctacatgatccagggctgaaggtaactttgaaagatcgtatgtgataaggagaaaatgcaactgaaataaccaaaaacacaattcagtaattatcgagtgcctggcatcttgtcagtacaattgtgaggaacgaatgagacagtatatgcgaaggaacccaccacagtgcccggaacacttccgtattttccataaatattagttttgactgatgaactatttacactcatgaaagaataggaagtaatactctactaattcaaaaatattcgcggagtcactattattaataaaaactgttaggcactgccaagggcatcaagaacccatgctggtgcgatcatttagcactccgggtctcaggactttgtgggaatactgacaagtgctttaagtagaagctaaatagagggaagggggccaaagacaaaaatatttggctggaagacgaaatcagaaaagacttcctagaggagatgacatttaagatgtgccttgaaaaacggatataactgaaggactttaaccatcagcgcggggttggtacgggcagggggagctcgccgaagagggaggggagagtgggtttgccggaggtcaccgttttgggaggcctgactgcccagctgtaagagcagtgaagacaaacgggaggtaccggagattgcagggcaggggcgttgagaccagccggcagcagccaggccggccaaatgccaagtgggagtcaagccgcttacaacgcggggattctcgcccatggacccggaatggggcctgggaaagccgcttccccgtggaggaggagggacggcgggggacgcggcgggcgctggagcctgccagggtttgcgttcgcgcggacggaggggccgaggccggggccggggccccgcggagggcgaggcctggggcccgggataaggcgaagaggccccagcttctcacctgcggctcgcagagcttggcgcagtaggacgcgggcggtcctgaccgccgctccggcctctcctcgaacaccgagtcctcgaactcgccgccgaacaaccagcacccggaatccatctcgcgcccgcggcgggggcaacgaggaagcggggcccgccggaaaaggcggggcttccacggcccagagcgcggcacgctgggacttgtagtctttgagggcgacgcggggacgtggccgctgctggttgggagtagtggttgagctgagatgattatctgacccactaactgaccgaaccccaggacggaggttttgacttctctgtgtcaggagatggacagaatgatccttacctgcacgcatcaaaaagcacgctggccccagagtagctgtttaaaactcgcaggtacctttttaaaaattaaaataagaggccgggcgcggtggctcaagcctgtaatcccagcactttgggaggccaaggtgggcggatcacttgaggtcgggagttcgagaccagcctgaccaacattgagtaaccaggtctgtactgaaaatacaaaaattagccggccgtagtggcgcgcgcctgtaatcccagctactcggtaggctgaggcaggagaatcgcttgaacccgggaggcggaggttgcggtgagccaagatcgcatcattgcactccagcctaggcaacaagagtgaaacttcgtctcaaaataaaaaataaaataaaataaaataaataaaataatttcgagacagggtctcgctctgtcgcccaggttggagtgcagtggtgagatcatggctcactgcagcctcgaactcccagactcaacctatcatcccgcctcagtcccccaagtagctggggctacaggcgcgcgccaccatgaccgtctaacttgtgtattttttgtggagactgggtttccctacgttgcccaggctggtctcgaacctgatctcaagcgatccgcccacctcgttctcccaaagtgctgggattataggcgtgagccactaagcccggtgcaagtaccaattgtcaaccactgtgcattcccgtcactgtgttaagcacattttttcttttcggctaacaaccaccttatgaaagccaaagtgattcccattttgcaaatcctattttgaagatattggagtttggagaggttaagtaacttgttaagtttcggtcattatgtggctgaaacttgggaaatacagaaatgaatgcgtactctccgtgcttccggacaagagacactaccaccaataacaaagaccggagtcattcacgcatttatgaaagaaaagacacagaaatataccgtgggaggctagatcagggagcattcattcgacctggagaacaccaaatctcaaaattctaagactaacatttactacaattcttatacttttaagatatttcttgactctagaaagtaaagattgttgacaaaatgctggccaatactgtacagcacaatattgtgccatattacacagtaggaaataaacataaaggttttccccgatttttttcctgttcctcttcactctcaccagtttctcttccaccatttatctgtcttccaggtttcttttttaaaattttatctgtttatttatttctgagacagggtctcgctctgtcgcccaggctggggtgcagaggcgcaatttcggctcactgcgtcctcaacctccttggctcaagccatcctcccacctcagcctcccgcgggccaccacacactgctacttttttgtattttcagtagagaggggttctttcatgttgaccaggttcagcgttctttcttcaacccaactttttcctccacaaactcacctaatccactcccccaggtttcagaatccatctctctgctaattattgccaaaatctagaaccagctcatttatccagcagcctcaggtgggaggctccagctgaacagcctccaggcattagttactgatgaatgaattcatcaagatccacttaagaacatttttctggccgggagtggtggctcacgcctgtaatcccagcactttgggaggccaaggctggtggatcacctgaggtcgggagttcgagaccagcctggccaacatggagaaaccccatctctactaaaaatacaaaattagc

SEQ ID NO: 587289 - DNA, 4001 bp, Homo sapiens
ccgccgccagtgcctgacgtctcgagcgcaggccaatccggagggcgccggagtcgggtgcgcggggggcgcgcgccgtggggagcggggtgtccgggagggccgggccgcggcagcaccaaggacagcgccgggtgggggcggggccgagcgcgcaggcgcactaggctgccgcgagcgcgggtggcgcgggctttccggggcgtggagtcccgggggagcggggcgagaggcgcccgcggcctcccgcctttcccttggccccgctcagggcgaccgagccgcgagcagcagcggggccaggtccatggtgagggcgaggcggcggccctgccagcgcacgtgcgagggcagcgcaggcgcgccgggcccgtactcgaagcaggcgctgagctcgaaggccagggcggagcgcaccaggcccacgccgcccgcacgctccggcgccgggtggtacaggcgcccgttggcggccaggggcagcaggcgcgccggctcgaagggcacggccagggcctcgccaccgccgcagtaggagaggcgcggaggcccgtggtccgcggtcagcaggtgcgtgaagaccaccggccggtcctcgcagcgcaggaagttgcgctctctgccgcagggcgagaggaaggggaaagcggcctcgtagcgcccgctgcggttgggtctcaggcgggagaagaaggtgaccaggaactgcgggtctgggggatgaagggtgcgtgtactcagcgcgctgggctcccaaggcctccgggcccaggaccataccgagggcaggcgccgacggtaagaggttcgcctggcctcactcagcggggctcctgagcgcaggacgcccactccttggtgcgctgggcccgtcggcagagtcggggagcccatcaggggctgcccggaagggagaaagaaggggctggagagggaggcacagcattacctttgaagcaggtgatgaaattcttcattttggaatcatccaggaaaagctgcagatagagggccaggccgtgataagtcccagcgtgcaggtgggggcggggaagctcaggaggtcctgaagctcgggaggtcctgaaccggcccgagcccacttttcctgcttgtctgtgcacaccgcatgcagggaggcgcgtgaaaggtaaacctgggggccccgccgacttatccgcgtctatgcgcacctctgctccctggtcagccaattctttcccgcaccttttccctcttttcaagtttgtaatcagttgtaccacctcctccgcggagactacctggcctgctgcctcccggacatgcagctgccttttgacagggcttccaaaaaaaggcagggcggcccgggtgtctccctggcagcggcgagaagtcagcgccggggctggggacttgtaggacagagtccgaagctgcacaacgcagcagggacgcggcccatgtaggagcctcggcccggaccgacccaactccccgtctttccagcgcgctctcctccagctctgaggagtcgaggttgcccaccgcgcaggccccgcccacccacccaccccctggaacgtccctccggccccgcccctcgagcaatggtcccgcccacagagccacgcccccccccccgccccgcccagagacctctcccggccccgcctctcgagcaacggccctgcccccgcccacctggccctggtggtccacgtagtagaaatactcgcgggtccgcggctccggactctggccctgcgtgtaggaaacgcccccatccccgctgcaggcccgggctccccgcgaccgcgccaaggccagggtccggagcgtcccgcaaggcggccacattctcctcccgcgccggaagcgaccagcaggtcacgccgggggcggtgctgcgcgaactcgcgcctgcccgcagtagccccgcgcttcgcgttccggcggcgcccgcctccgcgacccgggcccggcgctcttccctctccctcgggcctcgggggctcgcccgccctggccttccgagaggcgtgtgccggtgacgccccttccggtccgccccgcgtctcttcccgcccccggccgcgcccacaaggaacgggaggacgcgcagggtccatgtgcactttattcactcgtgtcgtcgcctctcgggtccatgcgtcggggcgagcgtctcagccgggcgggaccgcaaaggccccgggaccacccgactgaggacgccgcccaggcctcggcagggctggggcttttgtttttaataaataaaaacggaactctaaaaaatatatatataaaaactggggagaaattaagttttacaacaattggaactcaaaattccaaaatggaaaatgtacaaactcggtcccccagcagctctggccccgagaacggacagtcccgggcccggcgccttcccgctcgctcgtctcctgcaggtctgggatggggatggggtagagcttggtttttggtcagaagccaagaaaaaagatcggagaagaaaagaaggaatgacctcaacttgctctgcacggaggacggggacggctcagagataaatagcatttaggttaaaactatgtcattagcaaatttagttcttatatctttccctctatttatatctctatacacggtgggctgcgatgcaggatagattctggatttacagttacacgaagaaaaaaatactctcgcccctcccccaccctgcccccagaatgcctgcccagccctgctccctaccccagaggactttggtttgggggcccccaccccacccaccgagagcctgccaggccccgggcccactgtcctggagcccccaaactcctgagcagtcaccagctggggaccacgggccgagggagggagaggaggcggggacaggtcgggaagctctctcggggctgggaagagctgcaggccaggacgaggacaggagaaagggaaggagagaccggggcggctgggcaaggcccaggccagggcgcgcaggagccacagggaggcagcccggccccaaggaggcagcgtcgctcggctccaggacacagaaggcactttctcggagctgacccgcggccagcggagggcgaggcggtgcccgcgggaactggccgtgaggtggggggccagaggcgccctccccgccgctgctgtgccctggctgcaccctcagaccaggcagaagacgtggggagcgccggggccaggggcctgggggagtggagggggctccagggctgggccgggcgattctggcccctctgccgggagagcgagtgcggagttcggcctggctgggggcggcaggacatccctcctgtccccgggcgcccccgctacagcacaccctccatgaagctggtgtccaggtgctggatgagcacccgcaggaaggacatctccttgcgggtgttctcgaagatgacgcgcgggtcgtcggactggcagcgcaagcagttgggcgccatcaccatggccaggttgctgacatccatcttggtgaccgcgacgttggccggctgcacgaagacctggtggaggagcgagggtgggcgcggaggggcgggggcggggcggggaggggaaagcagcggggacccccggggagggaagtacctgcaggaagcggatgaggtagcacagcaccatgcggttgatgcggggcagcgcgtgcaccacggccaccgccgcctcggggctgtcgtagtgcgcgatgcactgctcgtagaactcgtgcgggatcaggggctcctccagctcccggtaccacagcttcagcagggacgctggggacacagcacggggctcagcggccctgctcggcgggcacccctgggccaaatggggtcccgtggcggacatgcatggaggggtgctgtgggggacaggctgggagggccggctcattctggacagggcccatctggccaggctgggccctgaccccagagggcctttcggctcctgggggcctgaactcgatcctggag

SEQ ID NO: 587290 - DNA, 4001 bp, Homo sapiens
tagtgcagacggggtttcaccatgttggtcaggctggtctcgaactcctgatctcaggtgatccacccccccctcagcctcccaaagtgctgggattacaggtgtgagccaccgcgctcggctgagaaggcatccttttacctccctttccagggcatgtttttagcagagccctgttgggaaaagcaccagtttatgaatgtagaacctgggcccaaatgtaagaccactccactccagatctagtctggagcagtgatttctctgcccctcccattctccttgcctcatgtgccctgagcacctcagccgcctccatggtcagtgacaagctgtaattggagtgaaagggctttgaagttctgataaatgagataataaatctctgctctccagggatgtagggcagtgtctgtgcctattgaatggcctcaacagtgctgtgtatatagtaactacttaattattatgaaataattattatgaaataagtggttgaagtgatccctttgaagttcaggtcaactctgagccatctgagaagaatgaatggaatgggtaattgaaacagataatccccaaacctcaacttactagttaatagggttaggctctttacctattaaaccctttgagatactcaatttgaaaactgctaaaataaatcccctactttcatttattttttcattgttgtggggcaggagaaattgagctgtgaaatggccaccaggaaggtggcaggatgacgagtcaggagtcctgtgtgagacatccgcaaacatctcataagcagcttctgaatcacacagcatcaaggctgccaaagtgcctggccaatcttggacctagagacctaagaatgggtctccctgtggactcctcctgacctgggtggggcaaggctcttggaaaataggtcaaatgactctcagtctagaaccgtctggccagagatgccccaactttgccttttgggctattcatcaaatccagcctttaggacgtgacatcagggtttcatttcatgggaagatctgggtgcattttagttaaaagaagtgatgtcatcacatccctgctgaaaaaaggaaaaaggacccactttgtgctgacataccgagtcctgggcagggaagtctggacagacacctgggtccacacctggcttttctaccagctagctctgtgactctgggaccattgtgtcagctttctctgccacagttcctccctctgcaaaacgaagggcttgaaatgcaggattctaagattgtggccatctctgactctgataacaaccccgtgagcctgaagaattcagcactgctgctccatagggggtttcagcaggaagcgggcacagatggctttctctggaacgtgttcagaaatgtggtgtgtgatgtacggtgtgaatgaagcgtggtgccctttaaacacagcttccccctgggagtgctctgagctcctcgggttctctggctctcattcacattccactgtcactctgggcactggcagccctcacgtgcttgtgcactgagcacacacacaccccgccctgactgacacacaattggtgactcacaactgacacaatcattacacacatggaatgactcagcggggacactcacatgcatgggctcacgctcaccgtgacgtgtagaagtggctgtgctcgtggcatcaggcacccccacagcagccttggtggaggctctcgccagcggcgtctgcaaatgatttgcattcttggctctttggaactgcctgttctttgtctctctgttcgctgctcaaccctttccttcccttctgtcccaaacttggctggttttagtctcttgctcccaagctcctcagccagcttcccggactggctcaggcagtctctaaggctcctgccaactccaagattgcttctaatcaactcctcagctgggaggagtcccttccccaggggtctcattccctccctgacctgagcatctcttcctgtcttcttcaggaagatcttcaatatctgtgccatttgagccagcccctttcgctagataaggagcacccagagctagtcacatgatagaaagtgctggcggcttctggagggtggtcttcagtgtctctgagggtgccctttctctttctggcagcccaggcagatagtagtgttggggttcttgaaaatcatctttgggagttgagcagaaccagctgttactggagaagcagagaaaaaagatgctgcacgtcccagccataatggtctgggagggacctaccccagagcgggaaccagggtggggaagcagtgcagaggaaagagaggcctgtgtccatggctgctggctgagttctgatgggaagataggggaacacgtcctggagctgcacttccttgcaattcatcttctgctttcagatttaaggttactttgcctagaatagctcctgtctttcctcttttcctgggggagccctcacacaggagagggagtgtggcagagtgtgatgtgaagtcaggggtataggtgtagcctctgctagtagctgtggtcctgggctagacattaaccactggagtctctgcttccttggctgtcagatgtcctaataccacctttctgtatcctctgatgtggtggcatagatcaggtgagctagtagatgtgacagtgctttgacaaattaaaagtggcacacaaataaaagtgagaatttgaacagcagcgaggagatggtggaggggctgcccacagaatgtcctgagggtctttgagggagacctgtagattcccctcctgaatatggggtaaagtccttgctggaatcccaaggctggatcaggacctcctttgactccggcaccagaggcccagacaaggacttgctaggcccctgctctggacccagctgtcattaagctgagtgttttcctggagagaggagaaggggtccttccatgtggattttccctaagtatagatgctggcccagcaatgccaagaactgagacaccctgtgcctagctcttggctggctgcttatagcttgaaatgcccttttcaactctgaaacttttagagtctggcaatccttgagagcgtttttttcctcctgcttgggtgagagctttatctttgacctcattctatccatctgaagaactagaatccagagggaatgaccttgctttggcagacccgagtcttcgtctctctgcctcaagtccttgccctgtgaatatcctcagctctccctgcaacttcaaatctggaaaaggcgccaggtgcagtggctcacgcctgtaatctcagcactttgggaggctgaggatggtggatcacctgaggtcaggagttcgagaccagcctgaccaacagtgaaacccctgtctctactaaaaatacaaaaattagcccagcgtggtggcgcgtgcctgtaatcccagctactcaggaagctgaggcagtagaatcatttgaacccaggaggcagaggtgcagtgagccaagatcgcaccatgcacttcagcctgggcaacagagcgagactctgtctcaaaaaaaaaaaaaaaaaaaaatctggaaaaggcttcttcagcaaacagacttataaaaatttccagttagccctttccttacaattggtctgctgtttttggatttaaggttactttgccaatgtgtctggccttaactgtcagttaaatatttaacacacatagcatgtactatgcatcagacacggttctaagcatttttctacaatattaattaatttttacaaaaccttttatggggtaggcattcttatccccattttgctgcataggactccaaggacagaggttaaataacatgcctaaagtggggcagattagcctacagtggcgggcgtggaattcaacccaggccacctgcctggggaaattagcctgtgaccccagctttcttctgcccactggtgggtggtgattccaacagcaacatatg

SEQ ID NO: 587291 - DNA, 4001 bp, Homo sapiens
tttatatcagcttatttaacttactgtcaggaaaatatgctgattgttctaataattggttaattgagagcattctgtataaaccacacatgggctatcaatttcaaagagttaccaaaaaaagtttactccatctcagggctactttaatatggttttctctgtcttcggtgggcagagaagaccttacaagaatatcacgagcttggaatctgcctaactatattattgtacaataagcacacattaattaagcagtaccaataatcaacatgaaaaaataaaaacaagcttttactattaaagcattactattgatttttataaacaccaaaataatatccctcctaggcccattacacaggtaataataaccattcatttaattaatactgacacagtaaaaaatttagagtacttataacacccacattaatatcaagaaggttcattagagctaatactacaataaatataaaatgaattagtaatgattacaccattgttttaaagcattcttatttgtacttttgtatttactttaatcaccatcactctaaatggcagtgaacaaaagccaggctgggcatatttatgtagaaataatgaggcatataaatgcaactcagtgaaagccatgcacatcttatctgcatttgttcatcaacacacccatttgtgtggaaggttactaaaaaagacatactctttataacatttgtgaggaaaattaaaatcatcttgcaattggtcctcctctttggtttgaaattgttccttctgaatacctccattctgattcaagatgctagcagagtgcctggcacacagtaggaagatcataaatatttgttaaataatgtccatgcctccatgttacattctcgtctggaaggactactggctacacttgagtatgtttaattttaactttgatttcaaagaatctgttgatgattgtctacatttacaatcaatgttggacagattttatttactagggggcaaaagggaaaaggagagaaatctctctatttctgccagctaaccaaagtggggcaaagaatgtaatagataactccttctttcagaatgggtcagtagagaggaaaatcaaaagaaaaagctataaaggtgtattttacattctcttttcccattccttctttcattttttttttttttttttttttggagatggagtcttgccctgtcgcccaggctggagtgcggtggtgcaatctcgtctcactgcaagctccgtctcccaggttcacaccattctcctgcctcagcgtcccgagtagctgggactacaggcgcccgccaccacgcccagctaattttttgtacttttagtagagacagggtttcaccgtgttagccaggatggtctcgatctcctgacctcgtgatccgcccgcctcagcctcccaaagtgctaggattacaggcgtgacctactgcaccccgccctctcttcccattctttatggctgaatcattatcttttaggatgtcaggaagctgattgtttcaattactctgataaaagaaggcaaagaggaaaagaaacaacaaaactctcctctcttccttttatacccttgctaatgacaaacatttccacatgggctcttacagaatcttaagtcctgattacatctgaactagagctgaatggataacatagttaagttgctattattttaaaaagttacttgtatttgctcttaagtactgggtagtcagaaacctgccattttatgaatattgacaatgtgataaagggacaattcctccaaaataagtcacagagtcctgagcatcttggaggggaaaatgtgggtgtttttggtgggtagaaaatggatacttacttgtctttggagatcgggttctctttggagttcgcatgctgctggatgaatgctgtcaaagtcctggcccatgcttgcttgccctctaaatcctctgccctagcttcttgttgctttgattttatgttctctctactcacatgactatttgtccagcagagaagctaaggatttgctaactgtgaagaaaaagattatgtgtttcacaacactgcaagcctcgaaaccacagaagcagtgagcaagctaacatttattctaaagataaacatgaaatccaggtaaagaaacaaagcacaatttattatcctattgatcactaagagactaatgtcttttcctttcctaaagacatttatccaataagctttgtatacaccacagcaacaatctgtaacccattacagaagtgtcactaacatagcgttaattaccacagtatgtgacttggaaatggtatcttgagtaaagtgggatatttggtccacagcccaacatcagggtcttttttgtctccagcttgaggccattctccacctctgggtcaggaaataggatattctaaggagttaagaagtaggttcctgatgtttcttcctttcctttctcagtttatacctccaggtcaacactctcatctgatctcagaagaattcatcattttttgaggacctactttgtgctaggaactttatgtaaatgtgttcttttagtctttatcactctgtaatatgttagtgtactcatttatcggtgtaattctatgtatataactcaataaactgataatacaaaaagaacttttaaattggtatgcccacctcaccaaagctctttttatttagtcatgaaatttcataactaaaggaagttcacaaattgaagactaaagattaaataacacaggtaataaatgacacacagcattaccattaattgcacagagccacctttgcagccactcctgtgggaggttatttgtaattacattgtatgctagacctgtatgtgaagtgaacagactttttctcaccatcctggtcaaaaatattttatttaataccagatctaaatacagactattttgctagatactagagaagttttaaggcttttgtctaatatgtgagaacacaagtctttctcattttagatcaagctattacctctcttcaatttgcatgttagcttttaagagcactcttggaaatcataaacgtacccaggcactctgccaccatctactttggtctgtagcatgatggaaaggagggtgagaatagggaaagtggatagatgagaatcaaaatagatgatgctctattctaaataaattagggagaaagagaatgtaagaagaaattttaaaaagtgaaaggttaatactgataataataataatatctaatctgtcagagtttactatgcagacacagtgctaaatgagttatacacattattcatttaaatcctcaggataatcccttcatttaggtgctatgatgatccccaaattgctaatgagacagctgaggtttaaaaaagttagtatctaatccaaactagctagtagatgacatctggattccaacccagaatgcttgcaccagtgcttgcacctctaatcattatgtgtcaggaagcagaaggagataaacagaaccagcaattacttcatggaaagagcaaatataagcctgtgttcctaatgccactggcatactacagaattaggagccagtattcaggagggggctgatccaggcaactgtcccatttgttgtttttgcagtcatgttgattgtctctccctctctctctcaggttaaatattcatattagtggagaaagaatgggctagacaataaacagttttggagcaaaagaaaaatttagccaacttcttatcgaagtatagcatgcatacagaaaagcaacgattagatgtttagttcaatgagttttcacaaagtgaacatacccctgcgtaacaattcccgtgtaataccagagacaccaagaaacaaaacttagctagtcctccagcagtcactctcatcccaatcacgaatgcccctaaggtgtaaccactaatctgattttaaaactgtgaattagttt

SEQ ID NO: 587292 - DNA, 4001 bp, Homo sapiens
taaaggatattttgatccaatgtctccaaaaaaactttctattaatacatactgagaaatggttgctgaatagtttttttcaagatcacacacacttaacaaatcatctttaaagaccaagttgtatgaatagaatattggtaaatcagttagttatttacagttgctattctacacctggcaatactaactatatcttaggttccttttctttttaaaaaatttacctaagtatgaatcttcaggccttatcagtcctgatattaccagtaaacctagaattgtctaaaatacaatgggataataagcagatacattgaccactttggccaaaatcttattaatcttattttttaattaagatgcctttttaaggtcctactacatactaaatataatttcatttaattttgagccatatatgaacggtggaagaaaattattattagtcccacttcacagataagaaacctgaggctcagaaaaataagagacatgcccaagtccacatagctactaagtgctagatattaggatttgactacaaagttcacacctttatatcaaaacttgcctatttgttacataaaagaaagatatctgactgtccatttattacatgtggacactgcgtgtatagatttaaaaattaatgtgaaaagtaacatttatttataaggccatgcagaataaattggtatatgctaataatatccatttcttcaatttaccatttttcttagaatactaaataaattagggagtactgtgctttcctcacgctacagacatggtatactgccatactaaccatagatcacagcatatgaaatatactatgcactgtttttagaagctgagtactatacttaaactccaatataaattctagtcttctttggaaagtactgatgctaccgctgccgttgagaaataagatcatataaagtgaaataatgaaatgaaaagaccatatttgaatttaccttgtgtataattcccatatgataaccagataaaatttcatctcaatttccaacttcaaaacattacaaagttaggattccttgaaacccaatactgcttgtaagtaaactgctcacactgacaaaatgatagatgaagagaaacatacaggaaacatcggggagtaagaaataaaccacctatgactcaagtggtgaaagacatttcacgttccatatatctggttgcactattaaggaaaaattaaaacgaaaatatcaaaaaactagaagcttggagagttccaacatatcttccatttcatgccttctctttataactaatttaattttttttttggtctatttgagggatttctcaaaacaaaacacaatttaacattcggatgggctaaagctgtccaggtaataggtgtctgtgattactttagtcatgtaactgtcctttccgtagctttgactaaaacaccagcaatgaaaaccttgtgccaccgggtggagggggcaaatcgtcttgaaagcctcccaccgcctggcaccaggtgctggggcagagccaaggggagctgtgtacttagctccttttttggcgatggctttggtctcggccacttgcccctccgtcgggctcccctggccccctacactttctttcccctcatccgacgctctcgctcccatcccactcccattcagggtccacagggtactgaaggggccctgagagatttcccgacccacctcagagcttctcttcctcgcctcaactttcccggggtcgggcctgggagacggcgcccacccgcctcctccacaccacggggcccgacttccgtcccccagtgtcgctcatcctccctagccacttaccgactcaaaatccacggggatttcggggcagcagcgtcgccgcgctcagcccacacgcggaggccgagcgccctgctgcccgtcggggaacggctcctgccgctggtccgctggctgaccgcggtggcggcggcggggggcgaggggcggggggcgaggggcggggggcggggcgggaggcggctccgaggggcacgaggcgggcccagggcgggcgcggggcgtggcctcgggcgctgagcctcgagagcagccgcacccctgccggggtagaaccgttaaaagggtggcgcgcgctttcccgggcgagctgggcgcgtggggttggagcggcgccacccagagccggtcgtctagggtaggaggccgcgagtgaggcgctgacaggctagccctcgacggggcgcgcccgcgtgaacggccttgggggccccagaccgtggccctgcttgtgcgaagactgggaggcgccaggcgggccgcctgctgggggcttggcggcgggttccaggcagcgtctgtgagggaggccgcctctgtgagggaggccgccgtcgtgctgacgactgagtccaccctactcctgtcccccgtcagagctgctggcaggcgctgctttccccttggtgcatttagtgggtgtcgggattcgggttggcagggaggaagatgtttgagacctggtttacctcagaccagggatacagcgtttcacacagactgccatcctgaaaggaacaaaatgaattaaggcaactccatccgaatcatttctttttaatcttcaccttcaatccttttgctaatttttcattatctttgagtgtccccagagggggactgtctgcttgtactgagggacgtggaggtggcagtccctcacgtccccaagcaccaaaaggacagttgaaaatgcactggcaaacactgaacggttttaagtggggcactatcaggatttaccattttggaaggtatgaagtttcacaagcacttccatgtatagtcaagttattggagctgtctccgtttagaaatggcttccagaaacactcctactatccactgagacaactcgcctggcatcagagacctagggtccagggtcagagatgggtcatgataaaagggcatcccttggggtgaggcaccagaagtctgcacagtggaatcaatatattccaaccaccagatgtagaaaatcttaagtgcaggatgtggttctcatccatctagtcacaacagaagttttcttcttcaggaatatacttaacaatgaagcatgtataattttatatacatcttacaataaaattattttgtgcatatcactgtatgaagtcagtagaaactattgtgacaaaaatgtaaattggaagaattccaattcagatcagtattagtaatttattgagaggaagagagaaattagactagacagactccttgattttttgataattgaggaagaaaaatgaaccatataaacatatcgaaacttttcaaaatcttattgataatgacataaaattttggcatctacaaggataatctagaattcatacctttacaacaagaacttgacaacaaacaggttaatgacttttagcaacttaaaggttagtcactgcctgagaaaacttgaagtgccctgaaatcacagagttcacctaagaaccttaagatgagtttccccaaatttagcaatactaaaaattggcattattaccaataacaaattgtgaaactgcaataacttttttaagctttcaataacaaaaaatacatgttgactaactttgctttgaaaagactaccacattattcattatcaccagggaaagtgcattacaaaattactgtcaaatgatgaggcaataaaaaaatgaaaactaaaaatataggaaaaacatagcaatggttcaggtagttaatttaaaatatcattttactgaatttctaaaatatttgtggtatttatcatctttttaaaaatctgtaatttgttgtcactgattttcttattctaagtaaatatttactttggtcaccgccccccatccctgcttcctgccctgctctggccactcaaagaattggagaatggattgagaaaaagcaacagtggaaatagatatcccagtt

SEQ ID NO: 587293 - DNA, 4001 bp, Homo sapiens
tttcctgcttttatgtaaataagaggtgtaaacagatgatcatcttagctagcaatgagagtcaaagaattatacttgaggcactgattttgattttctgtccacaaaattccataccaaatctgtaaaccatcaccttgaagcatcaagattgtttcttctactaacctcacatatccattgcacagagagacggtcaaattatttttaaaaattttcaaggcattaaatgaaaagaaaaaggagattaagaggttaaaggtttgggtgttctttgaactaaacatagagaatttttttgaaagtattctctacaaagcaagtgtagcacagcaacaaaaatggtatttaatgggactaaaattattatattgaatgttcaaaatgttattttgtaacttttgattttttcctcttttggaaaaaatagtttctgttggtcaaaaagcatatagactcttttttcatcaattagatttggggggtagaagggtggataaactgctgtctgagtacctttaatggaaacctggtaagaaagttgaagaaaaagtatagcaacacattcaaagccaaagagggataaatcattgagtagtttgcattttactattttcaagaattattggctgggcgtggtggcttacgcctgtaatcccagcactttgggagtccgaggtgggcagatcacaaggtcaggagatcgagaccatcctggccaacatggtgaaatcccatctctactaaaaataacaaaaatctgctgcgcatggcagtgcatgcctgtcatcccagctactcagcaggctgaggcaggtgaatcacttgaacttgggaggcagaggctgcagtgagccaacatcacaccactgcactccagcctggtgacaaagctagactccatctcaaaaaaaaaaaaaaaaaaaaaagaattatttctccatcaataaagatggaagcagaattcagaataaacaagaaatataattaacttgaaagtaagggggaataactattaatatactcatctacatgtcaaaagttatcaaactagtcttcattgagcagctatgggatttaagatactctccacataactcagtcaaaaataaagttttggttagaattttttttttttttttttgagacaaggtatcactttgttgcccagactgaagtacagtggcatggtcatggctcactgcagcctcaccctctccaggctcaggtgatccttctaccctcagcctcctgagtagccgggaccacaggcgcacaccaacacgctcagctaatttttgtgttttttgtagagatggggtatcaccatgttgcccaggctgatctctaactactgggctcaagcgatccacctgccttggcctctcaaagtgctcaaattacaggctaagccactgtgcctggctttggttagaattattaatacataacagcactgttaaagatttggatgtcttaaaatataaaaatcaccttgagttatttaaaagaaaatgccatttataaaacggagtgtgattcaacagagacagtactgcaatggatattaagaaatgcagttctttcagacaaatttgagtttaaaaaaaaagaaatacagctctttaaaatttgtttccatcatgagtcacagaattacattaactaaattaattttagtttgcttccatttttctttttcatcaatttaagatataattcttacataaatgtcacagaaaatgtcccttgcctgatgaaaaaaatacatggaaattcaaggcactatttctatgttttcttaaggaaaataataacaataaagttacctttcttaatcttttgtgtttctaaaactgctttcttccaactactctcaaaaatcaaacaactgccaaaggaacttctggtgaatttagaagtctcacatttgatttcaggagatagcactgacattttttcttctttcaacagtgctgatgagagggagatgctgctgcagagacaggacacaaaatacaaaaaaaacaaggcacgtccgagacaaggcaaacagatgtgtcataatgtttctctttcaaactttgaacattttaatgaattctttcaaattccaggttacagatattgggtaatatttttaaaagtaaagtccaatagcaagttatcacctacaagacaatggaatacttggattctctcaaaaacattatcattataaaatgcatttgtgcctaaaaaaaaaaagacaaattttatgctccatggaaaataaacatgttttctagataatcatcacttttattttaaacgtggacacagaaggaaaatcaatcacttaccctgcttacttaatatattaaacacatattcaattcagtcatatacattatctattacatgcaaggcaagactacatccaaagagtacaaccatgagaaaccctgaggagtcccatgggaatggtgaggagtgacaccaccatgaccgctaccatttatgaaatgcctatttttccaggatccttgctgggcattttgcatccattttttccagtgatcacaacaaagaattagagatagccagattcagctatgcttattcattcatgcaaaataaattatttactgagtgtcaattttatgccaagaattacataaagccttagagaaacatgctaagcaaaacagtccctgcccttgagaagcttagaatctagtaaaagaaatacggatgagaaaatggataatacatttctctgatctcggcaaactatcgcaaggacaaaaaaaccaaacaccacatgttctcactcataggtgggaattgaacaatgagaacacttggacacaggaaggggaacatcacaccctggggcctgtcgtggggtgggggagggggcagggatagcattaggagatatacctaatgtaaatgacaagttaatgggtgcagcacaccagcatggcacatgtatacatatgtaacaaacctgcacgttgtgcacatgtaccctagaacttaaagtataataaaaaaaagaaagaaagaaaacggataatacagttttagtaagtgctatgatggggggcaaaaaataagggtgccgtgggagcacacagcagggattcccactgcagccttgggcattagggaagcatttctggaggaagccagcaaagcaaggatgtgggagagcagaaggaggaggatatggctcccagcagaggaagagcattgtgatggttaatattgagtgtcaacttgattggattgaaggacgcaaagtacttttcctgagtgtgtctgtgagggtgttgtcaaaagagagaaacatttaagtcagtggactgggagaggcagatccacccttaatctgggtggacacgatctaatcagctgccagtgtagctagaataaagcaggcaaacgtggaaggacttgacctgttgagtcttctggccttcatctttctcccatgctggatgcttcctgccctcaaacattagactccaagttcttcagattttggactcttggacttacacccagtgatttgtcaggggctctcggtactgtcagtttccctacttttgaggttttgggaattagactggcttccttgctcctcagctggcaggcagctttttgcgagactttaccttgtgatcacgtgagtcaatactccttaacaaactccccttcatatatacatctatcctattagttctgtccctctagagaaccctgactaatacaagcacataaaaagcatgcctttctccggtgagagacaacagggttccagaatgtagtttaacacagccgcagtgtatgtgctgcacaccagcagggagggaaggggaaaaacaagaatgtggcccagaacacggggagagagggcaaacggtgagggcaaaggggagaagagaaagagggaaaaggaggaacagggagaaggggagggaagagaggagggggagacccaaaggtagcctcag

SEQ ID NO: 587294 - DNA, 4001 bp, Homo sapiens
accccatctctactaaaaatacaaaaattggccgggtgtggtagcgcatacttgtaatcccagctactcgggaggctgagacacgagaattgcttgaaccgggaggcagaggttgcagtgagcagagatcatgccactacactccagcctgggtgacagagtgagattctgtctcaaaaaaacaaaaaagttataaaagaggtaactttaaaaattgggtaagggggccgggcacggtgcctcacacctataatcccagcactttgggaggccgaggtaggcggatcatcagaggtcaagagattgagacaatcctggccaacatggtgaaaccctgtctctactaaaaatacaaaaattagacgggcgtggtggcacatgcctgtagtcccaggtactccggagactgaggcaagagaattgcttgaacccaggaggcagaggttacagtgagctgagatcacaccactgcactccagcctggtgacagagaaattgtctcaaaaataaataaataaataaataaataaataaataaataaataaataaataaaactaggtaagggtacacatgatatactagactgcatgaaacagtgtgaatttggaaagctctgttacctcaaggagatgcccagcagattgactttcgggtcgtgtagaggcaccctgggcatgtgtggtacctaattaggtccctgaccctctctcaaattctttaactgacacttcaaccctggccttgattctctgatacagtatcctcagcccaatcagatcatacatctatctattctctttatttgcataagtggatttacaatactgggagaagagagaaataactataagaatgttgaagttagtcaaatccacaatattaacacatttgtattaactttagaaatttaattatttaatccttgagataacctatgaaagattgtttgttaagttacttgaagcatttaatataacctgatatattagaaaatcagatatatgaaccatataatttcaattttaaagtacaagagcattttcttcagtctatacacagtgtttgaatgtttaagagaacataacttactactgcataaatttggtttattacttttactggaattgctttaattattagagccccctccctccttttataaacttgcaagatgtataaaagatactaatgtgtcaggcatttgaaatgcttgagagattcaggtagactaaatttgtaattgatataatatataatatttaaaggaacttaattaaccaagtctatcaattgcattatttgtttaggggaattaacgtcaaattgaacattagtcatggaataattttaaatggtaatttatattggctgggcacagtggctcacgcctctagtcccagcactttgggaggctgaggagggcagatcacctgaggtcagtagttcgagaccagccttgcaaacatggtgaaatcccctctactaaaaatacagtaattagccaggtgtggtggcatgtgcctgtaatcccagctactcgggaggctgaggcaggagaatcacttgaacctgggaggcagaggttgcagttagcagagatggtgccactgcactccagcctaggctgccaagtgagactctgtctcaaaaaaaaaaaaggtaatttatattatccttttcagatttacagatttacagagatctgcttgataaatataaaaggtttagaaaaactataaaggttttttaagctttgcagctttcattcattgaatagtaattaagatgtaggtaggactgtattttacaagatttaaagattcttttggcagtcggataaaacacttcaatgctcagctagatgaaaggcagaagtctttgttacttacagctctgaatgagagaaggctgccacagaggaccacgcagggggttgcacctgaggactgggtaccacaggctggagggggaatgggcagcttatgtacagcaaaaagggtggggttagctaggttgaataattttgaataatttgcataattttggcgggctttggggcatgggcgctgtccttaattgtctgatgtctggccctgtggtgattagagtgggtacatagtggccccagagtgtgagaacctgataagggaagtggttggggtgtggatttaatcagctgctcaagagaggaaactgaccagcctctagccaaggcctccatactaggtcaagacagcacaataatcaataaaaataccatatatgaaatatatttagtcactgattcctttatatcttgatgtcgattttgaactcaattatttggggtgtttgagtggcctgaatagtagaggagacttctacagaatagggcctaagttgcactaaacagcatagaaaacattttattatgacaataacaaggaagaaaccaagtagaaatgtgacaagtccctgaaggctgactcgtaaccaggctcccatttgtttggcgttggccaggagaatacatcagtcatggcaagggcctttagtcatattttgactggatttcagagtgtgttaaatatgtaaggcatgtttttttagggtgatggttttctgatccaggctttctgttagaatgacctcttgattggtggtgttaacccacctacaacaagaagctctaataatgttacaaacacctctttgactagttaatatataatcaaggacaaatttactgtcaaaaaacatttttgccaaagctccctggtttagcaggactaatatttgctgtaacttagaaatatgatatactagagttttggacatttgtagggtagcatcaattatttttgactgttgggctaaagcaatggtccttgtggccatcgcagcaagtcccagagcagtggtgagtcccagtattataggtacaaatgtggcacatcaatgacatttggctgggtagggaaagaataattaacatttatataaataggaatgccaagagaggccagaatgcatctcgtggcttccagtttcagagtaatggaagggcaaaggagaggggataaacacccttgttggttgggacacaatatagttttgtggcattaccattagactggaaaattgtaccttgatttaggtaaagggaaattactaaagaatgggactggaggaagacagtggcttttgttgggcatatggtgagaatatgcagttgttcattgggtagcccatctgtggtatgtattgaggaaatacgagtgcagttgccacttgccatgagggggcaccccaatacagaagaaaaggccgtttggaagtggttttcatttctcagtatttttcatctctggggcaattatcagttgggtaaatgtgtgatgtgggatatgtggaagcagggtgatgagttatggatagtcagtgcagaagagcctacttcagtcaaatgtgtttgtattttggatgtctgtataaatatcagagaagctggggcagtgggtttgaattttacttacgtagtcttttagagggcaagaggagaagatgctgttaggacggaaaagataggggtgggagtagggatactgacaatgagaaagggaaggcgaggaggatggaagggaataaatggtttgacagtcggagaccagcagatgctccttttactcctaggagagcacacagggtggaatacttcagtcaggttaccctttaggcaggagaagtgggtgggattagcaggaacctgaatcttagaagcattagggaggtattggacttggtctcataagggctaagccaggtatagagtggaattacaatcacagagagcagaacttcgagttttataggtgtctgtaaagtctggaaagttactccagtgttgtgggtcttgcttttttaaaacagaagtcagcagtgtaaccagctactggaaaaccaagagcctctggtctcctatgaatggcaagacattccatgtgctagtgtagttggcac

SEQ ID NO: 587295 - DNA, 4001 bp, Homo sapiens
aaattaaaggtgctacaccagtgcacacacaaatgataagaaagcaaagcagcattattgctgatatggagaaagtttgcatagtctggatagaagatcaaaaaccaacaaccacattcccttaagccgaatcctaatgagagcaaggctatagctctttttaattctgtgaagcctgagaaaggcaaagaagctgcagaagaaaagttagaagctagtcgaggttggtttatgagatttaaagaaagatgccatctccataacatgaaagtgtgaggtgatgtggcaagtgctgatacagaagccgcagacagttatacagaagatctagctaagataaccaatgaaggtgactacactaaacaacagattttcagagcagacaaaacagccttcttttggaaggagatagcatctaggactttcatagctagagaggagaagtcaatgcatggtttcaaagttttaaaaacagcctgactcttttgttagggtcaaatgcaactgttgactttaagttgaagccaacactcatttaacattctgaaaatcctaggacccttaagaattatactcaatctactctgcctgtgctctgtaaaaggaacaacaaagcctgaatgacagcacatctatttacagcctggtttactgactattttcaagcccactgttgagctctactcctcagtaaaagaagattcctttcaaaatatcactgctcattgacagtgcacctggtcacccaggagctctgatggagatgtacaaggagattgatgttatgcttatgcctgctaacacagcatctattctgcagtctatggatcaaggagtaatttcaactttcaaatcttatttaagaatacactttgtaaggctgtagttcccatagataataattttttttatgatggatctgagtaaaggaaatggaagttgtctggaaaggattcaccattctgcatgaacatttgtaattcatgggagaaggtcaagttatcaacattaacaggagtttgaaagaagttaattccaaagtcatggataactttgagccttcccaaccttcagcaaccactatcctgatcagtcagcagtcatccacactgaggcaagaccctccaccatcaaaaagattaatacttggctgggcgtggtggctcatgcctgtaatcccagcacgttgggaggccaaggagggcagatcatgaggttgggagatcaagaccatcctggctaacacggtggaaccccatctctactaaaaatacaaaaaaattagctaggcgtggtggtgggcacctgtagtcccagctactcgggaggctgaggcaggagaatcacttgaacctgggaggcagagattgcagtgagcctagatcatgccattgcactctagctgggcgacagagaggactctgtgtcaaagaaaaaaaaattaatacttctgaaggctcaggtgatcactagcatactttagcaataaagtatttttaattaaggtatgtagattttttaaacatgctattgcacacttaatagacaacagcatagtgtaaacataacttgtaaatgccatggaaaactccaaattttatgtgacttgctttcttgtgatatttgcttaatgataggggtctgaaactgaaccttcagtatctctgaggtatgcctgtatatatatatatcaaacatattttgtagtcagccatgccccaaaagacaatgctaagaatacatgcaaagatagtataattatttaaagcagacagttcaacaattaacctatagctgtacaattattttaaatacttaatatcttttctgttggaaatgggaacaagttatcattttgatctatataaacaggagaactcttaccatttttgtcatcatatccccagtctggacttgccattatcttctactgagttttctttttctgaaaacaaaaataatacctggaataactaactgcaactgtgcatgcaggagatgccttaaatccctgcttgggcgtttttatagaaacttacttgcttttaataggccattatttcatcatctctgcttatcaggaagtacacatatctaaaaaaaaggtgttgtaaaaaattctacaagggctatgttagtttcaattgcttaattttcttatattgtaaaagagaattatcagatcctagattttataaagccaagtcctgtttcactcatgttagtagaagatatggcttaatattataatatgtaattctttagattttctaaatgaaaaatactttgtacactcaagatttccaactctacctttgttagttacctaagcaatatatgcaaaagtaatttatcaggaaaataatttgtgtgtttacaggctgatctgaactagtatcttaatgttaatttaaaatcagataattaaattactaatcatttgtaatatatgttatttataatgatacattttatagatatacagggtaagaataaagtccattttggagcaatattggaattcataaatggagaagattttattaatattaaagttaaatataacacaatatttattttatacatcaaataggtctacaagaataaaggtcttattttttaatagctctatataatttataaaccagtttcttattattttatttcaccatcacacatacatacaaatgctatatagtaagaattagcatttgtaattgagagatgttgaggtactttgccacaactggcaacaagccaagaagccaagacttcagcctcctaatccagttcccttcttcactgtacctccaccaaatgccacactaattcccctcctatgctcacaatactcttaagtgcaagttaagcctggaccaagatgagaactgatgccaactgaatgatgagaaggtacacaggacttttcaggatggcaaagaaaactgattaggatgtgccagactctggccagttctacatgttcaaagctctaaacatgctcaaagaaaagaaaaccggaaaaataagctaccatagtgatgcttttttcatgccatgacagtcattcctcctttcacatggtaaggattgtctgagctgctgcaacccctgaaagaagagagggatcaggagcaattttcactaaggctgactggagacacgttgtttgctcctttgcagttagtgatggttcgttgtctcatatgcagagtgggctgtggtcatgaacattcacagagtgggaagaggcccaagctcccattctatggctttagtaagcataagaagatattgcttaaaagagaattctttttttttttccaaagtactgtttattgaaggcccaacagggatcaactgctgtgctaaaaactttacgtacattaacttatttaattcttattataacaaaattgggcattaaaatctgtgttttaggctgaggtgggaggatctcttgcacctaggaggtccagaccagcttgggccacatagtgatactctgtttctggaaaaagaaaaaaattgtgttttacattaaaaaaatattgaggcttacagaggtgaagacacctcctcagagttacaaaacttgcaagtggctgcttatatcccataagcctagggtttaaacctagatctgtgtaattccaaagctaatacatttgcttagccttccactgtcaacaattgtccactgacctccagttgattctattttctggaggattggattaggtgatgtagcttggtttggctcaagatgaccaagagtcaggcttcatccttgggcttacttcactccggaagctcatggagtgacaggagcaggctaccccctgccaggtaatttgcctcctaatattgtatactttgtaaaaagcaactttagcttgaactactctattaatcaacaaatttgaaaaacagcaaccccctttcattacacgactatgtgatgatttgtcacatgaatgctttaacatccatatggaatg

SEQ ID NO: 587296 - DNA, 4001 bp, Homo sapiens
aggatgtggtcttcagagagagatcgcatctaaaagaaaggaatggctaattcctaacagaacaattcctaacagaaatacaaaatcactccttattaatggctttgctaagatgaatttttaaaattgctgaaataagcttcattcaggtgaataatttctaacctactaaagagtaatcaatatccattgattgattgattgaaatacccttcttcttcctaactaccataaaggcgcagttgggattcaatgactattaaataactccaataaaaacgacttcagcagagagggaaatgaaaaaagatttgtcatattttccccctaaacattcactggaaattagcaaaatgtaagattataattatggccttaatcaagaagaaatctgactatacaccttttattattaaagttataaatttcacctgctgccatttttaaactagcatgtttaaaaacaggctacaattagaaattaaacaggctacaattagaaatagaatttttctgttagtttgtgaaattaaactttctataaaatttgaccattctatactgtttaatcatgtacatgctaatagaaggaaagcattattattcacagccttaatttttttctttattatgtatttacttcttaaattgacaaaaattgtatatatttatgtgtacaacatgatgttttgaaatatatgcacattgaggaatggctaaactaagccttaattttgacagttattcactataaggctttttggtgtcactgcgattatttcaaataattattatttaaacaatcagttcagtttaacgtaggaacaagaaaaaatgttttacttttgataatgtgtgatatacaagaagaaaagtgtatgtcattattatttatcctattaatacatttctatcaatgaattataatttcagtaatcctttgctcaccctgcaaggatgagcgtggagaagaagagtggagaagtaacccacaatgtaacttaatttcccagcgagaacctgaacccttactaaagtccccagtagtagtcagccaactgcaaattgctgtgggaatatttacagtaacaactattaggaaacatgcagtattttgtttgccacgaagccaacttaatcttcagtgtcacaatgcaagttaagatttcctaaatatatttttaaagattttctatgatttgtttctcctaagtgaatagtgagcttaaaagactgaaagcgaacttgtccttatttcactgaagtgtgtcatcagacttctgatctccaagcctgtaattgatacgtggctgttactaggcaaagtccttggcttttcagatgaaggtgaactcacacgtatgaacacttgggagtttggggaatcctgacagagataacacacaccaacgctcacatccaccaccaacaacccgtctaccctgacaagactgctctccgcttctcgcactgggctcccaggagtgctgcttagtttaaagaggaaccgaaaaagtttctcaatgtgcgagcccagtgtgtggtcagcgagcgccggggcgtcgcgctagtcctctcgtcccccgcacaaacccccccttggatcaggaaaaggcgctcaccgttgtgctcgcggtatccccagctgagcctcgacatggtccctcggggtggaaggaagagaaagatgtgactgagcagcgagaaagaggagggagcggggaggggcccgggaaggagcctgctagggcgggaccgcggggcgccggcggcaggagtgcgagaccgtgaacccggtccggggcgctcccgcctgcgtcctccagacggcagaggcgtgcggggaaggcgcccgcgccgctggctgactcctggggcgcgagtctctcttagtttggactcgggaatgagagatttgagttagagggagagacggagagagaaaggtttccgggggggatctcctgccttctgaggagtcgtcactcgggagaggaaagtgttgcctagaggacttccaggaagtgaatgagtcaccagagcctggaactgccaggctgggaggtggggatcccggtggaggcgtaaaagaggtcggtgatggtcgtggcagtgatgattacaaatacaaaacaataatgacgatggtaatcaccaccactgaaaaataactacttattaagggcttatcgtgggcgagggtcttagctaagacgtgtacccacgttttcccattagatcctctcagcatttcctcgagaaacacgtggcttaagttagagacactatgtaacctgccccgggtcgctcagctaaagcgggcggggtcgctgttagagaggaccagctcccggtcctgggctggctccattgcccattcatcctttccttacctcttctcactctgcaggcttgtggcttggtgagtgaggaaaccaaaaccagttgttgagatttggtcccaaaattctgctgccctcctgaccccgcaagaagggttttcaggacatctgccctggattcttggtgggcttgttaccctaggactggagtcagaactagctgcagagtcttgaatttctggcctggagtcgtgaatgttctgggttcaaagtgaaaaataaaaattgggtacatgaaccactttctacgtccttgtctcgggtcaactgcctcatattttataaatccaagcaacctctttgtaaggaacctagtaaaccaattttcagtaactcggatgatttggtatgtcaagatgaataatgctcttaacgttctaagtaagtatcagttcttgacacccaataatagtggttacatgaatggatgaatgactgaatagaccaaaattgttaaagaaattttggttggtgggtctcaaatacttcccaaattgttacttttattgcttgggtacacagtttgtaaccacccaatgggtttaccttgcccactgtcaagacacagctgatttatcaagacaggggaattgcaattcataaagggaaattcacgtagagccggctgtgcagaggactggagttttattattacacaaatcagtctccgcaagcattggggatcaaagtttttaaggacaatttggtgggtggaggagagccagtaagtcgggagacctggttgtttgggtcagaggtgaaatcatagggagtcaaagctgtcttgcattaagtcagttcctgggtgggggccatgggatcagatgagccagtttatcgagctgagtggtgcctgctgatccatccagtgcagggtctgcaacatatctgaagcactggtcttaggctttacaatagtgatgttattcccaggagcaatttggggagggtcagaatcatacagcctccagctgtatgactcctaaaccataatttctaatcttttggctaatttgttagtcctgcaaaggcggtccagtccccaggaaagaaggtttgttttgggaaagggctgttattgtctttgttctaaactataaactatgttcctcctcaaagttagttcagcctatgcctaagaatgagtaaggacagcttagaagttagaaataagatagagttggttaggtccaatctctttcactgtttcaattataattttgcagtagtggtttcaagttccttcttgtttaaattcatagcgcagtctatataattttctaaaacagcaacctaagtattggcaacaatcaaattacctttcataggaaactagttaggtcatctgtagagcatccatcattcaatggacttatatatatatatatttttttcagatggaatttcgctcttgttgcccacgctggagtgcaatggtgcgatctcggctcactgcaacctccacctcccaggttcaagcaattctcctgcctcagcctccagagtagctgggattacaagcatgcattactagtggctaatttttgtatttttagtagagatggggtttcaccatgttggccaggctggtctccaact

SEQ ID NO: 587297 - DNA, 4001 bp, Homo sapiens
tttgttactcttctcgctgctaacttgaagataaggctcactaagatatactttttaatggatatgcatcagctctgcaagacaaaatattttacaatcttaaaagttcaattggtgcaaatctcatcgtgactgatctttattgcgaggggactttgcaccttttgtgatttttcacaggcatatcgcagttattcaatggccttcatagaagccaagggttttacagggaagaaacggccccgggacacttcaaactaattagcctacttctcagaatctgagacctaatgaaaatgatcagggtggcatccttgagtcctgagacaaactgtattattaagagggttcctgccactgttcctggctccttccattaagctcggaaaacagctactggctaaaagacacaagttattttctaaacactgacctgctttgtcctgagagtcatcaaactccacgttgaaagcatgaccattgttgaggatcctcagggaagttgcttgatcataggaaacagacaggggcttcagggaagggtcatacttggctgtatgagtgtcgatgtcaacaggggactggcgctctcccttggcaatggggaagtccttatgccagtgctcaggtcctgggggaaagaagacatgtgaatcccccattgtggggaaaggtacacccagacccctagagaagagcaatcattccggagccaatctgctcagttccaattttagaagcatcacttaacaatgggctaaattttgggaaaacacgtaatctgtgcctcagtttccacatttgtaatatgggataattagaaatctacctcatagatgtcgctgtaagaattagaatcgatatatgtaaagctcttagatcactgagtgctatataaatattagctattttaaggtcgttttactgaaattcagcaactgaaatcgggcagacactaatgtcagggcttgtggttgcgattttgggatatgcaagctcacttaagacattcaaggaggtctggatcctttcctcactgcccaggcccgggcccaccccacctttaaccgtcagggttccccactacctgggaagccccacaccctccaaagatgcgctaggtgcgccagacgcatgctcctctgctccgctggctccgaagaaccagatctgaggccaagataaaacccgattcctgatgtccgaccccctaacattagaagtcgagagatgaagggaaaactcggaaatcagagccatggattcaaaccagcactggaaaatgccccgggacagttcgtgctgagcgccttagccacaggtggtgctgaagctggaggggtggggtgggggtggaaggtgggggaggggggaggggagtctcttaatttctctgcgatcaacaactagaattttccgttacaaccctttcccgcctcctcctaggtccggttaaaatgatccccaggtcgggacccgggagggactgtcctcgggtcccgcggccagggctgcgcctcccctccctcgggccctacgcgcctccggcggacgcggggattcctccacagtggcctcgcagctggggcaagggggacatccccggcgccgcggagccgcgagcggagcgagcgcccggggcgcacctgagcctccagcactccccgcggccgcggtaaacagcatgtgcgggcgctgcgggccccgggccggcatccgggctcggggatcggggatcggggatcggggatcggggcgcccccgcgctggccgtcgccggcactcaccgttgtgtttgccgtacccccagtgatgggacatggtcgcgctggcggtcggggcagggcaggaatcggcaccgatctggcggcggcggcttgggcgcctgcactgtgtgtccgcgggtcgcgccggcaccagcttttataggctcccgccaacttcgtgctcgggggcggcccgggggagggggctcgggtggacctaggcgacaaggggaggtggtgacgggcggaggtgaactccccgcgctcggggcggggcgggccgggcgggcgagtctccgggggcggggaaaacgccctctcggctggcgcccggcggggctccggggctccggggctccggggctcctctcccgccgcccggctcccctcggcccacggcagggccccggtgtcctgggctggcagcgaagctcggagctctgggcgtgcggcggctgcggtggctcctgggctcctccgtccaacccgggccgcggagcctctacgcgcaccccatccccctcccggctgcggagtctggcggcggcggggactgctcgggacccggacccccggcgcctttcgtcccctgtccccattgtgacctgtctcttggccccggagccctcccgccccacccgcgccggggtctccagcgcgaagggctcagtctctggtgtccccggcctggggctggcaagctgggttaggagctatgaccttggggcaaatagggatacgatcctagaggcgcaggggagcgcgcagcatgagtgctgagaggcacgcgccctctgctgcacggccgtggaataaaacgagacaacggccccacagtcccctgcccgcagcccacgctcgggcgagcctggaggattgcatttcctcgtaggctggcagagccttacatgaagcgctcatcttctcctactttcctcctctttaaaaaattaacgtgggtgaggagacgtcctagttgagtacatattgatttgaaataaccaaaacttttaacaaatcacttttctcagaagaatccagtaagagaaagataatttcttccaaagacatgagacgttccctggctggccaagaaaaattggcatctggcatacctaggaatcattcaaaatagtttaataggaaggacattttgaggccagccagcattatgacatttgtgggtcctacggcatttcaccttggtgggtccctttttcataaacacgcatttataccaacactgacataaagataaatatcttaatattatatatttaaacattttctttaaccaacacctaatttttttcttttttgttcttattttaaaaggaaacattttcctgggcatctaaaagtattgtggacctgagacactgtgcttacagggcctactgggtaagtgaggctgttttgagatatagagagaattcatttcctacaagggattttgccacagaaaaatccgggggtttgtgggaaggagttcggttctgtggtctctgcaatctctgagggcaatagtattagagttacagttggggaagcaggacacagtttaatgtgattgtgtcggccttgacatcacattacttacctttgaaaatatacagataaatacaaggataagttattagtggacatttttgcaatatgtatctcaaaatcactctttactatttatttcagtcaatttcatccaaacaaatatgattcatgtttagacttacttgttctaagattctagaaaattgtgtacttctgcttatgtgggttttgggttgatgtcacagggaattcttaggcaagaaagcagcaataaagtttttaaatttttaggaccattacaaaatggagtttgtagcaaagaagaagcttttatttgtgcctctgtaggtgcattgtatctgttggggcccattgatgtaattttgtttctttacataattttcaaatattaacttagttgctatgagactcttcacttggccctggagatatggcgttgataggtgccaagaattgagtgcaaagtttgtgaatgtagagtggcttcccgggattctgtggagggagccaggcgatttgatcagcaggaatccttgtctttcattttccgtgaaactggattgtggctttcctaacagggatgaagtaagagcatgtttgattcttaaatatgcgtaaaacttcaaacaccaccaaactgcagttcaccaaatggattattgt

SEQ ID NO: 587298 - DNA, 4001 bp, Homo sapiens
aagaaaatttaaatttctgtaacttggaacctcctggtaggtaggaattatgaatatcattcttcattacaaaatcattaagaatgttcatttatgtatatcaataaatataactttattagagatggggctataaggaattattttgctgtatatcaagcaccaaaatattaaaggaagattctttcttacctcatttatcgtgaaataaagtatttctgactagtcttcttttattatactgatttgcttactagtgtaggtgaaataaagagatttgttttttctaaacatgtatttttcagtcgctgtctcacacacaaactactactcaagaagaaattgtcagatatttcaaaaatactcacccaaatgattaatcagatgaaccccactgaaggcttgaaggcaagtcatcttgacaccttcagtggccctgttctctcccctagattggtcacctcccaggcaccaagggaagaaagtgcctatttagggtttctattgtatatctggctttgtagaatggaatctatgcaattgagagtggaagcctggctctccagaccatggacaagaagcacaagaaccctcaggtataggccatcggagtctgaagaatactcatttgagtttattgtcatctctgtcctatcgtgttccatttcaggaatgcattgccaacttttagcttggacatggggccgttttcacagagaccaagtttggagggtgtgacattcctcttcaatacataaatataattattcatgactaaagcaaagtcaaatgtcatctgcattttaaaagataaagtgctccctctccccattaattctggtactgtgtcataaaccacattttgtcaatatggaccttgaaaacatccatgtgattctacctcattgtcatacttacttgacctatcataagtatcatcaaatacaactcggcaggtcttcccattattcaggatggtcttggcagagccaccatcataagacacagaccatggctgcagagaagggtcatgcctgatgtctttagtatgcagctcaacgggcgactggttttcccccttggcatttgggaaaagttcatgccagtggtcaggacctaggaaataaagtcgaggagatgtatttatttggtggcacaacccaaggcctctttctaattgactaaaccagcaaaatacagagaggctagacagtgatttcaaaaaggtcttaggtttcagactgggcaataagagacttagcattcatttcaggcctgttggtagttttgtgaatagcacacatggagactatttaactcagtgtgttcactctgcctgctcaaaggcttatttttcagataaactttatcacatttttttttaaccaatgacaccttccatcatagagttggaataaaataatattgaccacctacatttgagcattgtgttgtgggtttcagagcacacccatgttcctttgccttggattagggagaagcttaggcagagcagagattctcacaccggcaccaagctcaggttaggtgcttgtccagtaaaacagaataagggccagtcacacctgacctcgggctgtctgacttctcagaggcaatgggatcttaggcaagtgatccaacttctctgcacttcagttttctccaagggaaataaaaactccatactagggagaaccaaatgagatgaaggaaaaaaagaagcagcagcatttggcagttgaaaagcctcagtaaatgttaggtcttattctactcctacattttccactgcagtctctaaagttgcccatttctgtgcaatggcagggctctcctggactggcatcccttcctggccgggtcgcggctgcctgcactcaccgttgtgactggcgtagccccactccttggccatggtcgccttcctccgtgctggacggctcctgctttctcttcccctgcgtggtgcagagtcgccgcgagcccgcgcttttatgtagctcccccgcacactgcatggccttattaggtcagcgagggtggggcggggggctaaactagattggggtggtgtttgggaggccgggtagaggaagccaatgaattccaagagcgggacagctgtcgaggtgacgggggcggaggtgggcgaaggggcacccacgcccctccctgcgctctcccgggagtcgtggctcctggcccctccatctcctcttcttctctctcaaaactgcagggtttctaaccggcgccgacgtgcagaaatgcaggcggccctcacctcgtcctctctccttcctccatgcattcttggggatggggtgggggcagggacagggtgtcgtagttgtgcttggccacgaactaaaatctacatcccggcggctcttgcagcctcacttaaaagttgcttcaagcgcaggctggctgtctggctacgatctctggacacttgtgcgagtttatttcgctctagcgatccggttacagaggctggaaagaactcgtttgtttgcctgccccctaagtttgactccctttgcaggcaacatgtaaaatcctaggagcaaaggatgggaagaaagggtccggagcagggtgagagggtgaagaggccctccaagtccgttatccttaaagagatggccctttctggaatcgcaccaggcggcatttcccaacctagcggatccttttggcttgcaggaaaccgagggctggatctcagagagcgccagatatccaggagatgtctggatcccaggttcacgcggagctggagactgggactgatttagccacactccctgagctgtacctctgttcatgaaaaatcaagaatattctgaagtattggaaggccactaacataaaatgagtcatatttcttaaaacctgtggtcttgctctccaagatacaatgagagattgcaagaaaagaaagagggaaagatttacagaatggcttttaatttttttctccccctactaagttgttttcttatacattgaaccatgcaaaggagaataaaagtggcatatctagtgtgtctacatgacaaaagtatatttttaaatgtctggttatggttcatatcaaagaggtcagtagtagatatttacaattttaagagtatattgtaaaatttctcctgttttaattcagtaataattttttaagacaatgaggaaagataaacctaatttcagtgctatcttgaacaatatttcgatatacatttccttaattaacttttattgataatagtatttagtatttggggattacaaaactcgaaaaggaaatcgctcgtcatggcacagatagctcatccctaaggcatgtggaatgactgaccacactcataacctggacgccaggggagtcattccccagggtatttttgtgacaagggattatttgatccacacaatagcagtgtggaatcaggaactaaggcagttcggaaaatccaagcaaacatagtaaacaaatgcccttaaactctcagctcctatctgtcactgtttgatcagaaagactgcagtggttaatggagatgttttgtagttcttataaaatgtataattatttgtatgagtaaaccaatccactcaatcattacaatattctttttctggtatgagtggttagaagattggcaaataaatttcatgttatttgatatagtaatcatacagagaagacaataacatttataccaagaacgatctagaaattcatcatgttgttattatttatgcatagaaggataccttttttaaaaaaagtgctatttatgattaattttaaatgcgcacaatagcacataatttcaaataaatgctaggtaaactttgcaaagtgaaatatttaatagctttagatgtgcagcctttaaaattacgatttgtattgcattatactttcccataagaagttaatagaaattggaatttcaagacaatttatattaagtcatgtaattttaggc

SEQ ID NO: 587299 - DNA, 4001 bp, Homo sapiens
atgtacctgtcctcatatttcacaaggtataaggtgatcaaactaaggtttttccagtaacatcataagaagcagaacaaccgactgataatcttcataatttcactcttttgtcctttcaaaattgtttcagaaggtaattcccaaaaatgctttatattataatacaaaggtatcctgaaaatagagatacgtcagttgtactttttaaattgtgcaagttaaatcacagttcaataactctacgctgacttctagtttaaaagaccacacaaacatattttctaaaatacctgattttgacttcaggataacctgaatggtatgtccatcattggtgacttcacagtctcggcacaccacataatttggggagaggcggacatccaacagcgaggggtcatacctagcctctcttgagtttaggttaataggagactggtattccccattagcatcaggaaacaccagaccccactcaacacctaagaacaaaatgaaataaattaaaaacaggttaaaaaataaattacagtaaaatttaacatgtaaaaactaaacacttagaacccttgatatcatgaagagagtaatgataccatcactatacagatgaaatatggtaattctatttgtttttgcattcattatttgaatgatctgttattatcaaataccatacacaaaatcccggactagcaaaatattctatttgtatttgtcaacaaagacataataatttatgattctaggaaatttgggtcatttttaagtgattaggaaaaaagaataccagaacaatttcttctgcttattagttcaattacgttcagtacctgggaaacagctgtaactttcaacatacttagtgacagtcagaaccctaactctcatgctagtaaatagacgccccttatcagaaatgcaagtgtagtattttaaagtgtgcatatgtatatatctgtgtacatacatattcccatagtctttccaaattttttataattaaaattatatattctatattggtttcaacatatgtagtaaacatcagcactactggttggctctaataggagccctaggtctttaggaataaatctaggaaactcgagtttttcagaaagtcaaccgcttctcgccaaacccaatgattcagtctgaaatttaggacatgttttagaaagacttgagcattgctagcaggcttcacgaaaagaccagaggcagaaacactttctccccaaagtctccaagccaaaaacgaattcttcacgctaacactgtcttcctcaggtgtttagtaaaatgtaccgctgctcttcttgactactcagaagacataaaaggtacagccacggcttggaggctagcccgccctccggaccgcagcaggtgcgaacgccagccctgcggaaggctcccgggtgagagcgcaggcggcggaagagcgcaggcggcgagcacgcctccctggagcgcctcccgcccgaaacgcaccaggggagtgggaaagtggcagagacccccgtgggaaagagggggcgtgggggtgctcggagcgcgcagcggcagcaggactcgagtcccgcgctcggcgagacactgacgccgccgcgggaccccggacaccccgactcgcggccacttaccttcctcgtagccccactccacaccctcctcttcttcctcctcatcctcttccttctcggggaaggcgacggtatcttcgatgaagctcaggtccgccatgggaaggccgcggggcccctcggcgctctcggcagcagtgcctgcgccttcgctgggcgcggggctggagccggagcggagcgcgcgtgggggagtgtgagcacgcgtgagcggcagtgtgagtgcgagagcgcctccgggtgtgaaccgcagtgtgagtgcaagcaggcgtgcgttcggaccgagtgttccagagacccgcgtgggaagcgcgtccggaggccccagcagagcgagggagcggctgtggcctggggagcgagcgcctggcgaattttatacccgaccggggcgtgtctggtacgcgaggatccgcccccttctctctctggccgttggggccaggggagccgacagttagaatgcgcctcggggcgactagtcccaagtcacggaaacctcggcgcatccccgcccgcccttcccccggggtcgcccccgccgcctcctggcgcttcctcgctgcggcgactcctgcttggccgcccgagccttccttccagaagcccgcaagtctcccaaggtcactcgggacccctgtgtgcctggcctagcccagaggctgctcacctattcattttcatccgtactccaggaaataccaaaaagaaggggtcctggaggagagagatgggctgccgtgggtaggagaaaggagagggctaggagaccccgtaacacaataaaaagagactctccagcggaatcttcttagtatcttctgagtatttactttttaaatcgtccgttcagcgcagtggaaacgagtttggaaatttttccaagaaagttctattaattcctaaaaacgtttaagaaaagaaaatggttgttatctagagaagtagctatgatttagggttgtgttttttttttttttttttccagaaaagggtattgtttcaaagcagggctagcagaaggcagtagacagagggtgttcgctgtcagagtctggggcgctgctgcaggctcacctggctgtgtacacagctcccattcacctagtgaaatcgtgtaaataatgaagtgcacacattgcataacaaacaggaactcttctgatccaaagaggtggcattgttacccttaaacgtgcttctcagtctagtgttaacgacttcagccctctgttcctgtgccttttaaaagccctggtcagtaacccctaagtaggttaactccacatttttagaagatatatgtgcacaataaactcgagttaggaccttaagtacaatttgttttttatatgctctggtcattcatgaagatatctatttgcactttgaataacctgttcctaaatcacaccagccttatgaatgcataattcctcaaataaggatggaaatgatccgtttgggaatgtttagtttcagtgctcatatcctttactgcctgctaagcacctccactttttaaaaagacacttcatagcttttaaaaaaaaaaaattacaaactgctccagaaagtacactgagatggaaagaagtggggggaaccctcaactcgctcaattctgccactttctggaaggtttaaccaaatatatggaaaactactggccaacattagcttggaggataaccggtggattttaagcattcatataatttctcttttccttaactgtgcagaggactgaaacagtttgagaaactaaattcatttttcactcactgcattctgggtgttctttagtggacggtcgtttgcatctttgcaagcctgggactggcagaagcagaagcctaccccaaagccagagctattaaaaataataagcactactgaaaatattaactacttttcactgaaggtcttctaaaaggaacatttatttttcctttcttgaaaacttttttgtaatcttctatttgttttaagtttctttttagaagtatgttcacacgttaattaaatgccacagctaaggaagcccatacaaaggctatgaaggaattggataataaaagcactgccactctgagctcatcagcaatggcctttctcctctgtcccccaaatgtgcctaagtatgacattgtagccattgtgtgaccaccaactgtgtttaaaatatcaggtgaatcatagagatgtttatcaaaccagaggatggtacaatcaccatggtaaaaaactgaattttccatgaataaatactgtgccatatttacaaaagataggctgaaagattgaattattagtatttacttttacagtaaaaagacaattttgcat

SEQ ID NO: 587300 - DNA, 4001 bp, Homo sapiens
ctcaatattagaggtggtgatctgctatataatatatacatcattggtagtgtaaaatctctttctaaacgtagtcaaaaaggccaaagaccattaacgtgtaactcatcccaattcaacactgccttctgaaaggcagtgttacataaacctcaatagagtagtacaatttttaacccattttcctctggacaaccatctcatctatgtttaaaagctgactgtattttatatttatgctgacaacatattttcttaacaggttaatttatgcccaaagggagtcatttataattaataagaatggttatttgtttaattaactaatggcttaaataacgaacatagccattttcaaaacaccatcaattgctgcccatcagagtatcactttgctttttttacaatacatgaaattcttaaaattgttttactttttacttctctaccttttgggtttcttgctttcaacagaaatgaagatcttttcttgctaaattctttctcactgttaggttgcaagttgggcaacttacccttagtgaggacaagatgttttctcatctccccaactacatcaacatcacaacaataataattggtgatagagtaagagatccataatctgcagatctgtttcttgaccaccaaggggcagaaatgcatttccacccccttatttctcacacagtaaaagagaatttaaaaattacctaatcaaactcagtggtagaggtggtgatccgctaaagaatctcatgcacccacagttcccttttaagacctattaatgcaagtactagtatagaatatatatatatttaaagctccagtttcagatagcaaggtttttccctttagaaaatctgtctctctctgtctgtctccctttctcccttcttccctcccttctctgtccctcccttctctctctctctctctccccctctctctttctcagtctctttcccctttcccatttctctgtattcgagttggaaaagtgttttttcttgcctttcgcagtcaataaacgtttacattacccagaaagcgctttacgctactggctttttgtgaaaacacaagaatgttttaatttgggggttaaaagtctttttttctttttcgcaaacttgaacctaccaatccagccttctttcgcgcctgctggagctcctggatcaagttctgcagctcctttccttccaggtaaccacttcctgcaaagacaaagaggcacccaggtgtcagatatctcattccaagtgtctttcccgttcactttccaagacagttatctttctggcgacccgagaggctctctcttgcctggacgttgattaaccagcaaagtgtacagacggtgaagcgctcccctcctggggtatcaaactttagatccactgaggacaaaggaggatggttggggtgctaagcgcagccacagaaactttgggggggcagcattccccaatccctgctctctctctcctaccattaccgttcctggaaagacaaaagtttaaggttttgggattacggtggaaacaatataaactttcaggttgacagtttggcggccagtcggggagataagaagataagattaggcagaagggggaagaagtaaagaatagaaaggagggataatgggatcaggaggctcagaaaagggcaaagaatgggaaggggcatggaaacgggtcttgaaacagttaaaaagagaagataatcaccgtcagcgtcgaaatggagccagatctcgaaaaactgtgaggctgtgatgagggatgactgcaggtgggattctgccattgtacagcggggtgtgtgtctgggtgtgtgaatatgcgtgtgtctgtgtccgcgcgagggggagtgagcaaaagctcagcgtgtgcgcgagtcagggctgcggagggagacctgggcgcgggcgctgccgggcgctgtcctcggtgctgctcagctcagcgttcctccagagttctctccctacaccccgcacccagttctcagtatttatcccgacggccccaagccgggccacgcctcctccagcctcccattcctcactccccgcctcttgctctcaccagccttcttcccctcccttccagttttctgctctgttcccaggaaagctagctggagcgagagtttgggcttgttggaagcagcaggtggtgggagatcctttgctcagagattggatgctgaaaacagaggctcatttccccctacatcctcctagtccaggaagaatcttattcctgaatattatagtaaaactcttgttatctagagaggtttaaatgttcagatagaaggggaaagctgatgacgggtaaaatcacataaaagattattatattcttgtgtgatttctccaagacttttcagtatttgtttgaaaaaaaaaaagcatgtgaaaccttggcacgcattagaataatttgattaatgtatacaatgagttgattgctatcaataatcactctattttgtgccatcatgtcaatgtttcttaagatggtttctatgaactaaccttgccaacacgaaaaaagctagattatggatttcttttcagcatgaagtagaattataattggaaagtaatacagttaaattataaaaccttaaaatcttagataaggaagtcatcttacagatactagagtttactgcctttcagtttagaaggagtgagtaaactaaaacaaagagaaaggaaggatctgaccaggttcataagtaggtacgttagtgctaccaccacagccccattcagtcgccttaacacacacgtctccttctttctgtttcaagcaacccctactggagaatttttcagaaattggaagtcaccatcagagttggaaaagctatctaactaaatgtatgctatgttatgtatatatatatatatatatatatatatgtaatatatatgtatgtatacacacatatgtatatatgttctgtactatatatacatatgtatatgtgttatgtattttaatataattaattatatacttggattatttcttatttacataagtacttctggagtatttggctttgagtcttttggaccttgaagtccactaaaaatgtatcccaaaagtctaattacaattgtactaaaacaaaatgaaggaacaagagaaaatctacacatagccaatataagcttaaagtgaattaaaatgaatttaccggccgggcgcggtggctcacgcctgtaatcccagcactttggaaggccgaggcaggcagatcacaaggtcacgagatcgagaccatcctggccaacatggtgaaatcccgtctctactaaaaatacaaaaattagctgggcatgggggtgggcacctgtaatctgaactacttgggaggctgaggcaggagaatggcttgaacctgggaggcggaggttgcagtgagccaagatcacgccactgcactccagcctggtgacagagcaagactctgtctccaaaaaaaaaaagagagagagagaatttaccaagctctatattcttaaccttgtgtaattgagtttgggacccctcaaatttatgtttttgagattagggctctatccattattatatttgtggagtttttttgtaagtatccttttcagagacccatcaatttgaagctagcctatttcaataatcttcttaatggaatcctcacttccatagtactttccagttcatacattatttttacttatgatacctcatctgattctcactgatggtcctattggtcctatgttagtggccagggtcgctgtgtgaaaaatatagtgtgtgaacttggagaccagcgctagagaataaactttgaagagagagtgagaatgcagtgactaaggaatgacttgaagaatcactctgacccttgctagtcttgacagagctaacaatgtctagactttggatacagttctgagacaaagaaaaatgctagaaaaagta

SEQ ID NO: 587301 - DNA, 4001 bp, Homo sapiens
acctggttggagagcgtttgcaccttgacagcattccagggcactgcctggcctgggttgtatgcagccttcaccagcaccttctcacccagctggggcagacggcccttcaccacactgtcagcacacaagccagaaggccccatcagaagagggaccctggccaggccaccctgactgcccctatgaggcctttcccatcaagatttcccacaccttgcacaaaaacagcaaagcaatggctttgaggcgggtgggggcaataccagcatggtgacagaactgaatccaataagcatttccgttaggggaccaacctcaagcctaccttagctgaaaaaagacctcttcatccacaaccccaaagtagtcatgcaagctggtaacaataccagtgaagacccgctgtttctccccaccctgtaagagaaggagacagctgaaaagtaaaagggaggaaactggacaaaatcacactctgccatgaaggtctcatctcaacccacgccccagctcagcgtactgcatcaagagttcgcacagagtgaagtacaggtgtggtgggcatactccatcattaggggttggggcatgtttgagctggttcttgacccacaagcttcttctgggatttccagttcattaattccaagacgtaagctaaagatttccctggagcgagaaatgaagatgccccagtctgaaggctatctgggcaaccccatactagcccactaccaggagagggatcaggaatgataaacactattatgtaagagaaaaagagcaccaggcctccatgcattcagtcccaagggctgaaacttactacaagggatgccgaacctacctgaaggtgcctggcattctgggacagttctgtggccacaggaggagtgagcaaaccaggaggagggcccagaagagatgttgaagctgtgcctatggggaaagagaagcaatctccaggaaccgcccctaccaccttaagcacgagtcaaccaaaggatgtggtaaatccaaaggctacagctccagccagctcctccacagagcttcactggcaatcactgtgggcatctcctgctttccagaggaacatcagcagcaaattgctctccaccagggaaaccccaaactaactccagagcacatacttcccaggatgaggccaggtagggagaacagtgatcacctgagaagttgcgtccccctggaagcgggttgatccgctggcgcttaaactgggacattgggaacgctgtcctctttcagagtcgtggggaaaaggcttcaatccaaaaagaaagaaattaacagcttataagggaaatttccatctatacccggaaaagtggagaatcttaagtaaggatatttcggaaaacagggaggtgggtaataagaatgaatgaaagcaatggatggagagaatatagagaagaaagaaatgaaacaagaaattacattgttccagtttgccctgacaataacctagtggtgcatgatactgtcatgctgttttacagacaaggaaactgatgctcagagagatcaagagacttgcccggggccacataaccaggtagtgacaaaactgctactcacacccaggcctcccaacaacttagcgctcctctcactatgccacgccacccccagagtagctggcggggtgaggggctcgagagagccccgatgacattccttcgttcaaaaacatccgccaaaaccctccacgcaaggcccggaaaaatggaggaggccggtgccggcgaggagactgtgtgggccctctccccggaagcccgacccgttgtttcctcgaccggctggtgggaaggcagctccctggccgaccaaacgcgaaaccggctgcgcgccaccctcctgctcccacgctcccgggccctccgctccggcctcagcagccgccagcgccgggtctcccagcagagccgcggcgaggccaccaagggaggactgaggcgcgcggtttctcctcctcccgcccgcccccaaggccgaggccgttgccagggagacgggacttgcagtccaaagaggggctcggccccttccgcgccccacgcatcttcgccgcccggccctcgcagcccctcggccagcggaggggcggaggggcgaaggggcagaggggcggcagggggccccccaacccacctgcgggccagggcagcgacaccggggggacaaagacacccggaaccaccacagccgctgctgccgccgccaccggaagcgcctctccggaagcgcgaccactggtcggaagctgccgctctcccggatatggtccctccctcgtctccgccgacctctcccttcccccacgccggcttgccatcccgcggcaactggggagcggaagtgcgccttcccggatcggatgcgcgtcaggaagtcgcgcctcggtagtgtcctcgctaaagaatcccatcaggaaagaaggcttcggatcattggttccgggctcaaaggaagcgggagctgggccccccaaacacaagggacccccgactgcctaccacgctcgcctccctctggcagtcgagactgcaacagataaggaaaccagcccctcctgactggaggagaaggatgcctatcagtgaccatttctaagagacattcctggtctgactcaagccagtgaccaccatgcctagccagtcaggaatcagtgccctaattctcaaatatgaaatctaagaggcctcaatgaaatgacctgctcaaaatcttgccaggagactggccattttagtccccattagcaatcccagcccccccttatcctccgacctccccatcatcactccagccttactttcccctttcctattcacctgaggtttacaaagcactttgaggcagtttaatctcactttatcctcataacaagtctgtgaggtagatagggcaggcatcattattcccagcgggaagctgtggctcagaaaggttgacttggggtctaaaaactagtacaggcatctggtttgaattaagacctgtaaacgctagtacggagcagagaagctgagcactggctttgaaagttattcagttcccaggttgtccctgatcttcctcattccttgtgcagtcttcaggagtccggggcaagattccatgcagaggcagccaaagccacaccgttctctgtcccagggctgccagcatggctctgaggaggaaagctcagtaactgcccactggggaataaaggtcagttccatccttctgcagtgacctcccccagaatatcaaccctttggatgcattatttcagaagagatggttggatccagccagcttgcaacactgacagtcacacagagatatgcataccattgcgcataaatacacatctgcaacatgctgggcccagacaggtcaccatgccaaaaacactccacggacacctgacaatgagtgagttcacattgtggaagcccagggatttctggtgaggaggaagagccctggagctgcggcatcttgggggcctctcaagaaaccaaggttcctgaccagactgcttagaggagaaagattcagccctcgactcaagagaggagggcaggcgtcagcagcttttcctggcaatgtggagaagcagcaagagggcagagggcgaggaagacttcacagcaagtcccctccacccagggtcaccaggtgcaccgagaggtctcagcctacagaaaggttttttgctcgttgcttcttaaccactaatgatggcataaaggtcttccggtgggggcggcactgaggcctttcagggaggtccctggactcgatcctgtggaatgaaaagaagacattaggctagaagggggaaataaaactaacaatggccctagagttgagagaacgtggtttatctgctggtgggtagctgggtgtgggcgcagcccggggctgttaaatgacttggtatttcttcctcctggagaacgattcaatacaag

SEQ ID NO: 587302 - DNA, 4001 bp, Homo sapiens
caaccgcatctcaaacggttccgaagcaacgctcgtgcacagcgatacacacggaccaaattcacgggcagcgtcagcggccgggcatccggataaagggtccatggcggtccctgtgctatttttgcaactttctctaagttggaaagtatatcaaagttttaaaattactgaaaaactcccagtaggttgaacataagacatccccttggcgcggagaacaaagtctacgcttttcccccgggcctcaccgtagcggcccagctgccagctgccgcttcgtcgcacgtccgcgcccgccagtgcccgggcttgctctgagcctgccggctcgcggtagggccccactgagggcagggatgcggggtcccaaagggcattcagggaaagcaggcgctgagctctcttgcagcttggaaattggacgcacgaatgagtggccggccggaaatgctagagcatgcacgcgggtgtcagagccgcctgggggccacgcctttattaaccattgcattatccccgtaagcgccctgcgcgcctgactcgcccacactagggcctcctgggcctcactctctgcaggttcaggctctacccggggaggcttctgccgcagcttcagcgttcacgctgtcctccgactgtggggggagaagagccggatcccgatcccgggacaggccagagagaagcttggggccagacttcgtggagcggagagtgtcctgtgaggacaccctcggtgaggaccccgaagagatcccagagccctcgagtgactgcaccagcgacagggcccgggagcctgcgcgcgaagcggtcagggatggcatccgggatcccacctttgaagtggccagcgatgggaccctggagtccatgctcgatagcaccaacgaggggacccgggaagcctcgcgcgacgggaccacggacgaggcccggggggccgcgcgcgacggtaccacagacggggtctgggaggccgcgcgcgacgggcttatgggggcggctaatgacccggggcgcgaggtgggctgggagaaggccggccgctcccagagcggcgggcctccggggcccctgcgcagccagccgtgcacacgcgccaggtcccgcgtgtcctcgtgctcgcggtgcagttgctcgcgctgttccagcagctggcgccgcgtgtggtgcagcagctgggtccggcggagcagcagcagcagctcctgccgcaggcgtccgttgtccgctttgatggcctgcgtgtgcgccacaagcgcgcgcaccgcctcccgctccgcgcgccgcgccagtgactgcacgcgctgacgcgcctcgcgctcgaaggccgccttgtcctccaggaagcgccgcttcacgcggtggagcagctgcgtgtgctccacgcgcatatgcagcagctcgcgctccagcgcccggatccgggccagctgctccagctgcagcacctgcggcgggggcgccgtcagctcacccccaccccgcccccggcccggccaccagccccgccccgcctcaccccggccgcgggcgggctcactggccttgtagggctgcagctcttgcacctgctgtgccatctgtgccgcgcgcgcctccatctccaacagctgcgcgcgcaccccgtcctcgcgcccgtggtagagcgaggccagttccgcccgctgccagtggatctgcgctaggtccacgcggttctgctcgtccagccggacgatggctttggcgcagcgctgggcgcgcgcgctcacgtagctggcgtagagccggttctcctcgcgcaggcgcagcgcctcgcggtccaggaaggcgttctctcgcagcacctggtcaacgctctcctcgcaggtgtccagctgctccgagagcagcgcgtgttcgcgttgcaggtactgcgcgcgctccgatagcggctgctcggcacccgcggccgccgcaccacctggctggctccctgcgctcggcccgcgctttttcttgggcgccatgggttggtgcctggaccaccaggactggtgagggcagcgaccccggccccttccccaatttagcccttcctcttacctggcctaaatattctaggcgccaggcccagaggtgggacgcgcctcggggtcacgaggcttttggggaggcagatcggggctttgggtcgcgggtcagggcagctttgccaaccttcactcgtgggctcccgctggaccttcgctgtccgtctgggtgcgcctaacattagtaatgttgctgctcggcgggcacggtctctatggagacagaacttactcgtcctctcccacccccaccccgttactctggcgatggccgactccttcattccgcacaactctctcatcttgagtcgcccgtgactgcttgtgaatgtgcccccagagatagggcctgagctgacaaaactgggcttcagacggactccggacgtgcttctgaatctcacagaccccagaagcgcccttcgccttcggttcagcaacgggccttctcccgggttgtcccccacttgaagaggagcttcaccacgttcccccccgtttcccgagtgaaatctctgtgttgtcaggagggagcgcttccctggagcattcgcctcttcagggacccttgctttccctgagcatttcgtgattccttcggtgaggcccccgtgggaattggggttcctgaagtatggagtccactgggcgcctagagagcgtttctctctgaaggtcctaagcgcgcgcgtgcggcacccgctcagctcatccgcggctctgcagctgggtagcttcccttccccgtgtgcccggatggctggaggacatagggatccaaaaagggctggctttttctccttttctgttgactttgtggacacaacatcattattgaaaccattcctatagactttattaatcagggaagaagggaggcgagaaaggaaaacaaacccagcttgcagctcgctcagcattcattgtgaggtcagcctgcctcccaactccttcctcagagctgtttggtgcctgtggccccagaatcacacagaccctgtcacaagatgagaggtccccataactgctctataggtaacaacttaaacatagtaaaatgtgaggttttctatttgacaggtcctgcacacccatgaagcgactgacccagctggtctgaagcaccccacgaggaggtaatgtgccaaagaacgcagggtacacatcctgaggacttcatcccctttccccggccaattgatgaccccattttacagtccgtcacccgccacaatccctttaaaaaccccagcccagaactcagggagatggatttgaaggtccctcccatctccttgctcggtgtccggggatcatgacactttctctgctgcaaactctgctgtcttgatgtattggtcattactgcacagcaggcatcaccacctgttggtcctgtaagatttgcctccgtctagaccagcggtccccagctcccgttctgttagatgcctcaggaacagtgtgtccagcagcctttgacacacaacttaaatcgacccctattttgtgttctgtcatcatagagttgagtttctgcccagtttgtccacatttgctgggatgtgggcagatttgaggatctttgtgagggacacagtttagaaaaccacatttgcacagaggtttgtggtggaggtcgtctggtggctcatggacatggctgggcttgctctgatcagccaacctgcctgaaaggtgcagcagagccttttaaaattaagaacacgattgaggcattttactccttgtaaaaaaatgtattttaggctgggcgcagtggctcacacctgtaatcccagcactttgggaggctgaggcaggcagatcacgtcaggagatccagaccatcctggccaacatgatgaaaccctgtctctactaaaaatacaaaaaattagccaggcgtggtggcaggtgcctgtagtcccagctact

SEQ ID NO: 587303 - DNA, 4001 bp, Homo sapiens
gcttgaacccgggaggcagaggttgcagtgagccgagatcgtgccattgcactccagcctgggcaacaagagcaaaactccgtctccaaaaaaaaaaaaaacaaaaacaaaaacaaaaaactcacctttaacaagcatatagagtagcaatagaatagaaagtgctataagtaagtaaaaaaatggcattcatttattcaacaagcatttattgagaactactaaccagtcactacgttagggaaacaagtacagtagtccccccttatctgtgggggatgtcttccaagatctccagcagatgcctgaaaccgaggacaacactgaattccatatataaagggacttgccacataatgatgctttggtcagcaacaaaccacacatactatggtggtcccataacattataacgaagctgaaaaattctgatcactattgcctgatgacctggtagccatcataacagcgtggtgcaactcactttttctacgttgagacccgtttaaatacacaaacaccattgcgttaccattgcctacagccattcagtacagcaacgtgctgtacaagtttgtaccctaggagcaacggtatactgtacagcctacatttgtggtaggctataccacaggtttaagtatactctaccgtgttgctacaacaatgaaaccgcctaatggagcatttctcagaatgtattcttgtcattaagggacgcatggctactggtattccctatatatgtatacctatgataaagttaatgtatcagttcggtggagtaagagattattgacaataactaataataaaatagaacgattataacaacgtactgtaataaaagttaggtgactctgctctctctctctctcaaaaccttattgtactgtactcactccttttcttcttgtgatgatgtgaccacggaaagcgaaatacaggacaagtagggactactgtaaagagatcctgtccacgccctcaagggacttacactctagctcaagcagacaccatttaataccacgtgataagtgcaatgccaaaggcatacttggaacgttaagtgggtcccaggaaaggaatagctaagcaatcttggggtaggagctagcatcaggaaaggcatcttggaaaagatgggccaaaactgtcttaagggaattagctgggggttgattttaggaaaggggaataacaggaacagaacgaaaccaagtcgggacactgcatttcctgggaacgaagggcaccctttccttatctgtcaaagataagtcagaagcattaccataggtcacttctgagatctgggacatcaactgcccggagagtggctgggtggacatcccagggtctttttattgttttctgttgcatcccagaccctacaaccccttcctgaaagggtaagtcgcgcttcccttaagaaaaagttgttagcaggtgtctcctttctcacaggggataattacaagggttcagccagaacaaaggccgcagatggaaggtgggaagaagacttgggataaggtgtgtggaggagcccacaggctctgcccaatcccagggagtgacgggacgtctttccgattaggggacgagaactccccgatacaaacatagcagtggcatcgcccctccgcgccccccacgccatgacgaggggacgccgggggaaatcctgcagccgtgggagggacggatgtgctgggggaccgagaggccgcgggaagaggcactcgcatccagaaggcattttagagcgagggtcaggcgcagcggcggactgcgggtcccggcttcggagcccgctgtccagcagggtccaggaggacgtggcgcccactcaccgctgctgctggtgaagtagaacaccatgatcccgggagcggtgcggtgactccaccgcggagcagcagcgctcaactcacgaagctcaggataccagactcgcggcggccgcctggcccccggaactcctccgtgcacttccggcggacgtcggggcgcgtcataacgccggccgtgggcgccatttttaatcctggcgaggcgaagtgtagtggcaaggagtttggttcagtgatttgtgggttaagggaaagaggctgggcatcttgggcacgttagttaacctgtctgtgcttcactttcctcagcagcgaaatgaagatgatactagagcagctaactcacaggatattttttagggttaaataagttaatgggcgccaagggtttagaacatagcacacaaacgagttgtttctgatactcaccaggacaatatgcctcttggggattggactttgttctggcttaaatcgaaggcctgccatcccaaacctctgaacctcagaggtcctcctgctataaagtaggaataatcatattcatgtaaagctcctacagcacttggctttgccctgattatttctcttgagaaagcacttttatctgaggaatgtgagtccctttaaattactaggtctggagaggcattaagataagaccccatcatgttctaccacccccttgagctatgtattcatctactgaaactacctgcttctgccacaggtagctacctactaacctaacactgccacacaagacactatgacatgacccacaccctatagtttaacaatgtctagccaatcactgatgcttgtagtttctatacatcaatgagaatgcttgacagttgtgtatcagcccacttcctgccccccttcttcgtctttaaaaacctgcttgtagcaaaggccagacagagctcatatccaagcctgctggtggagggcggtggggggaggggggttggaatcttctgggcagctgtccccgctttaactcaagcaaactctacattctttttttttttgcctcagccttttccttttaaactgacactcttacatcactgtcactgacttcattctatgaaattgagggcgtcacttaacgaaatttatttacatgcttgctttgacagcatgtatactaaaattggaatgatacagagaactttaacatggcccctgctcaaggatgacatacaaatttgtgaaaattaaatttgaaaaaataaacataaaactctaaacttatttgaaactaaaaatgtgccagaaacactgtaccaggagctggtgacacaaagatagtaacaatagctaacaataaccgttttaggaactttctggttttccaaagtaagaatttagctctgttctgtaaatagcaattgttttgggttctccgttgtattatttgtaaaatgggaatggcaatagatattaatgccttacagattgtggtaagaagtaaatgaaacaaaacatgtaaagcatctaagaatgcctggcacatagcaggtgttaagttttatattttaatttgaaaaataaatagaaacctaaagttactaataaaaaaagtgaaactgacaatgaagcttcaaatgtgaaaaataagtgcatcgagaatcttggagaggcctttatttatttatttatttatttatttttgagacggagtcttgctctgtcgccaggctggagaggccattttacaaaaatttcttaccccgtgaccccagaatgtatctcaacttcaactggaccgagaactacaattcccagaatgcacctaaacaaggccccgggaacggagtccggcgttgctgcaggggattgtgggtggcgtggtttccctcagagatttttcacctcaccagggcgcgagaatcttggaaacagccaccagggtgggcggggcaagggctggtgctccaccaatcaccgagccagcccctggaagcgctgagccgtggccaatcggaacgcagcggcttcctcctagcctggcgcgcgattatttgaagacgctcacggagcggctggctaggctgaggagagctcgccgggctctgaggcgcaggtaacctctggagtaggccgaggcggggggctgtggaaggctgaggc

SEQ ID NO: 587304 - DNA, 4001 bp, Homo sapiens
aaatactaatcactttcaagatcacagaatcgttctctgtatctagcaatagtagcagggacctttttttttttttttcaaataagctctttttaaaaaaagtgtgctctgatacttttgaatatttgaaagcaaaaccttaaaaatggaatcgattacttaaacgattcttttcccaataatgctggtttcaaacgcaatcactatctccaaagtgctgctttctgtaaaacacataggaagaagaggtaccaaagggctgcgtgccaggctgtcagtgatctcacatcctatttatgcccaagaagcagctattaggaccgtctactagagtctgcgagggaacaaagagcagtatattggacagattaggcgggccctggtgcaccaggcagttccaagagggagggatttacaaaaaggaaccagctgcttgaaggcacttattctgcagctgtagtaggattcgggcacatagaaaccacccaaagataggcgccttcctgctgacctctaggggcattaaaagtaaaagtgtcagaggaatctatcgcaaagcaataaacacataattctattcttattcatctatcctccatttttcccccaaacccacccagcccagttctgcattaccctaatttcatactgatgtttcttggtgacctcctctcttctttttttgacatcctggaaaatagaaaagaccattggtaaactaaagtcccagcatggaatttcgttcctccctctttctccttaaatcacctgggtagttttcctcttcttggcctggattatctgggcttcttggggggattccgtctggctgggctggggctgctgcttagcttgtaaacggctactgtagtgaatttttaaaaaggaagtgtaattagtaagttaaaggcagcaactaatttgaaacatgtctctaagacagataatgttaccttcgtcttgacattctcttctttcaggtgtataaaacctctgaaggggggagaggaaaagccgcagtcaagtacattgtcattcacattctccaagtgccagtaagacgctgattcgcaggtgaaagctcagtccctccgaagggggcctgggccctgtgaccctgccatcttctgtgctatgttagctagctcatggtaattcattttggatacaagcctgcatttcctcaactgaatgtacagctggaacgcgagtgtccaaaaatttaccaagcactcctgacaccttgaacgcgcagggaggcacatcttcctcaaacgggtttttctgggtcctccaccctctcccccgtacaccgggagtggggcttgggcagcgcccccacgtcccgcctccctcctggaccagcggggagagggggttgtggaggcgaaatgctgtggagaagccggttccgcgccaatttggagagcggcggtggcggggaagcagggggcggaggaaccaagactggtgtcacggcctccagtctcctttccctccttcccggccctgccgccctaccgccgctcggaggggcgccgggaccccaactccagatgggaagcggagggcgtgggggagggcaggaaaaggagctaaagaaaggggagactgggctggctgggaacttttctccccatggaggggacccggcctcccatcctctctcccacgggatagctccccaaatgagggtgggatagagaagcccctagaatgaggggcggctctccatgcccagccgcttcccggtcccctgccaaggttcctgacagggacggaacgcgggaacccatgacccccagtcgtctagttctcagccctcccgattttcctccctgaggctcccgcctgtggtaagtgatcggcccaactgggctttctttcctcccacatcccccctacgcgcagcaactcctcaccgccagaccagctaccgctcggctcagctggcgccggcgccaacccaatatataggccgggccggtcccgccccgcacgcatgcgcctcagactgacacctccggacagcgcgctcccctctcccgcccgtccgcccgcgtgcccgcgcgccgcgccctgctctcagtgcgcgcccgccacccggagcggccgtggggtccactctaccgggccttctgcccgcgtccaccgcgctccacggcgcggccggcggcggtagggaaactctcaggggctccttctccgcggctgttctccccgccgcctggctcgcgcatctcccgccagtttgcttttgcttcctcccactgcaactcctggatttcgggggtgtcagcctgcggctcagcccgggcgcataacagggggacacgactcgggcgaccatagggtggctgggaagtgaccgtccaggggcgcgccctagctgtcccgccaaggcctcagggaacccaggtctttcctgagcgacgcggggacccgagggcccgcccctcggggaggagcaaagcgttggctgaagagctggccaatgggaggcacgggcggcagcacaacgtggagtggctgcagaatgtaaacaccactcagccacgcgcctggccaagtgcggctctgctctccccagtcccggtccgcgaccacccggagcccgctccgccggccttgcgcggcgcgcccagggaaggcatttccagcccgcccacccaggtatgtatcaaccctgctttccggctccctgctccccctaccgggtttccctccccatgggtcggtcgctcccccaacccgccgctctgcccctgcagtggcctccagctgccaccccgcagtccccgcgcaggaaacgctcgcgccacgccgcgccctcccttgcttcctctcttctccacctccaattccgggatcccagagggtaaaacccctctccggagcggggcccgggaacggcattcctcctccccctgagcgcggtggtccccggggacctggccgggtgggaagaaagatcgccaccacgtgcaggccccgggcccgcctgccgcgccccgccccgccgccgccgccagcgcgccctgcggagcccgcgcgagccggcagcgcgggagggcgccgttcgcgcccgagcgctgttgggaggaggggggcccgacgctcttcctttatccttccccgggtgtttaaacttaggggtcccttcgctgcctctatgaatgcccccacaactggcgcaccccaaaactgcacatcgtcaagtcagacttgcggcgggtattccgcaaacaggttttgcggcgggagcagcgaggcggggaacagctccgggaacaaagatcccccgggtggaggagcagtgcgaaggcgtctcggaacccgcggtagctcgggcgggccgcgtctgcccaggccctgagcgagccggacggcgagcgggccgcgccggggagacggagcctcgcgggcgggagcccttcccgagatgcaccgggaggcggcgcccggcgacccccgctcccgcccggccttttgtgctgcgccgctcgagcgcgcttgaggcccgggaaatagccgccgccggatgggcgctttggggcgggcgaagtcctttttcacactttttcgattcttcgtctcgtgacgccggcaaaataattctctccctaatttacctgtaggagctttgcccaaggtgacagcatcaggagaagcccatgccttgtcagtcccaagaaactttctgccatttctaacgcttaggatggctctcggcggggcagaagttgcctcccttttgcagtcactcaaaacgcagttagcggtatagctagcttaaaggtctaacagcatgatgtcaagaaaaggggtcaggggtctcccaacaagggtcacctgatcgtaagcagaactggtggccctcgtggttgaatttgataaaatatactgaaaaccagtatgtcgagtaacgtttgtgggaatcatctttgaatgatgaatgtatgctcagtactgagttaactagtaaattgattttaaaagac

SEQ ID NO: 587305 - DNA, 4001 bp, Homo sapiens
ctgagcccaaccctgtttgtgattgttaaaggaggtacatcctgctctttcagtattatattttcttaattgctcttaaactttctcttatttttgccataaatgaaaacaaaatgcattattactattcatatcatacaccctcctgtatcctaggtgacaggtcaaaaagtgactcacacacacattattttctagtattggcatcaagcacgactctgacttgggaacattatcatgctgggtgccctgcgattccgtgatccctgctatgctaaatgaactgtgcatgtgcaaagaagtctctctgaagaagcaagtttgcagagtaggcaatttaggtacctaaaatatgacagtacgtataaacaaataaagctgagttatattaaagttatttttaaacttgaaaagcattacaacagaatgacaacttttcttacctgcagagttcctaacaaagctttcaggtgtaattcccaattgctctacggttactgtggaaaagttcaaaggtgatttaaaagtatctggtgtgcaaggattaggaggtaattcggcatgcttctgaggagtcacaatcttcccagttcccaaaatgaaagaggcatttcctgaaacggacgacatattgtaggggtgaggacaactctctgtctaaaccttcaacttcacaaggaggcagatcatcacataccagcattattcattgcagactccttggtttcagggggcttgtcttttgaattggcatccatctaagaggtgaagaaaaacaatgaaaaataaccccaccagcaagatgaacgtgattcgatcacgtaccttattcaggactgaattgtaatacagtccatactggcatagaaacacacgtcacaggtttcattttttattttaatttctgtgggtatacagtagatgtataatttatggggtacatgaaatattttgatacaggcatgcaattcgtaataatcaaatcaaagtaaatgaggtagccattatctcaaatatttatcctttttgttataaacaatccaattatacttcgttatgtttaaatgcacaattaaattatggaccgccaccctgttgtgctagcaaatactagatcttattcattctttgtttttctacctattaaccatctccacttccttcccatccatccccaatacacttcccaccctgtgctaaccattcttttactctaagcgcgtacttttaaagccaaattaaacagaaagaaatggagaaaactgctgttcaggcaccaaagcagaccccaaaggataagccatggcttttcaaccgtagcgaaaacctgaatcataagggtacccctctcaagacgcagctctatccatttccagaaattctctcaacaggtccggatgcactcctggtcacccagagcagctcctgacaggagtactaattctgtgctgcagggtaagccgaacaaagtgcctagaaatgccccggagaaacagccccgtggcagcgcggatgcaatcctacctctcacgccgcacctgaaggcccgccaggcagacaggcttactcccagagccccgtggcaggcgagcgtcgcgtcggccgctccttccagaccccggctcctctgtccggaagggctctcctggcaaagcacccgcagccgggagccgctcttcgaacccggagcccgaggtcccgacggctgacctggactcacagcctgcgctgatcctggcctgcgctctgcccggcagcctcctccacccgcctcctccgcccgccgaccgattcaaatccccgaccccgcccctcggtaccgaatttactctacgaatcactccgccacctcccccttctccagtccgcgcacactccgagcgctcccaggcctctccctcggcactggagtggcttcctgggctcggagagggaccaccgcgagctgcagtcaacccgaggactacagacacctgccactgccttgtgacctcggggactacttttcaggagagtctcgcggagtaacgcttctcttagcgctttaactccgcctcccacctttctattggatgctgcaaacttcgaaaagactcattcaaccaatcctaacagagcgacgagctggctcttacccaatcagtccgtccctaccgcagccgtttcctagctgggccggcttgtgggcggggctaacgctggaggaggggctgactggtgcttgggtccctttcagcgctccacctcctttccccagaccccgccctcgtatgcagataagcgctacctaaactagagggtgcgcctgctcagtaacgctggaagccgccgtccggctccaggagcctctctgattggctgatgccccttcccgtctactagccttcagcgtctcttccctccctccgtcccggctaggttagccagagcccgcccgatactgggtgctgattggctggactctgtccggtgacgcgggttggttggtacggcagagtgtcagtctcggagaggtgggggaagggccccaggcaggctgaggagcctaggggcggggtgggaaggaggaccggccgaaccttgggtgtgggacagagtgcgtgcgtgtggtgtgtccccaagggcaggaaggtggcgaagggaggcgaatccgagtgggtggagggaggggaagggcgggaggagaaaaaggtgggaggaggaccaggtgggagggtggcggctcactcaggacccagcgggggcagcgcgatgaggcgggtgaccctgttcctgaacggcagccccaagaacggaaaggtaacgggggcgtgagggggcgcggcgggccgggggtcggggcgagggcggacggtgcggaaccggctggcggggcagcggtgaagttgggtagaggggctgggaggtgggcgtgcgcgggctgggggcgctcggggacagcacagggtccccgcggcctcctcccgaccctcaggacccccgtgcccgagcctgcccttcagtgcctcagctgcctgggggccggcgcggttcggcccgggggctccgggtctcccggatgcttggtgcggggggcgcggggacgggggcgcggggagggccgcggtcacctgggcgcccgggcggtcgcgcctcttcccgcctctccccgagaccccgctcccgcctgcgggaggaggcgcgccggctccggtgctgagtaatgatctgctcggaaagtggcggcgagcaccagagcctgtggagatgggtcagggagacagaagtaaactgcccgtggataaacaaaatctcccatccgaggtcgcagacaggatttttaaaatgggggcattttcttgttgatttttgccctcctctctgagatgcctcaagcccccacgccccgccgccgccaaacttctctgtactctttttattattttgccttattttgattccctagaggacgggtacagcagacccaaaagggatcgatttgacagtcgcctttgctgtgttaggcctttgcggagagtgtggtgctcagtgttcttccagcgctggagcaagccaaaacgaattctcttccttcccagccttttgccccacccatgaaagttgttctgctcctttgggaaattttcactgttcgaggcagacatttattgcgttgctaaatgatacctagaagtaactcagcctttacgagtctaaggtaaaggtaaatgggtctcgctgtgttggttgccaaaatactctgctgcctgcacattcggggaacactgtaaatttttaaatagtgaaattgtccagtggcattaaaaatggctttccgattattcagtgtagagtaaacatgctccgaaaattcgaaccagagtgtggtttgttggctataattttatgttcttttggtcttagagatttaatactcatttaaaatcagaattcgtataaattcgagttcttgagttatcatgaatgctaccccgaaaatatgttcacgaagtttacatttc

SEQ ID NO: 587306 - DNA, 4001 bp, Homo sapiens
agaatattcatataaaaagatatgaaatactgatactacaagactaaaccttgaaaacattatgcttagtgaaaaaagtcagacaaaaaaagcctaatattatataatccactcacatgaaatgtctggaataggcaagtccatagacagagaaagaagatttcggagttgcctgcagttggggggcagagggggaatttagagctgagagctaaaagacatggggctgcttttgaaagtgatgaacattttctaagttttattgtggtggtggttgcacaactctgagaatacactaaaaactactgaattgtgcactttaagttggtaagctgtatgatatgtcaattatatctcaataaagctgttcttaaaaaaagtattccctgcaactaatgcatattcactgcaaaataatgaaattgaactgacataaatatacaaaacataggctaaacattttcagttacctcggtctaggcccttcagatcattttgttctattatcggaaatgtcttacggtttccaaaatcatttattttcctttaagtatacgaggttttttttttttttttaactaattttacctattatttgacctcttttgttttttgtgtttttaaaatgtgaataagaacatttcagtacacaaagattatctttgccctggataaagtagaaaatgacaatgtgggcataatggcccctcagcccctctgatagtgtctcagcccaggcagttcagccctagataaacttgactcaactgcctgcctgaacgaagactattttctttctacatgactaaacctagtaactcaggagacaaggaggccaaattctcctccctttagttttcccactcaggattacattgggcctggtctcaggaacaatccaggagtttctggaaaagccatgttatcttcaaactagaattttccaatagctacaggaggaaacacaggaaatgaaagctcacatctgcaatctgtgtaattcccttgccttgggtggtccacaggagcagcccacagtgcagtggaggaggaggggagaacagaagccctgcttgggagagaccatctggctctatcaatgagcctcagccagcgtcagatcccttctaaggaggcctgggaggaggccggcggaggaccctcacttccttgctggagtctcacttagcccacatgctcctgctttaaacctgattagatagaccagcttctcaaaaagggagggctccagagggtttgttttttttttttttttaattctcagatcttcccaagtctgctctcctaagtatgagaaacaaagggaattgcctagaaccaggactatatctaaagggatttacaggacagaggtagctgtacttcttctaagttaccactttatactaaagaaaatcaatggtagttaactacacaatacttgactagaagttatccaaactccactcctcttctttatctctaaagagaggtttttctcagtacaaataagtttttagtacaggggttctcaacgctggccgcatagagccactgggattgtgatttgactggtctttggtgaagcctggcagcagtcattcttaaagtttcccttggttccaacgtgcagccgaggttgagaactgctggcttggtgtctaccctctaccaagcaattttgctctgcatctcaatcttcacagcaacacgggaaggtatttttactactttacaaataaataaatacaggagcaaagaagatacaaatcgattctctcagatttgaatccggatctgattcaaaaaataataagaataaagcctgagctgctaccctcggcaaagctcccgtagcagccgctgagtgagcctcctgcccagctctacttacctcccaggagccccaatcagacaagcgggggtggggggactcaagtccactaagcagattgatcaactcagatccacagccaaaatatcatacttccaccgtgattacatgctcaccagtcgcccctcccactcgatctttctgagctttatatggttgggaatcctgccttcgctgaaaagcctgcttaggtagcattttcatgaaccagtaatacccaccactttatcccctatagcgtttcccgccacagctccgctccagctgatatccctttatatttcctccccatttcccttgttacagagcaatagcaccacctgacccccgttacagagcaatagcaccacctgaccccctcaaatgcagctgctctctttcagctgtccaggaggcaggcatcctctcccacagctactgaggaagtggttaacttcagtgtagctcggctcaactcagacaagccaggggtagccaaccggtactattcagagttgtgcataatgccaggagtaccttgcccccagcaataactgaattatctcgattcagtggactttctaaaatgtaccctccctcaatattgaaaatcctcttcaggaccagggtagaaagtggctcccaatacagcaatgctgacctgctgatctttgttctggaatttaacatggtctgtaaggaccttggactttttgaaatcattttttttatatcgctggaatacaggttccttttcttttctggtcacaaagcaaagaagtatagaaagaattaccaaaagtaaaagtaaaaaaataaaaaataaaaaaaagaattaccagggacccagtcccatgggactcagtgtcaatggcatatttcctgagcttgacatgggcaatgagaacttatttctcccaatcttgattcagctccctaataattaggctggtattctttaaggcatattggttttaaggtagacacacctgacagcaataacttaagcataatctgagcatgctcctgcagggcagatgcacctcaatgtgtgttctgagctcgggaatccgggagtggtcaacgcggagattggttccttgtctatgaggaacatctgagcatctcccaccgcaccttccaccctccgcccccatcccatggaacatgggccatactggggatggaggtcctttgttttgggtttaatgaaggttgccagatggaggttgttaggggagggtgttaagtgaaaatgttgtataaactgatgctttttgcaagtagttgcacttctcctgtatagcccactgctgctggaccctgtccccctgcatgtgaacccgcagtaaaatcccatgtctcatttgctggctctggggctcttcagcctcttgaatcttgtgccagaggttttcgaaccctgaatccctataagattaataggggttgggcataacactatttaagaccaaaaatttagagactggcaaattgggactgaatcccaattccaaggctattctttggccttgatattcttcaccaatatgggtttgggaattctaatgtggaccctcgatatcacacccctcctctgtctgtttgggctcataaatataatggcccaaccaaggaagtaaaaactaaggtggattacaggtctttgttagggagatctgaaccctgtttgtctaaaaacggtaccaagttatttcagtacatgttgaaggtataaagaggagattccaacattttctataaattacttttctaaagagcctttcagctctacttgccctgacttaaaagtatttttcattcatcttccacccacactcagaccagaaactgatagcagttagccttatctgtcacaagcctaagcaactggtggccgatcaccctatctcgtgctattacctaggccgttaggaagctaaaattaaaacctggtgtcattaacataccagaccaaatacagagaaagccacagaaagtcaagttcagatcctcttacaagtttctattttaaaaaataaaatacagcaagcttcagtgagagaccttaagatgggtcactagacatcacagtgaacatgattttgtcgtactattaatatttctc

SEQ ID NO: 587307 - DNA, 4001 bp, Homo sapiens
atggaacgagaagtagagtttctgccaggatatattttgcacatcatccagattttttttttttttttttttgagacaggttctcactctgtcacccaggctggaatgcagtggcacaatcatgactcactgcagcctcaacctcctgggcttaaggaatcctctcacctcagcctcccaagtcgctaggactataggtaagtgccatcatgcctggctaatttttaattttcttgtacagtctggatctccctatgttcagaccttccaggctggtcttgaactccagcacaagcggttctccctcctcagcttctcaaagtactggaattacaggaatgacccaccacacccagccatattttgccttttgtatgagaaaggaggaggtaccggaaatgtaaccttcaccttgaacagtgatgacttttttcaggggtcatctgggtgagtttcaaaggatgccccacctgcacctcacccaaagacttatatgggaaccatgagaggggctttaaaatgctatatatatagcaaaaccaatagttttattattctcatatttttgaatcctacttcctgaacatagaattagttcctctcttgcataatggtagatgctatttttatggcatcactgatttttttcttatttttctaaagaatgaaacaaaaatttctcaattcatcctgagtcacctacttgaactttctcatggaacagagcgctaacattcactggatgtgtaccatgcaccaagcaacatagtaagctctttacctacttatctaatttacttctcacaactacctagttaggcaagtctctagtggcagctctctgttctgtgcccacaggttggaaaatgatgaaactggcctaacccatttggccaaccctgaagactcatatggccccgtaactcactagaaaccctctctcagtaaaggactcgctttgtttcctggtgagagctgaatagcattcatcttcctttcatctaaacatgtgttttttcttcttctttcaaataatgcctcatttgctatttaagcttttgaagaaaaataaagacaagaaaatattagagaaggcactgtccttccaatctgctgcttggcatcccctaccacagagggcatctgtccctataaagtcacctgtcataaaagaccaagacagaggcaaatatcggaccattgaagataccaataagctgtgtgtggcttaacataaaaataaccacacattagcaggtggtaactccaccaccaaggccaaaagcagcccaggaagctgattaacacgcacatcagcctcttctctcacttgtgaaggcaggtctgtctgtcttcaattcttattctagtacttttacaaaaagacttttcttcttctctgcatgttccctcccttgctgtgtcctagacaattctaagaatcccaaattgaatctcattctctgagaagtagatagaatgacatgctttttgagaatgtgattccaaccccaatttctagaatacaagagccctagagcatcttaagaccagggacttttatatactcatcacaaagaatggatgtgatacttgtttaaacatcagagaactcaatttcccctttaattccactgccaagcttgatttcactgcagccacttcatcaaatgaatttataaaatatggaccaatgaaaagaaactacaaaaaaaaattgtgctccataagcaaaacttgtcatgccagcaacaaatttcccttctccgcatctgcatagcccacctcaaggaacaaatttgtcaagcaactttttaagtgccctccccctccatctactttgtccttctggaataaatacgttactgacacagttaagacatgtcagcccttacctttctgtaagtcacaaaatggtggttaaaagtccttttcttccattcagtggtcgagactcttgctacgactggagtatctcccccgggaacactccctcttccctgctttgcctcccagcctctcccttcagcttcagtcaaacattaaccattaacattttttattgctcttcgagagccactgggtatcataaaaagtgtcattacttttactccaggaaagaaatgactttgtatcaaaagaagtttaacttacatctaatccatctcaaaacaggttgctacatttttcaatgtagatgagtcaatgaaaagacaagaagttagagtggaaaagtttttgtgtatccaactatctctagagtgtgaggttcatgacatcaaagactttccatattttgtacccccaacacttagcacaggagacttgatcagcaaatatttatgtagattccatctcaaacacaaaagacggagcaggggcgccatgtctgagcaatgacacagttcattgataaccagccacatgagatatcataaatgactcagaagacatgaggaaagacacaatatggctgtgcctgcttttgaaatccaagggtcccttccaaagtctgcaagaaacaaccgatagcaaatttcccccaaacacaaaccaagtccttttttcccccccacaattcagggaatggatttacctaggaacaacttatttttccccaatcaaaatgaggtttttgattaaccaataaaagccaatgcccccagatttctcaagtcaaggcttcttttagaccaattcctgatttccacactttggtcactctgggaatccacactgaaggtgagcatcaatgtcatgtctgtgtctggtgtgttacacttggccctgtttctgtggaccttctcatgttcatttcttggcttctcctgagctgaggttgtgttttccattcctctccaggtgtgcatctgacagagggaaagcaagagagcccagcccactctctagaagggctccctcctttccagatttcatgagaaggtttcatgagtgctctaagccactgtgggaatagacctcatttatcctgaggaccctgcaagtgaaaccatctagttgcatgccagctgttaacatccttggtggactggtgggttcagcaaaggcccttcttgctttgtcccacagccagcatcactcatttagaagaatgaggttattgaggctaagcacttctcacattcttcacacctctgccctcccattagctgaataaagtgtgcttgttctacaaaatcaaatcgcttccacttgccacatgtttcagttcctggaatcaagggcaagcatctcatcacacagcattgttcataaagaagtttgggtcttctttgaaaattttaaaataataaagtgcttttaaatttatgagtttttttttttcaaaaataaagtgcatatgtatcatttatagtcattgtttttcagcaacaataacaatgatcgtgacatgttggtatatcaattaaaattctgttttctcatttagcatgtctgcaaagtagattccagtttatagacagaaaatggggacacagagaggttttatttcttgtctaagtcacacagcctttgactacagaatcgggactgcaaccctgttctgattcaaatcccatcctattcactacagctatagactctgccagatttttttccttccagctttatgcgagtaaaaaaaaaaaaaaaaaaaaaaaaaaaagtccaagggcagaaatccctgcatgagcccattcctgttggaagatggccaagttccgaaatggggttcctctgtacatcacttgctatctctagcccccagcttccagctcaaagaattaggttaattaaacactgaaaatgcctaaaccacccatcagagaaattaacaggtgattattgcatttctgaattacagaagctatttctgtactgtgggataccaggttaacaagattctgagagctgttcatatattccttacatggtttagacatccttccagattaaatccaaatgttaagaatgtgcacgtttcaggtagccaccactgc

SEQ ID NO: 587308 - DNA, 4001 bp, Homo sapiens
aattatctttggacactataaagattttgttcccttccttatagcaatataatcatgacaggccatggttaactacatcagatacacgtagcagccgtgaccaagacatggtgccctaataccaagtgttcttgggttaaaggcaggcggctttttaattaaatcttaaagcactgcaattactggcaagacagctggtcttaagcagttttgtgactgcccttttcatccactacatgactattccggcctttctggagcacttttgaaaatctacttgactctgtccacaagactgaggaaagtgaaagcaaagtcccgggaaagcgggagatgattcagcccggggttctgcccctcgcccctccagcagcctctacagttagggagctcttgaactgttctcagcaggggcccccaaaaagtcaacccttccccaggtctgcgttcttcgggagaacaccttctgctggaaagctgctagcttacctgagctcagccgtgctccacctagcttaggcaagttaaataaggccaggagagagcctttaatgcgttttaaaagcgacagaccctctctcctgagtagctcgggcctgcgccccatccccccgccccccccacacacacacctggcgcccgggctccctggtgctcgctggctgcgggtccggaacgcacccttcccgagccgggtcctgcgccaccggcgggcgggcgggagtcactgcgaatataggaagcaggggcgatttcaaatgctgctttattcttacaaatactgtaaaaattaatataaaaaagtgagcatgctcagtcttttcctcttatctacaatacaaagggtttgtctgaaaagtctggttttttttctttttacaaatgtaccttagctgcatcaacaggagtaagatgtagaaaaagctaccattacaaaaataatttaagggaaaataaacacgtttagcttctctcgcagtttagtggtggtaagtccaggctgtagcttctttgcgctcctatgtcccaagaaactgcagcgggcacccggcggctctggctgcgccagggcagggcgcgctccgctccgggccgtcgggtctgaggtatgggtcgttgctgagtctctcccgccccggccgcgcgttaccggcagtctgctgtcccggcggccggcaggaagggcgggctgggcagctgcttgaagaactgccggaggccggccaggtcccgcgtgagctgctccacgcgctggtgcagcttctcgttctcagccgacagctccaccaacttctgctgcatctcctggttgcgccgcttggccttgtcgcggctcttgcgcacggcgatgttgttgcgctcgcgccgctgccggtactcggggctgccgcggtccgggcccctcttgccggcgctcttctcccgggcggggccgggcgcgggggtctgcctggggctgctgcgcggcggctccggcgacgtgggcggggtgggctgccctgcggccgccaagctcaccacggtctgtgcgcacgcggccacctgcgcgggcaacagcgagccgggcgcgtcgccgtcgccccagtcgggctcgcgcttgagcaggcggggagcggcagggcccgggcccaaggggcgcgcggggccgccgggaagaagctccaggggccccgcgccgcccgccttgtgattgctgttgaagaggtcggcgaagagctcgtcgtggcacagctccagggtgggcacggcggccatggagtcgatgtaggcgctgaagtcgatggcgctctcgtcgtcgtacatggcgggggcggcggcgcctggctcgcctagggcccctggctcggccccgcggcccggcttgcccgcccggcccggttcgtagaagggcgcaggctccgcaggccagggcgcgccgcgcgccgggccgtccaggctgaagagcgcggcgctcatggcggcgtcgggccgggctctgcgtccaagcgaggctgtcacctcgctgggcccagccccgccgccttttctagccccggctgacgtgcacgccccgccccgactccggcaccgcgggggcgccccggggccgcgggggaaggggcgggggcgccctgggagccccccggagccgccccgagccttcccggggcgcgccccctctcagttcctccccggggccccctccccggccctggggacccccagcccacgttgcaggagggtgcccgcgctgctgctccctccccggcccgggccggcctgcgctgcgctgctgggaatgacactccctctgccagcactccagggccttctcttcttcctgtttgtgggcttggaacctcctcgctcctcggggttgggagtgaaatcaaaaccaggacttggccgcagcgcgcgcgtcccaggccggctcctgtcgccggagggcggggggtggagacccgtgggagaggacccgcgcgtccaaggacgccccccgaccgtgggcacgcgcgtgaggccctcgccccgcgcctccaccgtgggaccagatgcgggaagaggcgtgggggaccagacgtggggacagcggcggcctggcaggcggggagggctgcccgcaccgcactcgggcgcctcggggaatccgggccggttctcgctgctctcctcggaggtcccgggtccggccggccctgggggtcgaggcccagagacgcggctgctgcgtcctggccgaaaggccgacgggacgctgtcgccaaaagcagagcagatgggggagacgcggtcacgacaccgcgtcctccgccggctcctcgaggtgcgggctctccggccggacgctactccccgaccccgcagacccgggcgtccgccgccagctcccgcgcccgcgtttcttccaggtctacggaagcagtgccatcgtgtggcggcatcttgcgttagacctgtttttagttccaggctctttccctgttaaatattccaaaaaagtgccttgaacctaaagtagttgggtcctttttgggaaacaggtaagatctaccagtagctatagcagggtgcagatgggcctcgactcacgatggggttacatcccggtagacccatcgcacactgaaaatgtcttaagtaagaatgggctttgtcatgtgtcctgcaatttgaggcaggcatttctggtcagacccatttattattttaaattaaaaatatggtttttttcagccgagcacagtggctcatgccggtaatcccagcattttgggaggctgaggtgggcggatcacttgaggtcaggagtttgaaaccagcctggtcaacatggtgaaaccccatttctactaaaaatacaaaaattagccaagcgtagtggcgtgcgcctgtaatcccagctactcgggaggctgaggcaggagaatcgcttgaacccgggaggcggaggttgcagtgagccgagatcgttccattgcactccagcctgggcgacagagcgagactccatctcaaaaaaaaaattgagatgggatctcacaatattgtccaggctggtttcaaactcctgggcttaagagattcgccggcctcagcctcccaaagtgctgggattacaggcgtgagccaccatgtcgggcccaaatccattaaatcactatcgctagtcacacctgctccatgtcgagtctcttcctgcgcaggcctctcaccagatctgcgtcggaacaccaagctctactaactgctgtgcagtttctgcagtcagttccagaggtcatttctaacgttgcactatgggatatttaataggtttcctaaagaacaaacatatttctttagagttactcagagggtacacaatgatgatgtcacacaattaattacctattaagactgaaatccagcaatgcatagagtgtggacttacgcacatccagaaaaagttctagcacaaattgttttgttctcatatatttcagaagccatagaaacactattaaagccctccctaatcactt

SEQ ID NO: 587309 - DNA, 4001 bp, Homo sapiens
gcatcttctttttaactatttccctgcgttgcaggaagtcagggaatgctactgtgcttcagtaatcttccaattcaattcctagagatacagctttgcaaaagtttaggaggccgagtcgggcggatcacgaggtcaggagttcaagaccagcctggccaacatggtgaaaccccctgtctactaaaaatacaaaaattagctgagcgtggtggcacgcgcctgtaatcccaactactcaggaggctgaggcaagagaatcgcctgaacttgggaagcagaggttgcagtgagccgagatcgcgccactgcactccagcccaagcgacagcagtggaagacgccgtctcaaaaaaaaaaaaaagagacacccagcccagttctactatgggaaagatcaggacgtccaggccaaaggagaccagcctttgcaaaaaaaagaatggaaaagggtttggttattctggtgtccattaagtaatcactgaataataattttatgattttcattgaacaatacaagaaaataaccagccaacagtaacatcttggcaaaaaagaaatcaagatgctgttcaattatatctacaagcttcttcctctcctgaagacaatttttttccacacttcccttcttcctaagagagatgatgatagtaaataaattcacagctttcttttttacacctatcctatgatgtgagaacacagaactcttcatacaccttagatttaataatctcaacaaggatcagacaaccttgcattaaatttaagtttcgtgccttacatgaaagtatcctactctatattttattgtcagtcagaaattcttcaaaaataatacctaggtaacatcacatatacccagttcgagtttggtgcatgagtttcttcacatttcatttccttttccttccggattctaaatacaaggcactctaagtttggatttccgaaagtcccctcctttgcatgagttcctcgtgtattaactggaattgaagaggaaatgtcaatttacagtgaggagcggggctgaattacaacatcgagtgctccgctaaaggggccttgtctattactttttgaatgtactaaataaatgttacaaggctctactacttgcagagcataaccagaaagaaaaaccaagcaaagatatgaaggaggggccacaaaaccatagcacattcaggggataactctaaaatccactccaaagggcaaactgcttaataaagcagttcctgatttcccatccagtggttcacgtcccccctctctaagtagctttgaaagggcagggggaaggaaacgtttctgaacacgttcatgcccacacgccccgtggtcggagcccaggcagggtccgcggctctgctaaacccggaagctgcacacgccgtgccgttaacccactgccaggtgcaaagtggaagggggcaagaagtcaagggtggcctgccggaggtgggcgcgcagggcaaggagaaacgaagggcgaacccgaggcctcgccgccttccgcggtgtagcccgtcagcatctgatcctggacggcgcgcacaggtgaacacaccttgctgtgccgagaccatgccgagagagacaaggggcgaggaaaacgcagggaactgggggtggggccggtaactgcgcttcagaggctacacaggagagtggaagaagagctggggttgcccggactaggcagaggtcatcttcctcgcccccggagcgaacagacccgtgtggcgggaggaagagcaacgggaagaggtccgcgctgcggcgaagcctggcgggagcgcctccgcgccgcagaagtgcattcgggccccgctacggcccaagggcacccctctctccccgcttttctgcggccgcttcggaggtagggcgggggaaccactcacctccggcctccgcttcgccagcacccaggccgtctccagctccaaacacgtcaatggctcacgcagcaggaccttaagtagcgcgcatcccaacttgctgcccccgctccccggcggcagcccgcccaatcggcgcgcgccgccgccagactgacagccgcgcggggccctgggccgcaggggcggtcgggcctcgccccgcccccgcctggcgaaaggagggccgaggcgggaggagtgggcggggcggtgagcgcgaccccgccccctcttcccccgccccaccgcgccccccagccgcggcccgtctcttaacacttcggcttgacgggcggcgtcgcggcccaatgggcgggccaactcccgccagcggcggctccgagtggccagctctcgggcggagcgcgcgcggggggcgggcgcagcggcgggcggggtttgggggcgggccgacgggaggcgggggcggtggccgaacaggcagggggaggcagcggtgggcgcgacgtcggcggcggcggcggcggcggcggcggcagctgcaagttgggctgcaggggcagcgcatacactacaatggctgctggaaagaggcgtaaggaaacaatttccaggcccgccgcgtccagcccgaaatatgagaaaaaaattattagaaattccgcgggcggtgtagaggcggcggacgggccggagggaggatgttaaagccccgcggtgagttctccgggggtccggggcggcggcgaggcgtttagcgggagaaatatcagggttatttaaattatgggactagccgagggggcagaggagcagcggcggcggcaggaggaggaaaagtttgtgctactctcagcccctgctcaggaccccagagagaaaaataataataaaaaataaaataaaataattacgcggggctgcgaggactcccgaagtcgcttctgacagggcagggggcgatgcggctggggacccgaaggtgaggtcggtgggaaaaaaaaaaaaacctttattcagggtctggaaagtttgaaaagttttcctcctcctcctcctcctcctcctctctggtgctgtgaatattgtgacagcggcagcggcagcagcgagagcggaagacattagagacccgaaaaataagggaaaaattaatataaattcagttttgagagtaaactctccgcattttccaccaaaacatcccgggggaaggtcgcttcccaaagggcctggcggaaacccgcagtcggcaatatttggggggcactttgagtgacttggggtaactttgcccctttttcaaaagaggtttttcttttctggagaaatgaatttgtttttgccctttcctcaggtgggcaagccggggtcggggtgcggggtctgcagggaggtgtgagcccggggtgtgtggctgcgagggggggtagggggagggggtgctaaatgaaagcaggagatcggcacagagcagggacagcttgttgtcagtatcataaacaaccaaaatggagggagaactcaggcatataaccaaataaaaatttttaaaaaatcgcaaaaaatccctaaaaatccgggatgctcccccttttctcgctaaaggtaaaagtatgtaccgcctttcccctgaagtccattttgactttgcagggaccaaggagttaatatttatttattttttaaaactttcgaagggcaaaagccttttataactcaaccgacaatgagaaaacgtgaaaatccgatgcaagagaagcagggggagcgaggggggaggtggtagtgcagaaactgctaaacttattggtaatgtggactgatctcagataagataaacactatatttgctattttataactctcttttaatgatctttgcggggtttttttgggtggaaaaaaaagtgatgccattttcttaatagagttaatatgtgtgattggaagaatgaacctttccggctttagattgcattttcgtcgcatttatgcttcaggttttgttagtggctccctcctttctttaaactgggctctgcagaggagggatagagaggtgatggtgctcagagaggc

SEQ ID NO: 587310 - DNA, 4001 bp, Homo sapiens
aactctctccatgtgggttgctacttttcttttgtccattgtctgttcagaagagggggaaaaaaactagtttaaaccaaggcgtgagcagtctctaaaagtgacctccaggaaaagagtccgacccatagcaggagcactctccgcgccgctcgcttcacgggggcgctcacaaagcgggcggccggccgggagtttggggtgcgctcccacggctccgggctcctcgaggcagagccatccggagaaaggcggctcggtaatgatggctgctcggggccggcggctccttccccagagcctcccgaccagcgcccccacccccgcccgggagccgccgccgccgccgcccccgccccccccccccgcgacctcgacagccccgcgccgccgcgcccgccccgcaccgcagcccagccggtgcccgcgcccccgcccgagccccgcgcccccagcgagcccaatccccggtgcgaaccaaacaaacaacgcgtcccccaccgccctcctttcctctccccgctgaccgcttggcctccagccacctcggccgttcacgctccaagccgcggctctctgcgagggcagagcgcacccgggtcacctcgggggccacctggtgaccaccccccaccggcgctgacccccggcgggttggggggcgggggagccgagttgcgttggaaggttaaagtcgctattatgcagctgccgccgccggcggcccggccagctcgacaaggtggggtcccctcctcgccgcgcctcccggcgctcgccccggccccgctccctttcttctcctcctagcgcacttgggagccgccggggagccccaggagcccccaactccgggctcgcaactccgcgcccgcgaccggcactggctgagctcgggacgcctcccgcgccgcgtgttcgcgctgcccccgccccacgcggcgccccgcgcactttccccgccgccgacccacctcgctcggtggcggtccccgcgcgggctggcgccgccgcgccgggaggaacgcactttgttcgcgccggtgcggccgcagctcccggcgagcgcggcgtggtcggtccggagcggggggcgggggcgggaggcgggggtcgccgccgtccccgagccgccgccgccgctgctcagccgccccgcgcccgcgcgcccatcgcccgctcgcacttgagttggagcccaacttttcctccttcctttttctctcgaatggagccggcaactcgtgctcggcgccggcgggaggaaacgcgctcgcgctcccccgcgcgcagacacgctccctcctgtcccccgtaccccccccccacgccggcagcacaacaaaaagccatttacatgcgaggaagtgaccctcggccgcaccgcgcgcccccgccgccgccggcccggcggacgcaggcaaaagttggggcgccgggcggcgctcggggcgcgggttcgggccccgcgggcggcgacgccggcgacactacgcgggcggcgctgcgctcctgcgctggccccggccccctcccgccctcgcccctcgcccctcgccccgcacacgcccaactcctcgctcccaactcctagcgcggccccggccccggcccggagcgatttcctgccgccgccgccgccgccgcccctcccgggggcgccgggcgaactctcgcgctcaccgggtcggtcgggctcctccgctgcctagtgccgaggggaaaacaaaacgcagagcgggctccggagttggctcggcagctgcggccagggggctgaatccacgggcacggagttggccgggggcgaacgggtctctggtgagtttcagggtgtccgggtccccgggccgcctcctccgcggcgctcctttgtgtaatttcactcgattcaagtttaatccgatagttcccgagcacgagcgcgtccgcaccaccacgactcaacccccgcgccgccgccgccgccgccgctgccgccgccgccgccgccgccgccgcggccccagcacgccagcgcctgcgcgcgtccggcacgccgcgcgcacccgaagccgcggggccgcgcgcgcccgccgccagctccctccgggccgcgccgcgcccgcgcccgcgcccgcgcgccgccacctgacgtcaggcgcgcctggcataatttatgcaagaattcggccggggtggcggaggccgagggagaggccgagagaaaaggggcggcgcggagctgctgggccgcgggccgcgggccgcaagggcgggccgggcgccacttcccgtcccctggcgggcgccggcgcttcaggcgggtctccccgccggccggtgcgctgctgccgcggagtcttccttgcccggctgcacggagcgctcggccgctgcgcccgggcgcggactggaggggctgctgccacgtctcccgcgcggcaccttcccggagccgggtgcgccgccccggggcaggaagcggggctccgggagggctgcgaccctcctggctgccgcgaagggtttccgacgctgcgcggccggcggcggccgggggtgactggcagtctctgcagtaattatccttcaacttgaaattattttcccacatgaaattattcggaagggacatgttccattccagatgggttcgtgcctgcttctccacatcgcttttcccacctcttcgtggataggacaccggatccactacttaatcaaaaagtttaactagatggcattgattttgtcgaatttgttaccataccaaaaaagagagagaaggcagagagctcaatgattatgaaacaaagaaataggatgtatgcccattattaaacgtgtcgggactagaatgttttactcattctttggccaaaatggcacttgtatctgattgcatagtcttaaaaatccgagcctcttattccatttctcttcccggtacaaaatgaatgttaaacctgaagaaaaaaaacttttttttactaatttttattttaggaaatagatctacaaacatggattaagcctcttctatctgcaaaatacggagcaattataatgtgtttaaaccatcaattgtaaactttaagataattttattaggttaaagattgcacttattttaaaatcaggaaaggaactcatatcaaccaaagattgccctatggcaggtacagactgactggttattactggactccaaaataaactgagaaaatagcaaaactatgtaaaatgtactaatctcactcactgatggttacactacctgtagtgctaagcctgtaatcacaatattgttatttggacaaaagattaatcaaaactatctcattaagtaactactgcaactattcaataagtttgattatcctagacttaatcactaagacattgattttctgattttagtaataattctataaatatatcacattatattgtggtttgttaaatgcactgcttttagcttgctttcatcatgtatttgagttttgttctaaaagaaataaatgttttaatgtttaaggagcttacagatcatcaaaaagaacatagaagacagtacagaaagaattctggcatttaaaaagttgaaaccactaaaatcaacttccatctgttttaaacccggtatcacaaaccaagaatcacaactctgaggttaggctactgtttccattaagtttatatttcccaatgaaagtatatgaaaggtgctttaggggtgtgtggggcgggggggtcaaaaacaggacacaatgtctagaaaaaaaatcgctagtacctgactatattagaacacatttttaaaataatgtgccataaaaaattatgtcttatcttttacagtgtgccacagctcgatatcagatgtgcatctatttcaaggcaattcacaggagaaaaaaaatgacatctacatatagtgaaattacaatattgcaattaacttgttatcaacaaatatgactatgaggagattccctgtgctcttgtacatttaactc

SEQ ID NO: 587311 - DNA, 4001 bp, Homo sapiens
gaggctgaggcaggagaatcgcttgaacctgggcggcagaggttgcggtgagccaagatcgcgccattgcactccagcctgggcaacaagagtgaaactctgtctcaaaacaacaacaaccaccaccaatatttgctgagcaaccatggtagacaaagctgtacacagatccaaatagatggcaaagggaagaaaacccttgacagacactaagcaaacgtcagagtgtgtatcaaactgaagaggaagggccaaggagcaaaatgaccaacaacatttttagcaagccataatgacatggtctttctttagaaattgccattgcataacttcccagaatattttcagacacaaagtaaaagtagaaatcagtacttacctctaaaacaggctataatatgcacaaaagttatatgcaataaaacagccttcttattgttggtggtaagtgggcataaatgtagctggcacacttttacagaaagaggcagagttctcaagttcatctccttgagacttcattcctttcctgcattaaacaatggcagcatcctgtagagtgagccaaatcttcccaaggcttcattatgactaaagaagcccaacttgagggtgcaaatgtttgggtttggtggtaagcagagtccgatattgccacttccttttctgggtctgccatgaacccggtgttacaagagcaaatcacttcaacttctcactgagtttttatctgtgccacaggtgctgtttagaggtattccaatagaaggagcagtatactgaagaaatcagttaactctggcaaagaacaggtgttcaaggtgcaacaggaacaccaagaatcattactgactcaaagtctcttgtgtgtgccaaaagtcagtgataggaaatttaataattaattcctctaccttttttttttttaagacttcaactgccgaacatccagctaaagctttccacagctgaggagcaaggtagaccacaacgtactagaatatccttttctgaagatttacgtgcaagttaaaatgtgtaatttaatatacaaacatacagcagaaaacttcatggttagtgttggagtcagcaaggctggcctagaaaaagctggaccaggagcaaaatttacaggggtgcgaaaacactcagtaatcaagacaaataatattttaatgcaatatttttaaaattcaaaattaatattaaaaaatccacgatgaacaaatcatcacattataaaaaataattttaaataaagatgtgctgcacataacaacataagagctagaggcaaatgaaaaaaatcaataccaatcttgtctttatttaaaattttgatattttcttcatcatttcttttttggcattggttctgagtcctttaggtattgcattaaagtattgttcatcttgattactgagatttttggcggccccttacattttgccatcagtgccagtgtctagctcaactcaccctagtcagtgccctaagagtcagtaccagttcctagaaaagactgcaggagcaaacctggccacctggggacctcagtggtgtgggccgattgtccccaagggaaaggctagaggcagatgggctcccgcctgtgggccagaccccagcctacctcgcttattctgcgtgccgtgcttcttggccagggcgatttctctctggattcgattttccaggtactcttgtttcttgcccagcatctcctcagtctcccgaagtcggaccagggcctcctggggactgggagcggctcggctcttagaagagccgccccctttaaagaacttgcccaacttgctcattgctgtggagttcggagggccagcgatcccgggggcctctcgggagctccccggggccgcgccgaggggacaggtgagcaaggcagtcctctcggggacccagaccggaaaggcggccctcctgggaatcaacaagtcgtcctggacaggtgacacacactccagggcatttcctggctgccagttcggccccgccccgctgcacagcggctgggcggggaggccaccgctgggacgtcggctggccggcgccacccggccctctgggagttgagcgagagcagagaaaagttgaaaagaccgacaaagactgtgggaagttggcttttatccacactagggacggtcccaggaacgaggaactagtttgtgaatggctcaaagaaaagcaaaccgatgtccaggggtcttgtgcaggacctgaaagtgtaagtgcgcaagactggatatgcaaaatgctttattccatgcgtgtcttttgtgtgtacgtgagcatagtgttcctgtattcaggcctctgttcttgtgaataagaatattcagatcttttcctctaagtgtatgtcatgtaggtatgagtgtgtggacacaaaggcttccaggatatttgtctgccactaggatgcaggtgtgtgggcaagctcggagcagctgctgctactgggcttgtttctgcatttggtagtccgggcaggttgatgtgtgcctggatgctagttggcacagtgtagattctagatcatccttacaggacttgaagtgggtgaaagatggtggccatctcttttcctaatgtcaggacttctggagtgtgttggtggttggattcaactctataactaggaatccgaagttttctgaatgatcctcagtgtatcaaaaaccttaaatggggctgccctggtgtttggctgtatgtcaaatgctattacatagatacttaagtaacaaaaagtagagaatatcctggagaagagaaacattcttttgttcatgctcactatctcagcccatctattagatctgctggcaaataatttagtaagatgaaaggacagccatatgtaatgcttatagatgatgcaatactgctgcaaacctgtgtcaagcacactacaaagaagtggaattatctgtgttttactcttcaacgattgccatgtgctctgcataatatagccgtatttgagcaacgttacccaacattaccaaaacctatttttgattgttagccagccactgtttaagagaaaaaaaaaaaaaaaaaacacccattactctgacaaattcaccttgatacccaagatcaataacacaattttgtctgcaagcatacaaacacaaagcagcaagttaatctatttatccaacattggcatagatagcataaaattttgccaaagaaattgaacacttccataggaggcttacagtaagcatcttctaacacacaaatatgtgaacttatcatttcacagtaactgcagccagccacctcctatcatttcctggctggccatgtaaagcatgtatggtctataacacacattttgctctaatttcatgtataagttgtcgtaagtattgtttttctttattatctaaatatttcatgaataagttttggagtgtattttcttgattagatttttaaggcccttgagagttgagaagtagcacatattctgctattgttcccgttgcttttcagtttaactagcctttattgagtgtaaggtacagggaatgcaagtatagtctgccctctaagagcttaccttccagtgacagtaataacagctaccatcttttgagcactgactatgtgtcaggcttatcaataaatatatgcttatcactaatccttacataaaccctgcaaaataggtattgctgtttctgttagacagaagaagaacccaaggctcagttgataacttaaccaaatttaacaggcagcaaaagtgaaagagatctttctgtttgaaaacgcatggtcttttcactatttacatgatggtatttccctctgtgcaacttggactagaggaaaaactcattaagtatttgtttaattaaatagcatggggtgaagaggtaattattaggcattatctttaagggatcctccaagcattattgaattcatggaggagtgcatttaaataagaact

SEQ ID NO: 587312 - DNA, 4001 bp, Homo sapiens
tatgaggcaaggattaccctaacgccaaaaccacacaaagacattacaagaaagaaaaaacacaaaacaatatatcttgtgaatatagatgcaaaaatcatcaatagaatgttagcaaattgaaacccacaatgtatcaaaagaattgtacaccaggttaaagcggaatttattacagctaggcaaggctagttcaatgttcaaaaatcaattaatataatccaccaacagactaaagaaaaatcatatgatcatattgctagatgcagaaaaagcatttgacaaaatccaacaccagctcatgataaaaagtctcggcactctaggaatagagggacacatcctccacttgataaagaacataaacaggaaccttacagccaacataagaattaatggtgaaaacctagatcgttttccagtggaatcaggaataacacaagaatgtctgctcacaccattcctagtcaacactgtacgggaaatcctagctaacacagttagccaagaaaaagaaataaaagttgtacagactgaagaggaagaaataaaatggtctgtctttatagaagacataattatccatgcagaaaattatgaaagaattgccaaatcgatgtcctggaactaagaggcaatgagaacaagattgcagatacaaagttaatgtataaaagtcaattcccatatacctataatgatcaagtggaatatgaaattaaaaatgcaataccatttacattagcacccccctataaaacttaggtataaatctaacacggtatgtacaaattctacataaggaaaactacaaaattctgatgaaagaaatctatgaaggactaaataaatacagaggcattttatattcatggacaggaaaactcaatattatcaagatatcaattcttcccaaattgatctgtagatccagtgaaatcccagtgaaaatcatggctagttattttgtggatatcaacaaactaattctaaagtttatgtggaaaggcaaaagacccagaagagccaacacaatattgaacaaataagtcagaggacggatacaacccaacttcaagaattactataaatcaacagtaatcaagatagtgtggtattagttaaagaataaacaaatagataaatggaacagaataggaatcccagaaataggcacatgtaaatacagtcaactgacctttcgaaaaaagaaaggcaatacaatggttcaaagagtcttttcaacaatgagcactggaacaactgtacacctacatgcaaaaacaaaaacaaatccaggtacagatcttacaccattcacaaaagccagctcaaatggatcatggacttaaatgtaaaaacacaaaacaataaaactcctagaagacaaaacatctagatgaccttgggcatcatgattactttttagatacaacacaaaaagcataatccatgaaagaaataattgataaattagacgtaattattattattattattatttgctttctgaaagacactgtgaagagaatgtgaagataagccacagactggtagaaactatttgcaaaagacatctctgataaaggactgttatccaaaacacacgaggaactcttaagactcaaaaaaaaaagaaaaagaataacccagttaaaacatggataaaagatctgagcagacctctcaccaaagaagatctaccaacggcaaataagtatatgataatatgcccaacatcatatgtcattggggaacagcaaattagacaagaatagcatactactacacacctattagaatggtgaaaatccaaaatactgaccacaccaaatgctggtgaggatgcagagcaacaggaactctcattcattgctggtggaaatgcaaactggtacagctaccgtaaggttggccaagagaaaagacgagtatactcaaagtcaggcaagcaagtttattgacctgccggcctgctgcataacagtcagaggaggcagcccagggtgtttaaggtgagggacttatatagggctttgagggcctaggggctttctgaggttagtctacatcctgcagttgtttgtcacttcttgccccacctggcttagagtaccaggatgtggtttggcctgggggtggatacagctgtacctaagttctggtaacgtgaagtaggggcagcatctcagaagaaataagctgcagggcatttaggggagggggcttgctgcgttcttctgtggacaggttgtctctaagagctactttggaagacagtttggtcgtttttcacaaaattaaacattctcttcccatgcaagtttacttatagtttaactttgaaacaaagtataacagtcctttcccaaaacaaaactccttactgcctgtggactagactgcctagactgccacaagattagaagttatggtaattttactaaatcaagatgtagctattttcattaaaccagtatcaatgtcttatttattaatggttacacgagcagagatcattctgtcttgggctgggtttatagcctgtgccaaattttgacacctaatagtatttggcagggttaagtatgaaattgcttgattaataaacgcaaataaaaatgtatgctggcaattcctaagacatttctaatattactttaccaataattttaaagatagcttatttattaaagattttacttaagtcacataacttgaaaaagcatttgactagtctttcctttttctaataaagtatttgatgtaaatgcttttattttttaagacaattaattagagctctttgatatattttcaggagtgcaacattgtatacataacatataaatacatagatgtattaggcatgctgatagaagaagtacatcttacagattcataaaaaccttttttctttatcttagactttcagattcttgataacctgtttcacagtgctaggcagtagtcagctaaatagtcttaaatttgcatattaaaggaaacaactcaggtgaaagtcagatagcaaaatttacattataaggtctgaagagaaattctgtgagctagagggaaattaaaacagatttaattgccaattgaacataaaattatagaaatttatcactggattgtataaggagaccactgttatttagatagggactaccaattcttttttaactggatctctgagctctgggcagagcccacactgaatcctgggtctccaaaaagggagaattattatgaggctagaccacatgatgcttttacagtgcacttaaaacatttttgtaaacaaagcatttctaagtgtctaaactatactctttcttaaaaacccaagagtagcctctgttgcaataactattttagtaaaaaaaaaaaaaaaaatcgagtggaaacagaattgagtcaattgagaacaaaaaaagtttttgctcaaaaaaagacaaggtcctagcagagaaaaacaaaaacaaaaccatgaaggccttttaaatatgaacatgcacttatgcacacatacacatacacatacattttaaatattagcttttaattaagttgacttttaactattgagtgtctttaaaaataaaaaatcttgggctgggtgcagtggctcatgcctgtaatcccaggactttgggaggcccaggcgggcggatcatgaggtcaggagatggagaccatcctggctaacatggtgaaaccccgtctccactaaaaatacaaaaattagccgagtgtggtggcacgcgcctgtagtcccagctactcaggaggctgaggcaggagaatcgcttgaacccgggaggcagagtttgcagtgagccaagatcgtgccactgcactccagcctggcgacagagcaagactctgtctcaaaaaaaaaaaattcaaaattttattattatatttcagctaggacaaattgctgctatttcagaagtaccaagtattggtccggcgcggtggctcacacctgt

SEQ ID NO: 587313 - DNA, 4001 bp, Homo sapiens
tctattctaggaactgacatacaaccctcagacctaatgaaacaaccggaactgatcttctccctcctgcatcccagttcttatagcagggccaagtcttcatttttacagaggctgaactgagcctctttctcaaggttttgactttaatgcatctagttcagttaataagggatgagaaagacgggcgtgatggttcacgcctgtaatcccagcactttgggaggctgaggcagacggatcacctgaggtcaggagttcaagaccaacttgggcaacatggtgaaaccctgtctctaccaaaaaatacaaaaattagccgagtgtgatggcaggcacctgtaatcccagctactcaggaggctgaggcaggagaatcatctgaacccgcgaggcagaggttgcagtgagcaagacagtgccaccgcactccagcctgggaaactccatctcaaaaaataaaataacgggtcagaagtgcctgcataaatcctcattccttaataccaatagaatgaaattgtataggaaaatacaaatgtccccagatgaaatgctgaatatgcaattatttccctgggctctaggaaaacatggctctgacataaagcgggcaagaaacctgtaatttcccacttcccttagttctagtccaacactgcagggacatcatatacttaactacaagtagggactggaaaatagaatccaagacaagctaaagcatttaactgtgtagctgaaacatggcccagtgtcagaacaggaaaacatctggcctaacactatcgagacgcaatttttttaaaaaaagacaaaattatctattttgcacccaggaggatgctaagcaggctgtaaaacttaagttccccggacttccttaaattctggttggggaatgtgctgcctcttagacgaggggccccagctgtggcgggcgggagggctcgaaagcctcggaccgctggagctggcaccgcacgcgcgggaaaagagcctcgagtcgcgggtgaagcgcccggctgcccctcccacgggacactggaggagttagggccctcaaagcacgaagcagtccagtgacaagaaaaaggcaggccgggagtagggagtcgcgggtgaaagagcccccaaagaacccaaatgagaagagcgccactaggcgccgacgcccacgggtagggccggaaactgagcgccgcacgcgagggaggacgtgagcgcacaggtgggagggacgaaaggcgcgcagaggaacgcgggagcttacgggtttgccgaatggaagcgcgagagaaacggcgggaggacagtggggtgggcggggcgaaggtgcgcacggaaggaaggggcgggcggagcgaaggaaggcgacaaagggcgggagaggcgcgcggtaggcgaggcgaagaaactggagaacgtgagggagcggcgaggggtgggcggggcgaagacgcgcgagaaagtgtgggggcgcgcgggcaccgaagcgcgcgccggcgtgggacggggacagcggggcgcgcgcgagcccggcaagagcagccggcggcgcgcgggcctaaggggactgggcagtgcccagagcccggcggggcggggcgcgaggggtaagggcggcccacacccccgccctgccccctcaccgtggccttggccgtgagcaccaacgcctcctggttgatgctggacacctcgggggagctcttcatgatgacccggatgcgggatagaggcagcgagatgagccgctgctccccgcccttgtctttacccacgaccacgtccgccatcttcccgcccgtcgcgcgggtgcccgcagccggcgggcccgaccgcgaagtggctgccctgcccggccagctggtgggtacggggagccgcgcccgctgccccgtgggagttgtagtgtggggaggcgaggccgcgaggccgggagcggcccgtccgggaaactacgagctccgtgaggcctcgcgcccccgatctgcgcatgcgccgacgctcggacaccgcccccgagtgcgaggcccggcgcggaaccggcagccgagagcctggcgggggcggggcgcaccgcgccgctcccgggagtctccgggctgcggtcgcggaatacgactttgatccgcgggtgagggctctgtgaatgggcaagcaaagccctctgactccgggcctcgtggctgggtgctgtgtgttaagcgcctgcgctgtactaggaccgggcgtgccgccgtcggcaaaaagtgacgctttcttgaagcacaaagtccaggggggacgaccaagcggacagcggatgcgtcctgcgccggtagccaggcgaccggtggaagagcagagtccagcgcgggcgatgcggcggggccaggcttgctgcgccgcggggtgattgggagaagagccttcctgcggggtggaggacgaagagctgccctgaggaggtcccggagtctggtgggaacggcctcttcgggactgctccgagagacggtgtgcagagcctggcgtgctcgccgaggtctgacaggcagcccggggctaggtcctgttggatttttttttctaaggaaaatgggaagtggtggtagggtttgagcagtggagtcccgggcagttttaaaaggatccctgcagctgccggctgggagggcgtgggtgcgcgtaaggccggaatcacagagaccaggtagaagatgattacgagaacccaggaacgtggccctcaggaggccggcagtaccaaggggacagcagctgggaggagagaggcaggagatggtcaggggccagaccagggaaggccgcggagaccgcagaattcgctctgaatgagtggggaggcccttggaagagtaaggggtccaacttaacttttttttttttttttttttttgacacagagtctcgctctgtcgccaggctggagtgcagtgcgatctcggctcactgcaacctccaacaccccgattcaagcaattctcctgcctcagcctcctgagtagctgggattataggcacgcgccacccagctaattttttgtatttttagtagagacgggttttcaccatgttggccaggatggtctcgatctcctgacctcgtgatccgcccgcctcggcctaccagagtgctgcgattacaggcgtaagccaccgcgcctggccaccaacttaacttctgccaggatcatgggaagtggtagggtttggggtctgatttcaagagggagctgctgtggagtatcagcacagcttactgagatatcagaaaggccttggtaaagagccctttactgagacagggagcacattttggcagaggtttgaattggagcgtgttaagtgtagtgtcttcttcaccactgtgacgtgaggtcctggcgcaaataattgagcacagaaatacatgtcaggcattgctaggcacaagggtacagccagtgagcagggctgccatggtccctgccctcttagagctgaccttcaggtctgagggagactgaaaaataagtaagaatacctccagccgggcgctttggctcacgcctgtaatcccagcactttgggaggccaaggtgggtggatcacctgaggtcaagagttcgagaccagcccaaccaatatagtcaaaccccatctctactgaaattattaaaattagctgggcgtggtggtgggcacctgtaatgccagctactcgggaggctgaggcaggagaatcgctggaacccaggaggcagaggttacagtgatccgggatcgcgccactgcactccagcagcctgggcgacagagggagactccatctcaaaaaaaaaaaaaaaaaaaaaatacacctccaatgctgaaagctacgaaggaaacaaaaccatgtgcgagtgatagggcagcccctctgggaagtgacatttgtgcccagatctgaagaaagaaaaggagccactcatacagaaagactgagacaagatgagctttcgggacaagtcagg

SEQ ID NO: 587314 - DNA, 4001 bp, Homo sapiens
ttctagcaggttcctctagtgcagattcactttctcatccagccaaccaatatcatagttgcaaattccaaagctatcatctgtttcaccttttaaccaagtgcattttttaaaaaggagatttttttttctccattagtgagaataggaatccaagcatgctaacattgcatcatttagagatccaaggagagccacccgggaacccccagaagaatgtgcaaataagatgcagtgactctagaggatgtattcccagcaagatgcctcaaacctgcatcccctgtgataagcccactatatcatttcatttaatttgtcactggaaaccaaaggaggaattgttccaggtgattgacagtaattagagggaacttccacctctggttaggaagatgtcaaaaaaaaaagagctgcacactttgaccctctaagtggctggattggcagatttggggaaggggagagagtgggatgaggtccctaattgtaaagtgggtctgggtgaatggggtacacagagaagcctatgtaaaagagattgcatacgtaaagtgctcggacatcagtgtccccactgggcttgtgtcgctgctcacgtacaccagttccaggccacccccaccccacccccacactcactgcagcatctctagcctgcctgaatcctggttccgtggaggtcaaggtgatttgagctcacttccctgtccatggttctactaattctgttttcaacttctcacccaccagtccacattctcctctttttactaacatttccttctcccaaaaggctgcttccatcccacctggttcctttctgctgtccagaacctccccaagcatacaggtctcagctttttcacaactggcaacattacactcccaaagaagcccctccattagagaaaccagtatgatttcttcttccaaataaatgcactcaaggtgcttaggggctagagagtgtaattctagcttttatatctgttttgctcaatcacagaagtttaacactcaaggttgggtgggatcttgaaggtcatctgaacaaccacaccagctgatggaggaatccacttcacaaatgccagccttggaacaagcccagctgtaaagaacttgaagaaccttggaaggtatttaccttctaagtcagtaaatagcattgctgtcttttagcccttttaaaggacatagacaatttacagaatgagtaaataaatgaacaaaagaatggacagcagtagtaaagacataggagcagatacagtgtaacaaagccactattcctgagactgggctagccatcctagccaggaggtgttcatcgtcacctggctgtggacagctccagcagggacaaccaggagactaaaatatttctaggagcaggtgacatccagcattcagacataaccccctcctgagtacccagaaactgctagtatttctttgaccccatatccacaagctctccacatgcatgccgccctcaacataagccttgggtacctttcttacctgtggttacagaagaaaacaggtcattgaaaggatgcagagaaccagcctggcttggagattctgggcagctgacaaaagtcaccccagaaatagagtggcaggtacagaatagagctcagtcacttcatttcatggtcaaacagaggctgaagagtgagggtttaggagacaccccgtcgagcagaagacttacatgagaggcatttggcttcccggggacagctgggcaagctctgcagagaggtgggttttcctggggctgtccagctctggcagccagaacggcttcatgcaggtgccactgaggacagcccaggcagcccagcacaagcgattctgcaggtgaaacccaagcctggccccaggaggggatgagggctcagcacacaagcacacaggctcacgctgttctctctctctctcacacacacacacacatacacacacacacacacacacacagcctctctggaggggaaggaggaggagcctgtgactctccagcctatgtccggtggggacagatgcagctctgtccagtcaccacgatgctcccttccctgctctctggacccctgggctccaggatcactgcctggggcccctgagtgcacccacaggttctgggtcctgggtcctgggtctgtctgtcaatacagcttcactgtatgtgaatccacttcacaaattccagccttggaacaagcccagctgtaaagaacttgaagaaccttggaatgtatttaccttctaagtcagtaaatagcatcggaaaaattggagtaaggacagagctgccagccagcccacggttctctccttgccctcctcccctgtgagacccctccccccaccaccctagaggaccaccggtcacttgcgcggccacccggtgtggctgcttctctgtcaccccgtcagcctccttgcaggtgaccttgcctttgattttccggtgaagcctccttttctctagtatcagatgagtactcctgtctcctcctgtgcatggcgaatcctggcccactgtgatcttgacatcaccccatctattaacagcctgggctttctcagatcctccctctctgccccactcgttccttcccttcagcccctaaagaagctcatcctccaccctaaaaacactctgctttcggcctttccctcaagctacttgctagctcatctcccttattttgttaaaagcaaaggccctggacatgacccggccacagactgctgaggctgaatttctagctctgctcttgaacagctgcataatcctggacaggcctcttcagcttcctatgcctcagtttcctcagatgtaaaaagaggatgtgaacaatggctcctgcctcataggtttactatgaggagtcaattagcacaaataaacacaaacacacacgtgcattgtgtgtacacatgtgcatgcgattgctagaatcatcttttgagagaattaaaagacataaaataccaaaaaaccataaacactcatatttccactattcataattaataaatgttaatattttaccatatttacatatatataaagttagatgtatacatttttcatttggagactgaaggaaggaaggaagggaaggagggaagaaataagaaaaaagaaaagaaaggaaaggaaaggaaagaaaagaaaagaaaatcacagcttgtatccatcaggattcttggttgcaagcaataaaaacctaccaattactttaagtggagaatggttttattgaggaacaacgggtggttcacagaagcacctagaaatctggaggggctgcttggagagcagggagaagagggaagcctctgccccgcggccagcatggtgggtcctgctgctacagagctgcatgtgaacctggcaccgtcatgggtgccgctgtcaccgctgtccctggaagcagccatccctgctgctgccaccgctgccacagttaattctcctccagccctgctcctttgtgtcactagctctgcatacaaaggtcgaaacagatgcatctgattaaagcatgtgctcccaaaccagatgccaggaaggccaaggaagcaggaatctggggttttgagcttctatgtggaaggtgggctctgcccacttcaagaggggggacattcctgaaatatttgaaagttgtttcaatgctggaaagcacccccctccccgccacacgaaatctagctctttggctcctaacatcagtgcacactcgactttccatcatcacactttgaaaaaaaatgtttacatctaattgtcctaaaattttcacccagaatttgttttaatcaggtttggtaagacatgcagacacagaagtgactgtcataaaggaaggagtttatactcacagatccctagaaacaggaggggtggcacattcccgcagggccacacagagcagcaccagggagtgtcaggaggtggagggcacaatgtggga

SEQ ID NO: 587315 - DNA, 4001 bp, Homo sapiens
ggcttaatacctaggtgatgggttgatctgtgcacaccatggcacacgtttacctatgtaacaaagctgcacatcctgcccatgtaccccagacttaaaataaaacaaaaatcaactttgaaattcagttattgtggagatttctgagaatgcaagatttttaaggcaaatttatttgaaacttcctttttgttgttgagatggagtctcgctctgttgcccaggcatggtcatgcagtggcatgatctcggctcactgcaagctccgcctcccaggttcatgccattctcctgcctcagcctccctagtagctgggactacaggtgactgccaccacgcccagctaattttttatatttttagtagagacggggtttcaccgtgttagccaggatggtctccatctcctgaccttgtgatccgcctgcctctgcctcccaaagtgctgggattacaggcatgagccaccgcgccctgccacttgaaacatttttaaaagttgaaattggttcttaaataatagcactttcagtcactaaattctagacaataactttatgcatatctctttgtatttttccaagaaaaccttaaatgtggggttacttttcctcatttgacataattcatttcattactacctcctctacaatttcctcacagaatttaaatttgatatctaacataggactccacaaatttctcaaagggatttacacattgaaagaaaaaaaatggaaagggattgaaaagctcatcaggcaacataaatggaaagatctctgttaaattactaaatggaaagagttgcctgacgaataccttaggaaacactgagacactagagttttagcaggaaggacaaatttaaggtaaaacatcattcttgccatcataattaatcatgatgaacatatttctccatgacagacaataaataatcctcctcattacccattttcttcctctttaagacattttatagcagataaaccctccatcagccttgaaaagcaagtcccctgcaaacctaacagcatagaaatgtgattttgttcagcagaacagcagtggtccgtttctaagttgtaacttttaaaatgaatgatcttactcatgggatagtttcagcataatcacgtgatgtttccccaaacaaacatgattacctacaaaatggaagggttcattgactgagtaatagtatcagctaacaaataaattaccactttgaaaaaatattaaacataactacaaataaataagctcaatacagccacaggggagatgaatagaaaactgtatcattctccttattatattttaattgggtttgcactatgtttcctggtcctctcctccccaccctacccctcagatttcatcttttgtattacacctaacaaataaaaaccaaatagattaattagcagttgtaacagtggtggctcctatgcagaccatagaaacttttattaatatatcttctcaagcacaactagaaaagagagtaaacacatgtagctaaaaagggaatagaagataaagcagaaatgaaacctacctttaaagaaaggtgtgaacacacacagccagagacacaagcccccatgaaggaatccctgccccttgctggtcagcatggttaaaacacacttggattcctttttcctaggcaaaggattgtggaaaacaaagagctatcagtcagccacatgcatccaaccttgacatcatcagaagcccactgcaatccgtgtgtgtcttctcagaaatcaaaacatccccgggacttcacacggttattaccaggatcagagactgaggcagacatgaagggcgaataaaaaagattcgatctgatgtcagatgagtcatcacatttcctgacagcctagatgtctcttcatgcaagaaaggggaagaaaagcagaaaagaaatgctggggcagacaggaccccgggaggatgaacacctgtgagtggctgagatctttctgtggtgcaatctcaaccgtaatcttaggggaattcactgagctccaactacaggtaaagctcatgctaggtcccaacaagtttgttctgactcatggagttctccagttaatcaaggctcaaccttgttagaaaactttctaaaatatgaatcctcatttctgtcttaatgagtgcagcttggagagaacagaaatttgtttttgttttgcttttttctgactccagggtttccagtgccttctcttttttgagttcagtgatgatccatgactagagactagatgtcagagaatgagaggaatggataccacctggatattttcacatttatttaaatattcttattgcaaagcatggtggatcatgcattaatcccagcactttgggaggacaaggcagaggatctcttaaggccaggagtttgagaccagcctgggcaacatagtgaaacctcatctctacaaaaaatagaaaattagctgggcgtggtgggcatgcctgtggccccagctacttgggaggctaaggtgagaggatcacttgagcccggtagatcaaagctgcagtgagctgagatcacaccacagcactccagcctggaagacagagcaagaccctgtctcaaaaataaataaatgggctaggcgaagtggctcatgcctgtaatcccagcactttgggaggccgaggcaggcagatcacgaggtcaggagctcgagaccatcctggctaacacagtgaaaccccatctctactaaaaatacacaaattatccaggcatggtggtgcacacctgtagtcccagctacccaggaggctgaggcaggagaatcacttgaacgcgagagacagaggctgcagtgagctcagatgtcatcactgcactccagcctgggtggcagagtgagaccctgtctcaaaaataaataaataaataaataaatatccctgttaaactggttttcttataattttcctcttttctgtataagtttaatgtcagtgggtttctttttttttttttttttttgagacgaagtctcgctctgtcgcccaggctggagttcactggcatgacctctgctcactacaagctccgcctcccgggttcacgccattctcctgcctcagcctctcgagtacctgggactacaggcgcccaccaccacgccctactgattttttgtatttttagtagagatggggtttcacccagttagccaggatggcctagatctcctgacctcgtgatctgcctgcctcagcctcccaaagtgctgagattacaggcgtgagccaccgcacccggccatgtcagggggtttctaattaattgggcctctgaccagatatcagtgttggttaaacaggagttagaactcaagaaagaccaggcgtggtggctcacgcctataatcccaacactttgggaggccaaggcgggcagatcccttgagctcagttcaagaccagcctgagcaacatggtgaaaccctgtctctacaaaaattacacaaaacaattagctgggcatggtggcatgcacttgtagttccacctacttgagaggctgaggtaggaggatcacctgagctcaggagttcgaggctacagacagccttgatcgtgtcactgtactccagactgggtgacagagacccattctcaaaaaaaaaaaaaaaaaaaaagccactctagaggaggagtcctttggaatacgccaaaagtcagcgcttgctccattctaggagtaggtgaactgcgtccccgtataccaagggtgcagagcaggaggatggggggcttcatgtctggaggttgcagaagagctctgcagaggcgaggaatgcaggagagagaatatggactctggagtcagacaaacccagagctggactctggtcctgagactcgcctgggggacactgggcaactcactgaagctacctcagcctgtcctcatcagaaaaatgtgattaaatttagtaatcattgaatc

SEQ ID NO: 587316 - DNA, 4001 bp, Homo sapiens
aaccattcctaggatacagtagatgctcaataagtatttattgaatgaataaacacattgtgtcttatcatatcatcatgttgtaagagagatgggaagataaataagatacacctcctgctttttgagagcagatagcacacacaaaatatgaaatagcaatatgagagacaacccatggccacacccaaggctcctttttaccaaagccagaaatataaaaatgaaggggttgcctcttgtaatttgaaaaaagtagttttgcataacaaaaagaaactattttgtttacaatgaatagtaaagttaaaaaatgtaaggaaatatgggacagatttaaaaatatgagcagatgctgatggatctagaaatacagatgtaagatttatcacaggttattagatttattatagatctgtgaaagattacacaatcttcccaaactcttccagcccacacaatggagaccaatgccagaggccaagcaattccagttttcttatgtaatcatgattgtacacagaggacgagacttagctgaaccaagagagtttatgctaaacaccctcgctaaccattgagagaaatcattccttgggaaaagagtggtaagaatcaattgtcttataataaatagaataataaagacagaaaaacatcagacacacgtacattaatggtaagctcaaacacacagaattttcttatcatttttgtgattggcaaactgcattcaagactttgaaaagtccaaatttcatgatatttgaaagtgagtttgaggctttctgcatttagaaattcctgtttgactttgagtccttggtctgagaaaaggcgtttttgacaacaggataatgttcaggtgcctcgcagccttgggaacttgaaatgtagaatttatttctggatttgggcaaatctcccttagtgtctccagttctccatttgaaaattacaataatcaaacgtggcaaaaatactactgagaaattaatacaaattgctagtgaactgacacttttctcaccatctggctgcggtttcagatggtttctgattcaatgggggaaaactttctgttctcaagttacacaaaaagtgaaaagattcccaaacccaggaaattggcaggtgcaaatgaccaatccccaaagcctttcagtactttattcccctttctttttctctttttgttctttctctgcatctctgtctctatctttcactttttccttttatttgtcctttatccttatcaaaaattcctctattttcagttgataatagtcacataaaacacatagagttttgatacattggtgtttaattgtgatatataaacatgctaaatctacctacatacacagatttattaaaatatataggcctacagggcatattggacaaaattaaatatctacatgcagatatagaaattattggtaaatatgatagaaaaatgttgatatagtaaatttctgtgccaaatatttgaacaattctctgagtaatgctcagtgcattcaataatgtttttcctgcttttgtattttcttaccaagctcatagtgattcagaaggagaaacgcagcaaatgacaaaaacataaacattatgaaaatcatagatatgatttcttcagcaaaaaaaaccccacatctcacagaattactcatttgggccacattttaaaggttatcctaaatgtatcttgtgcattacatattgtaattctaacattatcaacaccatagttttgcctcctctgcttaaataattctgcaactgtagttttaatttactgtgacttgtgcttacctgaggaagggatgccaaggacgatgagaaccagcataaaatctgggagcatcgtgatgtcagtttcagaaagacagtttcttcctttttaacaacagagcatttccactggaaaagggggttttgaaaagaaaatacaggggttcaaaatccgaagtggaacccaagaggacagcaacacctggagtggaataaaacaatctcaacccctctcgccgagtgtgccgcttctcaaagtgcacttcattgatttgcagtcagctgtcagatcgtgtaagtctaaaacatatctctgggtcctaactcctgacttattaatttactcccttgcaagagatgcggggcactggagaaaggatgaaactagacaacttctgaatgttctgtgctatttttcttacagttggagatctgcgtacagaagaaccacactttaccacatccatagtgaaaagtttctcatccccgttatttctctattctcttttctttttctttttattcttttttttttttttttgatatggagtctcactctgtcacccaggctggagtgcaatggtgcaatctcggctcactgcaacctccgtctcccaggttcaagccattctcccacctcagcctcctgagtagctgggattataggcacctgccatcatgcccagctaatttttgtatttttgtagagacagggtttcaccatgttggccaggttggtcttgaactcctgacctcaggagatccgcccgccttggcctcccaaagtggtgggattacaggcatgaaccactgcgcccagcctctctattctcttttccagttggacctgaagtcatgagtatgtcctggagcctccctattctgctggttcccacatgtgttaatatcagcacattctctgtggctcccttgaccccaccaggcccaccttctggtcactgcaggggacagtagggtgggaggttagtggtgttttatgtatgagacttggacactaataacaccatcctttcttcttcacagttgatcagatttcatctagttcagtgctgtgcacacccagagggcccttgataaatgcatgatacatcaaatgaatggcaagtacaaagtcagggctagacagacaagagggccaggtgggagccaagacctatctggttgggaactgagtgctggaggaacccactccagggcatggaggaattctgtcttagcggcagtgatttagtccaatttttaaatttcttaatttaaccctcctctgtgtgccattagtgagtttgagacacccagagggtgctcggtaaggaggcatcatgtgtggaaaagaggtctagcccaggaccccgggaccctgagctcttgagccctgtctgttcctcagggcccctgtctcagagcccctcacatcacaatgtcgctgccctgcctggcctcccttcctagaccaccagctcctgcaggagggcttggtctccagccctctggagtctcctctgtatctctctgtgtccagggcctgacacctgcaaatgcttgagaacgttgtgggaatgcaaggaggaaggaaggagccatgcactgatttcctcctatccatctcaactgtgctcccagcctgctgagaatttgtaatggtctcaggagtaaatcagccaccgccaatccaagtgtgcaggaagtttcacctttattttcaagaaattgaataaaatgaagctagccttccatggaactggctggaaatccaatctcagtcattgcaggccctgcagccttctccctaggggagcaactgaatctggaagccttttgtggtccccaaaatatggcacagtcttgtatcctccaggctgccttgaccacagctggggtccatgccccacccacacggtcccatggagccaacagctcggttgctctttgccttctccgatgccaaggattctgccaagacccaggattctgccaataccggaggccttggtaacaggaccctgcctccctgggtcccacacaaccctggcctgctgaggactgcaccccttgagtgcaaccctgagcagggcacggtcctgctgccagaaggacctgccagccccttcctatgccttgggaagttcttttctgtctcactttacagccacctttctccctgcaaagatactcaactcttc

SEQ ID NO: 587317 - DNA, 4001 bp, Homo sapiens
atgtttaaactcccaaacgttgtactgaagacaaaagagcttttgtggctatactgaaactattgttttaaaattttatttataaataaaagatatatacatatgtgctttaatatgattaacaggttccattttgtacaaaatgttaaacctagagtcctctgcgtcctggatgaggcgtccaaagggtggaatagtacagcattaggacctttgttctcctcttggcttctggaagagaaactcttgcatgccctcgactttcaccgcaaaaataagtgagaaaaaagataaatcccatttatgcaatgatatgtagctatgagttaatcacggtatttcattccatgaaatccattaagctgctggcatttgcatggctctaagtttattttaagaggctcattcaaacatggccaggaatatattggcctcttgagagtttgcatggcaaggagttatacagcaggaaaaagaaaaaaaacccaataattatattgatgcaagattcatcagtattttagaatattgtcgtttcaacatgttaaattgtttctgagcactgctgatttcagcactgtccctggtccacgtgacgcaaatgccaccctttccatatattcttcagcaaaaatatatgaaaagcccgtcactccctaagaggaccctgatccctctggagaggaaaactaaactctttaagaagaaaaccaaacccaacctgaactaatcgtccaaggagtcctgtttggtcccacgaaaggcagatttccatccacaccagtgaggggcaagtgtccgggttccaactcgaagccaggcgggcctgtgcgggggtgagtcctttgccacccggcgccccccaggctctacaagcgtctagaggtcggagtcgcagggcagcgagctgtcgcaggggtgggtgctgcacgagggagcgtcctgggactcccacccctccccgtcgaggacgtccaccgagttggtgtaggccttgggccgcggccgcggcatggggaagccgaccttgggcttgggcttgggcttgcggtgctgggcaggcggcggtcggtgctggccgtcgctgtagtacttgatggcgggcgccaggtcgggctcgggccactccacttggatggtgctgacgctgctgcggcgaggcccggcggagggtcccttgcggcggcggcgacaacgctcgtcgcaccagggcgcgaagctgagcgccagcgagaagccgcccagcagcaggaggcagctgcccaggtagcccaggaccaggctgtagctgacctgcaccgtgaccgggctggccggggcgggcagcacgtcgcggtcccccaagaagtggttgtaccaggacaccgggatgaggccgaggaggccagcgacgaagagcacgacgcccgagagccctgccagcacgaagttgggctcgtcctgccagcagcgcacgcccagcgacgccagcagaagccccaggaccgtggcggccagcgaggtgaccatgagtgcccgcgccaccagcacgggctgggcctcgaagtagccccactggtccgtctggccgcactcgcgctcgcggctgctctgctcgcgacacatgtcccacaggccctggtacaactccacgtccactggctggttcaggaagcccttcaccagccgccagccgggcgccagggtgccggtcaggttgagcaggagcccgcagggcgccaacaccatgcccagcgtcatcaccaccggcgtccgcatcccggcccgccgcgccgacggcgcccctgcagcctgccttccttctccgctgtcgccttctccgccgtcgtcttctccctgccgtgccccaggctccggggacccgaagtcagcgcggacgccccgggctccgggtcgggctcctgagccctgatcgctccagggacgctctttgtctcctgcacggggaccgtccccacttaggctagttccctcctggcgtcccggccgctccgccctcctactggccctaatcgaaaccagcccgcgggcgggtctgaccgaaaccgcgggtccgggcgcgggcgcccaggggcggctgccgcggccaaacctggcccgggagggagggacccgaggtgagcgcaggaagcggcggggccacctcgcccgcggcaggtgagatggggatccgagcggcggggacaccccaccttgcagccgggcggctgggccacgcctggcctggactgctcacggccggagcaaaggtcgccccgcccctgggtcctcgcgccgccccgccgggccaggcgggcggtgggcggggagggaaagaggcggcgctggcgggacgcggtggctgcgcagcttccctgctgctcagcggatctcggttcctagaatttgtttccggtccctgcccgtcgaccctgcgcttatagcttagccctttactcccagagggttccagatcgccccctggtttgctctgcaacttgcagccactcgcagagaagtgggcggtgccgagcgctcccggggattggaggtgcgctgggtgagtgtgcagaagcccacccagtccaggagcgtgtcccagaacgttgcaccggattatttccttaataaaggctccacactctggattaaattcgtctctaaagaatctgtgccagtgtacttctgggcagaagggttacacaaggattttactttcctttttcagccttgtgagactttcaaggggactagaaagagggaccagtgttcccggatgtcctgcttagcgttttttgcaggtttatttaattttacagtgtactgtggcctttctcgtctgtaggttattttacaactctataaattatagaaagcctgtagtattgcaaatgacttttgccaacatcaaggctaatgagttcgtcccagtggaatgattattgtccaatggatactgaccagtatggcattgatttgtaaattcattttagcattcctgtttgtctgtatatgtgtgtccttttgttctttgctttttttttttcctttttcttttatttatttatttatttatttatttatttatttattttaaacagggttggggagtttcgctgtgttgcccaggctggttgcaaactcctgggctcaggtgagtctcccgcctcagcctctggagtagctaggactgcaggcaagtggccagcttctttggttttaacatcatactggtttccttattcaataatgagttaaataacctctttcacacatattcattttatatttgtgtgaaagtcacgatgtttacattttttctaaaaattatcctttaataacacttttttgtattttctagatttttacaatgaaaacgtattgcctttataattgtttaaaattaaaactatttttaaaattcaagttaatttagcattggtttgaaataattttgaatattccagagtggacaacactaggaatgacagtgactgctttttttaaaagaatatttttaaattaaaaaaaaaacctgtggtaacatatatgtaacatacagttgaccgttgtaaccatctttaagtgtacagctcattggtatgacatacattcacattgttgtgataccctcaccaccatccactcctgggattttttcctcttcccaaactgacactgtacccactaaacactaactctcctttcctccctccctcacaggccctggtgatcaccattctacttttttctctctataaatttaactactttaggtacctcatagaactggaatcggaccgtatttgtcctttcgtgactggcttatttcactgagcttaatgtcctccaggttcatccatattgtagcatgtgtcagaatgtccttccttttgaaggttgaatgatattctattgtgcataaataccacattttgtttatccagtcttccatccatagacacttagattgcttttaccttttggctattgtgaataatgctgttgcatcatttatgtaa

SEQ ID NO: 587318 - DNA, 4001 bp, Homo sapiens
aatctggcaatcttctctcagcattcctgttacccactcactaagaaaatcctagttttgtgtattctcttttgaactgacattcctatcctgctgtatactgcattaatgactgaaatataacctgacaagagctatttacatgagaattatacttctaacattttgaaaattatacattgatgggttgtaaaaatgttttccaaaatcaacagaaatacatgtttaatacacaaaattcagaaaatataaacaagcataaaaatacaaaaataaaaatttacaatcctcttacacagctccaagcaccatcactattttttggtgcctgctgggtcaattgtttttctagatataaactcttctttttacataaaaggggataacagtatacaagctgctccccggcctgcttctcttctctcagcaacagctaatcctcctctgcaacacggttgcagggactccaccatttacctacccggtgtcctaccaggcttttgcccagttcctcgttatcagaagacattgtgtattgaacatctctgaggccacctagagaacctgtgctctttgtatggaaactggatgctcaggaagaacttccttaacaaccacagcctccatgacggccaatctgaaagtgaggcacagaagtgttcaagctcagtggggagctgtggccatctcatattccctcaatcactcacacttcctgcaccattgctctttcctctcacaaccttcctgaaaagttgtatgtaaataaaaatcaaaatacgggagtgaggtaagcagaagctggatagttacagatttcacacagagggtaaactgaaacaggagtcagaagcagccgcctcgcgccagtctttcagagaagagtcacttacagcagaatctacacaggctggggagcccctggctcccctccctactgtccacacccaaccccaacctagagcagctggctatagggcccagagcccaggcgggtcccacctcctgctgacctgacccagcgcccgctctctcccccgcacactttggtgaccttacccagcgtccctccccgctcctacaggttctgactgacccagcgtccctccgcctcccacaccatgttgagctgcaccttgtccccttccgccccagctaactcggtgaccagtggaggccacacccacgtgacacctgctgtccttgacagcagctccgacggcacctctgtggctctgcaggagccgcctccccgcctcgtgggcacacaggtgagctgaccgtacttgcccagccggtctgagggaagcgaggtcaggggcgacggcgccgcctccgcctccgcctgtcccctccctccgtccggcatccgcgccgctcaaggactccaaagtcagcgtcgcggtgaggagccccccacgcccaacccgcgcaggcaggaccccgggctgcggggctcgaaagtcccccacaagctgctgtccgggaaccgcacggcccggggtgccgcacgcccaccggaaggcagggctgggaccgcggacgccaggagccaccccggcccctcacccgggctccccctcacgtgggctcccgcgcgcccatctgggttccccctcagctgagttcccggcccctcacctgggatccccggtcccctcacccgggcttcccagccccctcgcctgggctccacgcgcgctcacctgggctgcccctcacctgggttcccggcccctaacccgggcaccccgcgcgctcacctgggctgcccctcacctgggttcccggccctcacccgggctccctgagcgctcacctgggctgccactcagccgggctccctgcgcttggcgccgccccgcccctgcaggactcccggcagtcactgacctcattgccgcccagtcacgactggccggcctcaaacaccgcccgcgcacgcgcgttcgcacgcgcgtgcgcacgcgttctgcccccctgggggcgtcgctacgagaggccccgcctaggcgctacgacggcggcgggcgcgggaggggcggggcggcgggcgcgggaggggcgcggcggggggcggggcgcggcgcggggggcggggcgcggcggggggcggggcgcggcggggggcggggcgcggcggggggcggggcgcggcggggggcggggcgcggcggggggcggggcgcggcggggggcggggcgcggcggggggcggggcgcggcggggggcggggcgcggcggggggcggggcgcggcggggggcggggcgcggcggggggcggggcgcggcggggggcggggcgcggcgcggcgggcgctgtggggcggcggggtggacgcgctgaaccacggccggcgggaggggcggggccgggctgaaccatggcgggcggcggcatgggggcggtggggctccgcgggcagcctggttgcgctgcacccggacggggccgaggggacctgaaagctgcggcagagcctgaccgcgccgttctccagaagagccccggccgcggctgagtcgcgctccgggtgtggacggagccggagcctccccggggctcggtgaggacacagggcccaagccccggaccttcaagtcttgaccgagcgcatccccggcccttctgcgcccacacctgagtttttgtctgtaggagtttccgcagtttgctaaggttgttattcgagttacttatgtttcttctctctaaggttgttattcgagttacttatgtttcttctgtctaatgtgttttgttccctctttagaatcgacatctagaggagtactcaccacttaattgatgatcaatacacgttccttgaaagaaccgatagcatgcgatcgatacagagcatctgcactgggattgtccgccccgcctgtcagggaggcctcgggggctaatggagctgagggtatagtcggccttggaccctcgcttttttcctttcctgtactatgaagataactgccttatctccccctcaggactgttttggggattaaataggacgtttaaattaccaacgctctttgaaataaacatttcaaaattattataaccctttagtacatgtgggaaaacgttgacattcatgttcaagtttatttttctgctggctcatttaggtttgttgaagccttgagtccctaggattgtctaagaacatgggtaaatgtgtgtggaggcctccctggaggccagagaactgccagcagccttcatgatgttaggggaacaggaacctaggagagccagggtgacatcgttttaaaatcaacaacccatcttggcgggcgcggtggctcaagcctgtaatcccagcagtttgggagaaaaaaattagccgggtgtggtggtgggcacctgtaatctcagctactcaggaggctgaagcagaattgcttgaacccaggaggcagaggttgcagtgagctgagatcacgccatggcactctagcctgggcaacaagaatgaaactctgtctcaaaaaaataaaaataaaataaaataaactccatcttaaaaccagtgaaaccaccattgcaaaattataactgagacagtgagagatctgacctaaccaactccatcctacttttaacctccaaactgtccttgttcattcctgggtgtaggccaaactaactttggaagaaacttagtttatggtttcccgaaacaaatccttttcttgtctggagactagactgcctttgtaggactaacaaattagccacaagattagaaattatggtttagaattcatgcagctggagattacaagattctgaccctccctaaattgctcctggggataacatcactattgaaaaacctaacaacagtgcttgagatattttgcagaccttgcacttgctgaattagctgggaccatccagatggataaactggctcatctgatcttgtggcccgcactcagcaaccggctcaggccaagaggacagctttgatccatacgatttca

SEQ ID NO: 587319 - DNA, 4001 bp, Homo sapiens
ggccctcgagtccccagcactaccacacagcctcattctccctaagaaggcttaaaccacttggccttgctccttctaccagaaaaggccggttctgtggacaaaggggctgctcaggggaagaggaggaggagaagatggcggggggtggggggcagggggggcggggggagcaggcagactttgggagcaactcccctccaggcacaccctcctgggaactttgaactgagcagcttcccaaaacgtttccaagcagggcagggctggaggcttaagaaaatcaatgacctggcagggcgcattgattcacacctgtcaccccagcactttgggaggccaagacaggcggattacttgagatcaggagttcgagaccagcctggccaaggtggtgaaaccatgtctctactaaaaatacaaaaattagccggatgtagcagcatgcgcctgtagtcccagctactcagaggctgaggcatgagaactgcttgaacccggatggcggaggttgcagtgagccgagatggcgctactctactccagcctgggcaacagagtgagacttggtctcaggaaaaaaaaaaaaaaagagagaaaagaaagaaagaaaatcaatgactgtgaacagggagccgtggggaggatgggaagacagtgaagagggcacacagatggtgagggtttcaatcccaaagccccggctcctatctgcttcttcaaatggagaaaactaaaccaaaaggaaaataagaaaaataatcaccggtaattcatatcacccagaggcaaaggttagcactgtggtatatttccttctgtcttccatgcagtttatacaagattcttcacattcaccatcttcaaatattctttaagggcatacttttatggctatgtaatactccacttactcacggacctaagtttattttaccattctcacaagattggccatttcagttgtgcccaatgctccactattattataacttaacattttcatgggcatctttttttatatagtatctgtactttcctttaaattcctaacctctccgtttaaaaaataataataaaaatcatattttttttaactaggtccagaaattctggaaggtcaagaggctttggctcgaatcccaattctgatacttatttgctgtttagtgttggcaccagtcctaaacctctccaggcctcagattatcatctgtaaaatgagactgtggaatcagaggtctgaggcctggtggatcttgtgtgacttttctctgatgcacctcagatgcattaggaggcagaaaaagtcggatttcggtggttgcagcatatactgaaatccgcagcctcatacttacaggcaacagtgtccagagagctagagaatttagaagaaaactagatgactcatgcatgcaagccgaaagccacaactgagagatccgcatcttcgcagaggatatgctgcaggaaggagctcggtgcaggccagctctgtcacctgctagcctgggtctcccgcaacgcggcaggtctccaggtctcagtttccccatctttgcgaaaggatgatcattatatctgttctatttacccccccaccacagaattgtggttggagctcgtgctctcaggcggcggttgcgccggggcccctggctcagctgcctggtgatggggctccggccacctcccctccctggcttcctgggctccgtcgaaagcgcaggggttgtgactgcgagctgtgtcatccctctctgcctggctgccatcccctgcccgcccatccgtcctggtgtggctctgctcaagggtagggaagacggggacatctcaccggtcagcggcaccctgtgcccgcgcgctcctcctggcgacgccgcgttgtgggcactgggaggcgccgtatttatagcgctctgctcgcgcacacaccccctttggggctggctgcaaacctgcatgactcacgcccaaagaatgccgcggaaagcaaggggagctttctggaagccgggaggtgggggccggtgcagcaccgggctgggggcgccggggggcgcatcatcaccacgaatagctgtgctggctccaggagagaccctgaggtgcggccgctcggcgcttccagtagggaagagcctgaactcgcgtgcccatctgggagcccctctcacgcggttagcccggctgtctgtcccagtccaagacacaatctcacagttccctggccctactgaccttaaccttcacattacacaagcgccacttctcttgacccatttaaatagtaaagagtcagacataatgagggtgggatggagaggggccttgtgctggagaagagagcacaggaagtattgaaacgcctactcctggaaacatcacactgatgggggtccctggactgacccgccaggcctggaggaaacagaattgtgtttaggagtgatcagagcagatatgtggagagccagaaggcctctccggggtccttgatccacagagcttaagcaatcactgtccccatctttttggaacccaaccaagcagggtgggcttcatggctgtgggacccttgcagatccacgtttggtttaatgggctactgtgacggtcttgaaattcttcatagtttttgaaccagtggacctgaatttttattttgccctgagccttcccagttaggaaatcagatctgtgtccagaggggtttgctggtctccaactgctggagttccttctgctgagagcagggagaatctcctgtcgcagccacccctccccctggcaaggaggggcaaatctaggaaccctggaggtgcagctacttcttggggaagaaagtgagctgcccattttggagccagggatgtttaagccccaggagagaagtcaaggggctgacagctggggcaatgggtggacagggcgggtacaggcagccccactgtgggtggcagactttgaaaaccatgtgaaacaaaggggcttaaaggagagctgcgtggtcaggggctgagttttccagttcaggatcaggactatggaggcacaacatggaggcccagtcccttgcttgcccaacgtccaggggccactaggaccccagtccttttcaggaggcagcctcggggaatcttcaaggcccatgactaagtgggagaacccagaccaggtccatgaaagtctgattacagtcctaggtgtgcccctagacactgggtgacctcggactaatcactttgcccttgggcctcagtttcttccatctggacgatgaggaatcgggaatggatcatctccacggctccctgcaacctaacctagagccaagccaagtattagaaggccattaacccagaagaagaaaaaaatgtcccagaagaggctacactttatttttcttaaaaaaaaaatgtctaattatcagtaacagctacattttctgtggacagtgcctgctccttatcagtgcctgctccttatcaatacctgaggttagaagaattgtttttgagctcgctccttgtaacttttctgttctgtagctccctcagcatccggaacagaaggcataaatctagttatatttttaaaaattagactttggaggtcagtcagtgagatccgccttagccagctgaattaggggaagggaagagaggaagaaaggacttgggagaaaatagcatgattcacagattcacagtcatgactgtgatcccttgggaataattacttgattattcccactactaagcaaacaaggttcagaaggtcaaactttgaggaaagaaaagtgtaaattttgaaagcgccataaatgcatcaccagatgtttcatattctaagcagatcatagacattgattggttcaggactcacacactgcttgattcctaccccatccccagcatctgcacccggtggtcatcctgcccatgtttgaatgccaccaataacagggagctcactacctgccatgcaaccat

SEQ ID NO: 587320 - DNA, 4001 bp, Homo sapiens
caaattttcttctataaaatccatttcaccacatattttactagttttcttgcttgggatccaaaagtgaatgaattttagaggcaggtggaattatgtctatataattagtggcagtaattaacttttgacacaatgcgactatttctcattctcaaagagacttaagtatgaattttcctcagaacttcttccgcaagatacatatttgtgactgtctttattttcgacaatgcctctaatggtgagcaagctggtttagatgaaacgtgctgcaatgtctttaagaggcagaataaatacacaacgacaattttaaaatcaagcttttctgtgctctggtttaaactttcttatcatgtgtgacctattattcccatttaaataatctcgtttttaattaagatgttaatttcataagaaaataacttgtcaaaaaatcccaatgctttactgttcagtaaaaatcaattaaatgaacacccagcaagacatttttattgatgacaggctcaggcacttattttctggtgcttgttagctcttataaaacagataatcctggctaaatcaaatagggactatgacttgggcttagactttcaggttcaaattaatcagacatttgaaaggtgttccaacttcccttcagctgagatagaaaatgatagcactctaaaagcagagcctggcagaatggagttacataaaatgccttttcaatttttgcattctattaccctttactattataggaaaatggtgttatcacctgattactgagaaagcacacaaaaatctcgccttccaaatctgagccagtccttgactggtgacaaacaaagcaaggccatctggtctgaatatcattactacttttgccatttgggcaagggatctatcttctttgcttcaaagagaggtttaagattggaaaatagaaatgaaataagtagacaggaagaaacattggaacaaatagttcattcgaatgagagccccctttcttaagttacaatcattaccatcatttttatttttattcttgccagagttaacctttagggtccctattttacaaaacattttagtgaaaaaagaagaaaaaacttaattctggagtttctgcattaaacacttaggaaaggaaacggacgtgtgggtgaatatgagtcatcggtcacccccaccctgcttcctggtgattctccattggaaaaccagaaacacaggttgagcttacatttctgtttttctggaatcacattatgccctaggccatgttaatttcctcaactaaacagaccctaatctgctgaaaggcagctggctaactgctggtgtctggcaagtgccccatctgtccccgtgcctggggtctctccctcctgccttcactttccctttctcgcaaacaggcgtctctctttgttttcaggggtttgttcacctgaactttccttcctatgcctgtcaacttgagctctttccctctgccctgcggacctcgggctttgtctaagtggcaagacacagttgtgtgactatagttaccgcgctggtgatggtggctatgatgacggtgatggtggagatgggggtgctgatgtgtaagggggcgcaggctgagcgggcgccgggaggaggatggaccgcggaggcggcggggagcggggtgcggtgcgggagggatggagtgcagagggattgcagatgggagctgtccacataccgaagtgctgaaacgccgcagccatggcatcgaaagagcgggggaaaggcggggaggctcggcaaatacagaggggagaaaaaaggtaacaaataccttcacacggccgcccagccttgctttgggaatgtatttctgcaggtgtcctcgctgctgaactgggtgggtgagatcccctattctggcaggttcgggctcagatttctctagaaagctgtgaatgagagctcgggctccacaaggggctgtgattttggtaggaggcgtgtgcgcccgattctctgtccttctatacggagcctagctttcccctgggtcctaaatgcctccgtaccacaaccctccctggttccgttgagacgtaccaataattatttgtaattttgttaacatctgggacaaaaagtaccagcgtcatcactccccacacaacattaaaaatagaatatttcaaacggattaatgaaagcgcaaaagcagatgtgtgtgtctgtgtgtgtgtgtgtaaatttgacaggtaagaaagtatcacaaacctatgggaattattttactaacaaatggtattaagaaaatgaactatttgaaaagactcaaatcaaagtcttttcaccaaaataaattacacatagatgtttttatcaaaaacataaaatttaaaaatataactagaagaacagaaatattttaccgatctcaggataggaaaggttttctaagcacaagaggaatagaagacataaaaaagaaaaagatcggtaagtttgagtgcataaaaacactcctgaatgtcagaatataaaaaaagtaaatacaaattaccactttaaaaaattgcagcaagtagatgtttcatacacaaagtatcacatataagagaaacactaacagccttttagaaaaaaaggaggaatgttaaatgacaaagaatttatagaagaaatggggatgcataataaacacatttttttaatatcaacctcgccagtaaatgaaaatatgcagtttaatatggcagtttgggctgaagttttaaatatgcatgtcttatattgttggaataatagtgagaaagcataacatttttaaaaatctatttcacaatgtatatccagtgtcataaatatacatggcatttagatccagtaatttcacttctcgtaccttatgctagggatatattcagatatgcaaagatttatgtgtataaatttcatttacgatcatagaaattgtcaaaaaataaaaaagcattaatttttatatagcctgtaatgtttatagctattaaaacatatttttgaaaactgtttaaggccaaaaaagaaatacttgcaaagtgttaagtgaaggaaagcaagatatcaaatacagcattcccattagttagatcactatgggtaaattttctttttgccaagataacttgattttcttacttgtatttgcttaaagttttcacatttactaaaaggttagaaaacttattaaatattttaaagtaatctttctatcatgtatttcaaagactttaaagtcatcagaattcttccaactctaacatagtattatatatttacttatttgtttagtcattctctctgatggaatgtaagtaccatgtggcagataatttgtgtgtttgttcactactgcttcccaagcacttacaagtatgcctggaacaacatagcttatacattcccagaacgagagaatccacatctggaaatgatgtagcaataagacaaccatctaaaacttagagattcaaaattgagaaatggttgcagcaagcgaaggaatttttggagatgggttgggtgtgatatatgggtggtaagttctatgctctatggctccataggggctaagatatttttgataaccactggagcagattattgcagaaatattggctgatcatctaatatcctgaggcttgcccacactttccagccctattacatatgggcagggccatgagcttactctggccatgggctatgacaattccttacttagtccccaggtgactaagtagaacacagtctcacttagccccctcttcatttcaaatttccattcccactgtgaacaaagaagaagccacagttatgggaagtcactggggctgcagagttaatttgttcttctagcattacctagcctatcctgactaattcaaactcaaacttaaaaaaaaaatggcctgcacattagatcatagaaatattaatgacagcgtcttatgtgctaaaaaaaaaaa

SEQ ID NO: 587321 - DNA, 4001 bp, Homo sapiens
atcgcttgaacccaggaggcggaggttgtggtgagctgagatcgtgccactgcactccagcctgggcaacagagcaagacttcatctcaaaaataaataaaaatgaataaataaataaataaatacttacagagaaggtgaatatgagtcactaaatccaacctaactcaacaaatacaaagtatcaaggatgtatacaatggctggattttctttttaggtatgtaaatgtgcattcctatttatgcccactgcatttaaaactcatttatatatcctttgtaattcaggttcagtcatttcataaattgaaagcattcattacacattggcttccatgagatcattgtttcagcagtgagacaatcagtgcttgctaaggaaaattattgtcttgctacagttagcaaaaagacacagttattaaggcaagcagggcacgtcctcaaagagaagttgcagacatagaaacatcaagtgcgaacctctaaaggaacactgggagctccaccgctttccattatgctctattcagttctgagatctaaattgctgctgatttttcgtcttttaatcacttcacagaagttaagtgtccttgggaggcactacagagggtagcacaaatctcatctcattgattctaaattaatttgatcttttaactcccagctaccgagtttcctgggctttttaaaaatattattttatggtgacttttattttctttttcacaaataaaacatgaatagtagaagctgtgtttcttcagcaaaattgcacttaattcttatttccactcaagtagaaatagaaaactttgaccagatgcaagattattttcactataatacaaatggaattaattttgtttaacataaggattttgtctaacactattcaagacatcagtgtaccccttcaaggagtatcaactgccacctgttataccttttaacctggagactatgagcattaattttttaaaatgtatttggagaaattaactttcacaggaagggaaaaggatggatggcttagcttcttcaaatcaatactataaatctgcccaatgaataataaaataagagttaatgctttattgaagttgaaaaggatcacaagtattacctttgttatccagatattttttaaaaatcttaactaacactggaactcatacatattgctagtcagaatgatggtgttcaaataatagatcttataaattcgatggccatgagaagtgtttacaatcttaagaaaacgttataggtttagactaattacataaaatgagaaaatactgtcaattatataaactttgaaatatctagttctatacttaattcttataagtaagactagaaaataaaaaagttaaataggaataaatttcacagtcagaatagtaggaattatctttttttccttgtcaaattgaaatgagaattctcctagagaatattaagtattaattatcccattaagcgtagtaggaccaactcttggtagggagtagaagatctgctagaaaaaggaacctgatagctggtggaacatgtggcctctctaaatctttgttttctttcatctttagaaatatttcaatgtatctgaagctctaagagttcgtaaagatcctcattttacagagaaaaaatacttaagacctagagtactgaaatgacttcaagtagaccaagcaggatttacacatctatgttctttccattcttcagcactgtcaataagattcccaatgtccctatcaaccctgaaatacccccaattttcatagctggggtaagaaccgctgaaaacaatggtaggtgaataagagcatcaaagtatttcccactcacttggtatactgtgaagtggaggaggaggcacattgttaatagctgtcatgtgagacaaaatagctgctggaagagaagacatcggcatcttgatggctcaaaggcagatagatgaccagaggctgcttgagaggcaaatgatcactctttgcctgcaggctcataaagcagaacttcaaggtcctctctgataggttgaatcctacggaatcttcttgttcatagttcttatccattgtttgtgcatttccaagagtgtcatctagaccaggaagaactatgctacattttagtccagtggaaatcataaggaggactttatgagctatagagagtagcaataatgaagaaggaaactgtagcccacaaggctgatacagcagaatcaacagcactcatgagtctaggtgaaatgaaagtattcacttccttggtcttccatagtccagagcccttttcctgcctaccaaatgtttacactgggtatcacaggccctttctgtaccagcagtaacagagatagcatatttatactgttcttcatggccacatttatagggtaaaccatcccttctaattatcatacaccaataaacccaccccagcttacatttaactatattctgctagagtgtggaacatgtttttttgttattttctgctgcttcacaataattaaggatagttacaatggctagggtttacaatcctaactaatgtatcttttgatgctgtgtattatcttccaaggcctttagaaatagggtcctggtatcataactgttagagtgatacggacaggagacagggaaacactgggtagaagagggcagttccccagtaaaggccccaccctcaagcctggagacctgcggccctagattgggacaggcattcctgtttttgcacctaaaaagttgccttttggcctgcaacacaccctatcctgtacccatataaaccctgaatcccaggctccagaagcagacgaagagatgagacaaatagatgaatggcagaatgacaggcagagaaagtgagaaaaggaggaacatctgaacactgagaggagttcagccactgtacggccaaactccaggggaagatcattttcccactccatcccccttccagctccccatccatcctgctgagagccacctccaccactcaataaaaccctgagttcttccttcaagcccatgtgtgacccagtacttctgggatgctgggcaagaattcaggatacagaaagctatcacactggccctctacccttgtgaaaaggcagagggtccattgagcttgttaacatcaagccatccatggagggtagggctacaagggcacactgcaacacaatgcccacttgggctcctgcacctgtccgtctgtgtgctccccctccccacagggtttgagcagcagcgatgaccaaccaagcaggcaaaccacagccctgtcacacattctgtgaggggaatcagggaactcccccatttcatcaggtaatatacaaaaggactgtggctgtctgatacctgaactggactagcagagtgtaaaccaaccatttctggagcaacttcatctagataacattaataactagaatagaaaacattaattatgttacaaaagtaacaaatttattttgcaacagtttctattaaattatatctgcacaataaatttactcaggttataacttttcaattgaatgtattttcctatttccagttttacaaactccaaactcaccatagactcaattttgttgttgagtctcatcactattgttttttttttttctggagaccaagtctcactctgtcacccaggctggagtgcagtggctcaattctgactcattccaacctccacctcccgggttcaagtgattctcctgcctcagcctcccgggtagctgggattacaggcaggtgccaccacgcccagctgattttgtatatttagtagagacacggtttcaccatgttagccaggctgatcttgaactcccgacctctggtgatctgcctgccttggtctcccaaagtgctaggattacaggcatgaaccaccacacccggccacatcactattcttcatcttgcattccttccacactagcca

SEQ ID NO: 587322 - DNA, 4001 bp, Homo sapiens
aaaaaaaaaaatctaatgtgatgccagtagacttcgcgattaatatccacaaattatggctgttggaatggcatgggatatacctaaggggtgctctacctgtgcctaatctaagtacttctccaatattcctgttttgaaaggaaagataactctttaagaagtttctcttcttttttcgccttctctctaatttccgtttatcctgcaggcaaagtatcttaaagggttgactcaactaatatccctcctgttttgagcagtatagcctagtgatttagctctcaggtgctgaattcagataggacttggttccaatccaggctctgccatttgctagctatgtgtaaggagcaaattgtaataggacctgtgactgttgtgaggattaaatacagtagccctagaaaagggcttagcaccttgcttggcaaatagtaattgctgttagttacaatgttctccaagagaataatatattagctattaacggtttttatgtgctcccttggaaaataatcacagtaggcaagggttaaagatggatgtagtgactttcccagagcaaaacacagcaagactagctgaaggaaagtaccagctcaatatttgtgacattgtatgagttcttaaacatatagataacttagtgtgggattatttattttgacataagaattagaaagaagtcaagggcactctctcgaagcaatactaacacagtcctcctcatctcctctctactgcaaagcagtcaacattaatcagaaaaggaaggcagattttccacggcccatgttaaatagtctcagtgttgtctatcctctaggctcatttaaacccgaaccattggactatgctcccctagtccctgaggagcactcctgcttgtacttgtcatctctcatccagctgtttcagatggcaaaataactactgctctaaaaatcttctgtagctcttttagataattctagtgagtaattcacgaaaattattctgtggatagttctaagtaaatattgctcttgtaatgatcacttaggacttaaacctgtcacagaaacacaaattcttattaataataataatagccacttgtaaagtacctaccatgtgctttatatattactgtctctagttctcataacaaagcagaaattatcatatacattttgcagaaaaatatatttagaacttgtgaaaaggcttgtttaaagttcctccaccttggcagtattaaaattttgtagtgtataattctacgttgtggagggctgtcctgtacatgataggatgttgagcagcatctgcagactttacccactggatgccagtaacatccccaccccggagctatgacaactgaaagtgtccccagatttgccaaatgtcccttgagtggtaaaatcgctctcaattgagagccaataggtttcctattgctctagagatttattgttaacatgtggtttatgaagaccaggatacttgatgttctttgttgaaactcaatcaagtaaccaatttaatatttgagaaatggtttcattttggatgatggtagaagtgaaaatcagcaatgagaagtcttacttggcttttccaaatcctagtatagtctcctaaacatttattattctttttatgaacaaatacatacagaatatataaattaatgaagataagcccgacacagtacatgtaccagatggtgccaggtaaaactactaaacaatcatatatcgtagcagtgattaaatgctattaccagataagaaatgatgaaaatcaaggcttgcataggaatgtagaggacatacctgtgctgtggtttgctgagactgattacttgggtgagagccttcttcattccgacgagaactttgttcattctcattgttctctcctataggcttcaccttgttgacttttgtcagcgatttaaacatcttctctgaggtggttctgaaaaccctctgtatttatgactgtgccttaaggtagagaaatgtactttgttttccttttctttagtagacaagccaattagctgtttaatcaggattttgttctggttaattcctacaggcaactccttagctagtcagggctttggcttaaaagcagcaaaatacttctgcttgggtgatttgcactctgtttatgaactttagggagtcaaaatgatcttgtgaataatttagaagtagaggattaaacacagcttcatagttgatttgaatggtttaaatgtgatcacacaacacattgttttctttctttttttttccttctaattacccacctacttatctttatctgtctaactttatgcaaagtaatatggaaatgattaaaaaaaatccatgagggcttatgatatgaagcaactcattcactcctcaaaatccccttctctggtcctgcaatgttaggccactatttttaagctttctttttctgttcttctggtggttgatttccacatggctaaacaaaaaaaaatctgcttattctactctgcctctgtgtgtgtgtgtgtcacttttgaccccaaacctgtgtgaggcaaagatacaagactaagatttgttaaagagaacttttttttcccctttgcccggagcccagacaaagttgatgttctatgctgttggatgagattttttagtgcaccaaagacgcatgattttttttaaaggggttctgtttttgtttttgtttttaatgagagcacttatcttctgcagtttcaaattaaaaccaaagcctttatgcaacaaggtacacacccacacccagggcagcctaagtcaacccatcaaatacttcttgccctctgtatttttgcaatctggaaatttccttgagatactagttatgtattttaagatacgtttattacagttaatacagaaaaaagcctttaagtatttatgaagaaagcattttaatttagatttcatattaccaaaatcgcagttcccttatggatttttaaaataaattagaagttttaattttagattcaaccattttatcaaaaataaacttacctaataaataacgtaattgaatacatgatttgacttatatggcctggaaacacaaagctatttatttttgttaaaaaatggtggggggtgttttggttccattattgcttcagaaataattctgaatagattatcaaatatgtatagggccattttaggaacttttcagataatcctgtaatcctgtaattgattacattttgaactttgggtataagcatagaagctaagccaaaggaagggaaggtgttaacagccagcctgtgactaattttttcccttcctaagacctgcagaggaaaaaatgacctcaccagactttcgtataaatctcatagtatttatcagtggaaagataccagggagtccctatttatgaaacttttttagcaggacatttctggtctgtctagattgcttattgtaaataagcctggaatttagcaggctggctggagaatggagagagaggtgctatgtaagctctgtaagagaatgtggaacgaagatgtccccaaaccaaactgccttctttttgtgagaaatgtttttgcagacaatgctcaaaaattacttgtaaatgcaaaaccaaaatatgccaactgcaggagaaaaatggtctgttttgtttggatgctgtgtctgacagtttggggtttttcccaaaatgaatgttttgtttattcctgatggcggcttgtagccaacgaatcattaataaagtttggtgctatgtaagatctgtgattctggctagtctgttttgacaatttaaccctttagatttgtcacaggtcagaataaatgggatggagatattattaaataattcaagcacctttaaaatgatttaaaatacctccaacaacctgatttttgacaatagagtggcattaacatgggcattaaaattataaatgactacttttattttgtctagat

SEQ ID NO: 587323 - DNA, 4001 bp, Homo sapiens
ttcctgatggattttggctggagggcagtgacaaattttacttttcatggtgaaattaatccctaaaaatatcaaccaaaagggttgaattcaagactttaaaatttccttttcctcctttatatgaagcgttttaaagatctgcttgtgggcataccatagcaacgtaattatattttcggataacttgacgaattttcttcatctcttcatccaagttgcaagcccaaacttcacaaattctttggctatgatctacagttgccgctggcatagtgagggcacaagggagtctagatgccaagcatcaaaatgttatacttgattgaagatttgtttcataaaatattttatcctttatttatgtacctgtcaaaataaaaaaacaatatgaagaccagatatatcaaatctgaatcacagaataattgatccagcaggaacctaagaagttatttattcaaagttcttgactcataaaaaaaaaaaatcaaagtttagaaagtaacttaaggtcacacagctagtctataggaaaaaaaggactacagtacagatttcctggtcctaatttcagttattttaaaatagcttttttacacatacatactaatcatattttataactttccactaattatttatctgagttcaactactctgcataaaactttataaagccatccatttccagacaaaaaatgaaaaattacttatttacatgtgacaagatcagatgttaccatggcaaagatggtgtttatttttattcctcattaataaaacaaccaaaatccgacttgataacaagatctactttaccggcgtttattctaactagactagaggggtcaaaaatgtttgtaaatgctctgagaaaaaagtaacggccatgaaaattatctgaatgttcgcagttgcagaacggaaaaagaacacaatagaacgtctaaaacttagagcatattgcatggttaccaaagatagatgtcacatttctggtctataaacagagttcctgttgattcttgggcagggaaatttcaaatccttctgcatttttcatacaaattggaaaaaaaaaaaacaagagtaaaaagagggtcttatgactgtcttctaaactctgaagagtcacaaatgtaacttccaattctccaagtagagaaactaaaggagatccaggacacccctcctttataactctcccaccccgataggcacacacacacacataagcacaaaaacacaaagacttggaaagaccctgtagtctaacattgttttcctccacctctctctctactgcagtcccagaagccccgaagagacaccaaaggccttctcattactggagaaagcatctccgtactgcagtttcccagagaaacgagaggacggcaccgaggtattcaagccatagataactctcttccctggcaaagcgccagtgcgaaggtgctgataacactgactggagctacactgactcccaagcactgccgcgtgaaacaatacgaagaggtgaggatctaggccaccgccctccactcccaatttccgtcccactgcgaagccccaggtacaaagcctttgcgtcatcactacgcgccaaccccttgacaaacccccagccccagttacccagcccccaacccgccgccaggctccttcctccgccagccgcactccagctggcgccatcgcgcaccctctcaggttcatcgtccccgccccctttctacttccctaacccgcccctccccccgtaaggctgcagcggatgcaagatctacttgtgtcgctgagctcgcgctcctcctcctcctcctcgccatagagacagcactcggcggcggtggcggtggcggtggcggtagcggcggcggcagcgggtgccccatagacacctctcgcccagcgaagggaaaggcgagcaggagctgcgccgcaccgtgctgcgccgtcgcttttcgcacgtcctgacgggggcgctagatgatgacgcgacacgcagagggggcggagagcgcccccgggggcggggcacgcaagtgacggcggcgcgggtggtggagcgctgggcggccaggctccctggctggccggtttgggcgtctgggccgtgaaggtgggacctcctgttccgggccgcaagtttccctctccagccgcccgccgttcgtagcatgtcccccagaactcggggagcgcaggcaggacaggcttagagaagacgcggtccccagcgcttgggccacggacgtcccaccccgctcctctgtcgctggagaaccgccgggccgagccactgggagaagcaggccagagccttccagggcctccggcccgtggacccgaggaggatgagctggctttttcccctgaccaagagcgcctcctcctccgcggctgggtcccccggtggcctcaccagcctccagcagcagaagcagcgcctgatcgagtccctccggaactcacactccaggtgactggtcgctgcctctccaccggaggaaaaagtagggtgggagggcgggcttgtcctaaccaccctcacagcgcctcagtctgctccccaccagctcctcatgtggtttacctcccttggttgtgggtcacacgcttgctctgccactcctgcccccttttactgttttcctccggaccctccctgcctcctgccgcaccactgctcagcgcttctaactcggatttcctcatccctcctgacacatagctgctgactgtaatctctcaatctctctcatagtctatttccagtatcccttgctgcccaggcttcgccactgatctttccctttgcccacctgattgccgcgtcagcagaattgttaaaatacaattgtgaagagtaatctccaggtttcacaaagaatggaaaatagaactgttgcaacatcaaaggaaagggaagccagagttttcatcagtgaatgcttctcgtctgagagtcacttatcacgtagtcagtcttcttgagtctctaagatttaccctgttggagcagtctctccccatctcacagcgaccagtgcatgtacatttctcacttctttcatagtcttgtccccacgctcaagaattactttatgttcatcttgattgttctgttgtcttcctgtgagtttttcattttatcatggtcagtttagaaatatttttacaattcatattatttcaacttttactgtaaattggtttgctgcagccttttacattgcaaatgtctatggtctctaatggttttcaaaaattagaactgcttctttatattttatgcattttgcaagtatatttacttaacagtttcacactattttaaataaagatgacaacattgttaagtccctaacccctttttttttttttttttttgccgggggtacggctctcctgttgcccaggctggagcgcagtggcgcgatctcggttcactgcaacctccgtctcccggattcaagcaatcatcctccctcagctccccacacccctccgagtagctgggattacaggtgcgcgccaccatgcgcggctaatattttgtatttttagtagagacggggtttcaccacattggtcaggctggtctcgaactcctgaccttagattatccacccgcttcggcctcccaaagtgctgggattacaggaataagccacctcgccgggctcctagcccttttaaaaatattattttcatacagttaaaaaatatgtatcctcagataatatcgaataattcttatttaaaatggaataatttttaattaaatagtctagttaatagaaaaatttactgcaaaatcagtttggctaaaataaggcctgatgctgactgaactttaggtgtttcttggttcgttgtctcaattgttctgtttgttcagaactttcaaaaggtgaaattttatgctgtttaacagaaaagaatggcaggctgttattggtggctttcattctggaaaattaagttcg

SEQ ID NO: 587324 - DNA, 4001 bp, Homo sapiens
gcggcaggttagggagaaatggggaggtactgctaataggtacagggtttctttttggggtgctaaaatattctaaaatggtggatttactctgctctgtgaaaacactaaaaatcattgaattgtacactttaaattggttaattgagaggtatatgaattatatctcaataaagctgttttaaaaacaagcaaacaaaactattctgaagtttaccttataatagcgaagcacttgggttcaaaggaatccaagttactcttctgaaaaaccaaatattcacatgctgttcattcattcatttattcattcactcattctaaatttaccagtgagttctctatgtgcagactggaccatgctgtcagaaacagaacaccggtccttcactgcatccagcttaaagcctgtttgctgggtttcaagagagcctctctatcacctactgcaagtattataaaaagtgccctccctgtccctcagtagaggaggggccccaaggcctttaacaggagtttcaggaaaatccattttcatttctgctctcctctccacagccaccaaagacttactcccatctttctcttgttcctgcccccactcccacccccttcagctgctgccaacagaggactctccaaaacttgcagaagtaatgggactctgagaagcaatgtttggggggaaatcctggcccatgtgagagctgcacacaagcttcatttggacacggaactttccgtaaggacaggtccaaaaccctcctggaccttagcagagcaaccctgagccacagaggacccaagaacccagcaccaagatctgagcacctgtggtcctggacctgccggcggcctccaggctctgccctaggaccgaggccactgtaatggccccatgcgccgaagcccagctgccccggatgcctatccgcccaggcgctgtgtaataggaggcctgagggggcgcggggtgcggggggtgtcagagagataaaagggggcaagtgagaggtcggcaagccaaagcggagaggattctccaatattacaacctggcggtgcctctctcaaaaccgcaacctcctggcttctggcaccaaagcaaaacgcacgaagcatcccagcctcccggcgcagagaggtggaggagcgcctactgtccccatcctccatcatcgagctctacctagctgtttccctttgcgtccagcgcctggttctcagctacccaaatctgtagcagagccaacaggtgactgggtgagtttcgtcccctatgatctccatcagcagctctctcaagctatcccaaacacaagataaataaaaacagcgtgttctttatgcacacacagcccttcaagacggatcccacccaaattaccgcctttgttaagccccttctatatggaaatgctggagccgccactgtcccgcagccaaacgcagcttcttcccgccacacgctcacgtcactcaaacactgggaaaagcttcccggagcagcacatggtatttccactatccctgcgctctcatcacccaatgcctctaatctccctacaccgtgaaccccgcgaaaaggcatccaggtgtacccgtcccatcccgtcccaaaggtccccagtccattctgggcgcgcgcgtgaaaagaaagtccatggaactgcattgcgtctgcaggtggctcgctgcctccacttttccttgctcatgaatggacttcgaagccgagccaaagaagagcagagaaagacgaactgacctgtgctgggcaaggttccagcccaggttgggagctctccgcgcctaggcaagatcgaagctccgccgctagttggtccttggcggcgcaccgcccttgctctcttccctcggagtatccttttttaattagcctctctctctttctctctccctctccttctgccgctgcgcttccacttccagccccctggagctgcctccgcctctccagctgggagcccaggatcagataagaggaaaggaaggcccgccggcagccaattatagagcggagggtggccgcggaggcgggaggtggggaggtgggaggcaggcctaagcccataacgcccccactttctctcctcctcctctcccccatccccgccctaccggagatgtggagaagccagccccgtgccgctcacgcgctcgcctaccccgaacctggcggtccccccaggtgcgcgcggcagccggatgtggcgcgccgagagcgagccaggctctttcccttccactggggcagaagctactgcaagctcccaaaccaggccccctgctctctttgggaggtctcgagccctcctgttctcaggtgctgtgtgcccacttccccatttccaaaagacagactttgccttcccgcgtcaaagaccctgagctccgagtgaaacaggtatccactataaaggcccccttcgagcctcctcttctccctcttcctcttgtgaacaagtccaagggctctaaaacgccaaagcagcgatgctcaaactttaaggtgcaggggaatcagctggaggtatcgaaatggacatttctgtaggttacaaaaagacgaatgtaggcaatttcgtgtggttgtacctcataacctgctgattccccacccgcagagattctggtttaaggagcctgaggtaaggccagggactctgcaatatcacaccccctggtggttcagatccttgcaggccactctttgagaggctctgccttgagatgtgaagagcaggaggccaccagggcccggcgctggctctccggagactctgtcccgcgcgctcacctgctgggtgggccctctagaagagtcaacacctttacttatttttgacccatagtccccatcctgcatgcccgattctttacaaatgttaggcggaaggtgggtggaaactgagaattcagcaaaaccctattttgtgagaaaatacttccttgctttggaaaactgaaaagaatatttcaccaccaccaaaggctggtgatggagcaatgagagaggaaggcaagtggtactcttaggtttccaaatttgcctccatcatgcccagctgagaatcccgatagaagggctgtgatttgcagggtagtccctccgacattccaactgtccaagctgcggctagccacctcctctgctctcctcgaatgtgttatttgcattgctgcgcgtgctccgagctgcagcaggggtcctgcggctggagtggatgaaaggccccttccagcccccaccgccgccctgcgtctcggtctcgctcggaattggcctaagttcagccacagggcgcggccgcagcaaggcgcctttcggcttctgcgcttcactgaacgcaattctcttaggccaggcggccggcgcagctttttaggagacccgctccgactccaaggactgcaaagggagagcgccatctagtgtctacgcggggtttgggagaggcgggatctggaaagacacccattcaccctagatccacacgtagggattagaattcctgaaatgcagtgtttattcctgaagacaatcaccactttagttagatctctttccctctgcccccatacaagtgtctatcatcctcatattctgattccccttttcactaattaaaaatttacttttgtgttcatttttaccaagggggtggttccaatcatttaattacagaaaattggccgggcgcggtggcttacgcctgtaatcccaacattttgggaggctgaggcaggtggatcacctgaggtcaggagttcgagaccagcctggccaacatggtgaagccccgtctctactaaaaatacaaaaactagccgggtgtggtggcagacgcctgtaatcccagctacttggggggctgaggtaggagaatcgcttgaacccgggacgcggacgtggcagtgagccaagatcacgccatcgcactccagcctgggggacaagagcgagacttcgtctcaaa

SEQ ID NO: 587325 - DNA, 4001 bp, Homo sapiens
agaatgaggtgggggtgcttcctgctgaagctccccaggtgtgtgaaacagaagcaaactaagatatattgcatgctcaccacgtaccagatgcctcttgtgttatctatctctatctcttccatcagctccatcagcaaaagagaaaattgaggctcactgaggatagctgcttgacccagggcagccaaagagagcaacagagttagcactggaagacaagactagcagcaaagctcacatccttcaactgcaacttgcatgcagctgggcagcgtaccccatgcagcaggcctctaacaaaaatgaagccctgcaatttcaaattttcctggaacctttgaacttaaccaggagcctgaagatgtggccttcagctttccatgatttgcctggtagaaatcatcaatgagagacagattaggagtgagaaagacccacgtagacataggagtgtcggcatgggcccaggcgtggtggctcatgcctgtaaccccagcactctgggaggccaaggtgggcggatcacctgaggtcgggagttggagaccagtctgaccaacatggagaaaccgcatctctactaaaaatataaaattagccgggcatggtagctcatgcctgtaatcctagctactcaggaggctgagtcaggaggagaatcgcttgaacccgggaggcagaggtcacagtgagccgaggctgcacctcgcaccattgtactccagcctgggaaacaagagtgaaactcggcctcaaaaaaaaaaaaagtgtcaggatggggctctggaagatgacaagtcatggaatgaagttctgaggagggggacccggcacacagctctggaacaggccggcaggcggtgcctccttctgcagatggttgataagcatgtccacctgtcatccctgagtcttgccttgagtggggagaagtgaggactcattttccaataacacagctaattcaaatcgtgctcaataaagtggcacacgaaactctggtctgctacagaacatgatacgcagggattgggggaaggacaaaaacacctctctgacctagagaaggctgggagaggggggataaaatgctcaaatagaaatgagatctaaatttagatcaagaaagctaagttccctgacagtaaatgtaaaaccaaacgaagactattctttccccaccccctgctccatttcccccgcatctttttctccttttactgcaaacttcttacttgaaagtttaaagagctggtacatctcaactactttaaagtattatagcaatctgaaaacaagctctcgcatttgactctcggcggccatcgctgagctcctcgctgctcagctagaatcaaacaggtgtgttctcacggatttgccgctattttactctgaagttaagtcaagacacagacacatctgcttccaactatagtcactccctaaagagcgaagtgtgctcaggcttcagaaggaaacgcgtctgtatttggagagaacatctccccagcccgcatccaccccccgcctctcgtccctcactgtcatctgggaagatgggcgtcagctgaagtctgtgaccttcagcactgcagcaaagaagagaacccgggtcttacctggcagggaggcactcaggggtgccagcggaggtccagtcctgggcccaggcccactggaagcagcagctgggagaagacaccagccccaggaatcctcctcctgggggtcacctgtcagccactcgcccactctcccccaaataatctcacaaactcagactctaaacaagacccgcagtaagtgtggaggctttccccaggccagggggccagagagggaaccagcttgaaaacaagtaactaaatacatacagttagaaggaaaggcttgaaagttacagaatgagatagaaagtgtgtgagaaacagaagaacagggaaagcggagaagacacttccttggggagaaacgccgcagcctcggccagccccgccactgcccaggaacaaagctgtctggagcctccccaggggcaagctggcctcagcgctgggattccccggctaagagcgcggggctggggaggagctggggcgggggcgggcctaggagctcggggcgggagcgggcgggggccaagccgcgaaggaggaggaaaatcagggggctgggagcggggaggggccggaggtgcaggggcggaccccagagaaaacgagagaggccgacgaggccccggacagtggcgaggggctgcggggaaaggtgggcagggacctcgggagggctgtgggggactggacagcgttagggtccaggcagtaacgaggtggccctgggaagcccaaaagaggggctgacaactttctgtccaattatagacttcactgatactctgctcccttttccagcgggtctgaaatagaccaccgactagtgccgcagctgcccgaaactttgggaagtttggcgccaccagggggcctggggagggggcgcgcttggctctttttccagatctgagaggccccctcctgtctgagcaggtgagagcaggtaacgcgcacccctctgtgccaggggctccacctacaggcagccctgttcactggctgtgacttcagctctgaggacaggggcatcgcgtccttctttttgggatgaggacagtgaagcctcggagagagcctttatagtctgccagcgcccccagcagagcagggatatgggcccacgttggcctgatgaggacactcgcctggctaatgggctttccagcccccaaaggcagaccatgaacaggtgcaggcccggggcacccttctactttttctttctgagcactgttcctaaaaatgggccaggcaggagtattttgaactagatgagaacatggtttaatctgtgtgacctcccccacccccagctcccaatctgtctcctaaactctggggtgtctttatttggttgcctgctgggtagcaacgatttcataaacaggcagtatcgggctcctctgtgacccagggagctcaaaaatccagctgcttcctccctctccggtcttgttttccagccactcttgtggaaattcatttcacatgtgttgactgaaccccaccaccctcaccatgtcaggtgcccatcaagtagaagagagggctggccgtatcacgagaaaggtgaggggctgagatgggtgcttgtcagttaccaggagggcgggacgcagagaagagaatgattgcacctgcgagagcccagcgcgtgcgcctctgggcacactagtgtcagaggcattgaaccagagcaactccatcttgaataggggctggataaaatgaggctgagacctactgggctgcatttccagcaggtttggcgttcttgtcacagaatgacataggaggtaggtacaagacacaggccacagaggccccactgataaaacaggttgcaataaagaggctggccaaaacccaccaaaaccaagatggtgacctctggtcattctcactgctgattatatgctgattataatgcattaccatgctaatagacactcccaccagtgcaatgacaggttacaaatgtcatgacaacgtccagacgctaccctatgtggtctaaaagtttccctcagttctgggaaatcccctcccctttcccagaaaactcactaataatccaccccttgtttagcatgtaatcaagaaagaactataagtatatctggtcgagcagcccgtgccactgccctgcctgcaatagccatccttttgtttctttacttccctaataaatttgctttcactttatgaacttgccttgaattcttctcctggagtctggattgggatccttttccggtaacactagtgggaacacagacagaaaagagggatgagaccacaacattaaattacaataagttataataagtgctatgaagaaaaaaaaagatgagtcagagaacaaagtaaggggtgcaa

SEQ ID NO: 587326 - DNA, 4001 bp, Homo sapiens
gaaattttcaaagaaaaagcataaattggtgccggcctcaagagtttgtaatagaatacaaagcttggtatgtagatgcgagagctaggacaggttacttatcttagcttccaacccctagcatctaacatgatgcctggatcttagtaggtattcagtacattccaggatcatggatttctttattaagaacaaaatttattaaattttattaagaatttattttattaagaattttattaagaataaaattttattaaaaataaaatttggagtccatgtgatacagtttccaggctctggatgaagaagaggaaatcacacccaagaacataacagacttagttctagaacccacggttctagaacaccgcttcccaagtccctctccccaggatcactcacttcattttgtcacactctggcttgtaattatctcataatgtctgcagatgctcaggaggaaagttaatgagatttccactgtttgaagttttaacagggtttctaatgggaaaatgggaagggagaagttttctattaggtaaaaaatagtgctattctcaaatggattctcccatttgcagggacaaggaaaactttaattttcaatgcccccatgacaccccaggaataatctaaagtttcctatactctaaggaaacttcagtaacggttttaagcaaatactttatttctaatcaaaactttctttctgaacatttgccctcgcattattcatttattcacccaagaaattatttggaagctctaagctctcattgttcctcacagcatttattttatcgtatcaaaggttaaaacttggattgcaatcttagaggaaaattaattcagtgattaagaaaaatgcactttaagcaatacacatttaaataactgacaggcatggggcaatgtatttctgaattttgttttttggaaaaacacttttttctacttaaaattttaggcagctgcaattcttctaccctatagcctggagaaacagcatgaattactaataagggagcaccaatctgcagtgcagtgaccactttcagaacaaaagggtgaaagctaaaaccagaaaaatagattttttaaaatctactggttgcttaaagcatatttggaccttggctgtacttgagaacattttgcaatattctaccatccttgagcagaaggcatttggccccagagactacacttccaaataaagaaatgttcatttatatactaccttcaatgcttgacaaaatgtttccatcctctacgttggaactcaggatcccattaacttatgaaatatatatttaagatttaagttttatgttactgaccttttgcttaaacagctttaccagcatcagtattagaaaggaggagagtacaaacagtgcaataatagaggtgcttttaaggaaggaaagggcttctggagactcatgcctggattgtgcatctgccccggagcagaatggaacagggaatttccccctgccctgggtaagttccctcagatctccgtcctgggtttccccttcccaacatcctcttacctaacatcaaaggagagctttaaataagtaacagaccagatctggaaaatcctgattttccaaaatagaaggaaaatgggaggaaactagggaggagagaagagaaagtcattgaaatctaggaaggggttcagagatgagggaagatatcatatttattatacatgaaaattgtggttttctttcctcacctttgggtcctggtgaaattgtgtgtgtggcacagacttcagcggtaggacggctatcaatatccagacccagactctgaatttgcaaaagaaatagtaccaggaggataaattggtttcttcgaagcaaggatgcaaagccattcattgctgtggttcctcagaaaagggtctcccagaaatgccaaataaacagctttattttaaataaaacctcctgctttggggaagaaggggaagtatttggaacacacattccaaaaagggctacagagacaggaaggaagcataccctaggttgtttattttctcagtgctccaaatggaccatacattgtccagactgtttattttcaagtgacaacagtttattgaaaattatctctgaactccagtgtgcatgtcagtagaaacatccccaagaacaaagaagatagagatgccttctgctgagtacttgagctgacaatttaataggctatattgcatttaaacgctgagtttcagaaaggttgtgaaccagagaggtcttcagttagcaacatgttatgcaaacaccgtgcatggctttgagcttttcataaggtgatatttattacctgcttgtgcctgttgaacactaatgcttccaatgccctccatgaccttcttactcttgctaccaagattattctcttgtgattaaattcaaaaggaaagaacaaccagcttttctgtgaagcaacttggtgataagtattaggaatattaaaatgtttattacctttggcctagtttatagcttttagcctttctggtacactatctcaaggaaatattctgaaatgtgggcaaagcttcatttgaagggatgtggcagaaaggcgaaaggccttcaattgcctaacaacgtgttaacagtgggcaaattacggtaaaatatatgagagtgtatgacatgacaattttattaaaatggtgttttcagcaagtcttttacaaaataagggggaaaagcttgtggtattatgtttcataaaaagctcaacagatttagatgtagagtatgtagatcagatacagatatagatacagagatcaggatctctatctattccacaaacctataacctgtacaaatagtatgggcatagtaagatattggaagattggaaccagaatcacatatattggagaggccccttaccttctccattcttgaacagcatctcaactaagagttaggtgaaagggattttggacctgctttccttgaaattggaaaagaaggaccttacagatcctgatacagactgactgctgaaaaaatatccctaagagatgtcgttacaagtaaccatcaatccaagaaatacaggtgcattagtttcctagggctgccataacaaagcaccacaaactgagtggcttacaccagcggccgggtggctaaaaccagtgccaacccttttggcaccagggaccagtttggtggaagacaatttttctatggggaagatggggaaatactttcaggatgattcaggcaggcacattactttttctttttcttttcttttttcttttttttttttgagatggagtctcgctgttgcccaggctggagtacagtcgcatgatctgggctcactgcaacctctgcctcccaggttcaagcgattctcgtgcctcagcctcctgagtagctgagattacaggtgtacaccactgcacctggctaattttttgtatttttagtatggttggggtttcaccaggttggccaggctggtctccaactcttgatctcaaatgatccatccaccttggcctccataagtgctgggatcgcaggtgtgagccaccatgcctggcctcaagcacattacatttattgtacactttatttttattatttacattgtattatataatgaaataattatacaactcactataatgtagaatcagtgggagacctgagcttgttttactacaactagatgctcccatctggggatgatgggagacagtggcagatcatcaggcattagattctcctaaatatcaggcaacctaaatccccacatgcacaattcacaatagggtttgtgctcctatgagaatctaatgccgctgctgatctgacaggaggtgggaactaaggcagtaatgtgactgatgtgggggcagctgtaaatagagatgaaacttcgcaggctcacccaccgcacacctcctgctgtacagccgtgctcctaacagg

SEQ ID NO: 587327 - DNA, 4001 bp, Homo sapiens
ggcctcccagaggaagtgacatctaaggcatgaaggacaagcaggaattggcagagaagtagggggcagggaggaggaccaggaaacagcacaagttctccaagtaaattaatagatgaaagaatgaactaggggaacggtccggggaacacagggacactgcagctggcgccacagaccacactgagaccatttaactattcaatcttgaatccttcacaacagtgggcaagaagaattaccattctcacctgacagagagggagataaggctctaggccaggtgcagtggctcaagcctgaaatctcagcactttgtgaaggtgaggccagcggatcgcttgagcccaggagttggagaccaacctgggcatcatagcaagaccccgtttctacaaaaaatttaaaaaactagccaggcgtggtggtgcacgtctgtagtcccagctactcagaaggctgagaggacagaggatcccttgagcccaggaagtcgtggctgcagtgagacgaaatcgagccgctgcactccagcctggacaacagagatgctgtgaggaaggaaggaaggaacgaacgaatggagggaggggggagggaggggaggcagggaagaagaaaagaaaagtaaaaagaaatcaaagctctaaacacagctgccaaagtcaaggactgaagcctagacctgtctattcagaagtcccagctgtttccaccacagccccaacccccgggctggaagagctgagcaacggctggcaacagaggcaagtgcggcaactaaagagggttccgacgcacctgaaggagcagtgcagcagcacaagcacctgctatgccagaggaaacgcacgtgcccacctcagcacaccaggtactggagcagagctcagcggggcacagctcctgtcctcgaggcacttgtcaggccactctgcacagcgctgggggagcccaggagctccccacgggcttcacggcgccccattctccctgggagtcaacgaccacccactgccaactccttcaccgtcccgccagcaccaggagctccttcccactccaaagagccatccgggaaggcctccgagctgcccgcttccggtcgcgcggcttggaaggccgggttcgcaccctgactccgtacccgcggctctgatgggggcgcggcgtcgcccgttccggggcgcggggaccttggtgcacagagtcaaattggcactcggccgtcgccgcccccacggttcggggccaacctaccggcgggcgctcctccgcggaaaagccccgcagtatccagagctctccgaacacagcggcgaagcagcctttcctaggcccacacccccagctcgggagggagactccatcctactccaccccacgctcccgctgtccgagtcgcccccagcacctggcgccggcaatccccggctgatgcagccaaaagcgggcctggtccccggaagcgccctgagagccacttccgggccgctctaggaaggcagcaatgaccgccccactgtggtccgctggcccgaggggcggagccgaggccgcgccaggtcccgccccctccccgcccgggggaatcgggggtcgccggcggggtcccagacctcgtcttagacagttttttttttttctttccccaaagaaaaagaaggcggtgttgtgtttccgtttctgaggtagaaactgcggcctgcgcccgcgtctccctccccgcccgcgcagagtgagggtaaagcgggagaacgcgtcccgtggtctggggtcagaattccagtcacctgaggctgaggagctcgctggctttcgtcggcgtccgggtgggcggcggggaaaccgcgagaccttgaggatcagcgcggagcggagccgagcgggcgtccctgtcccgtgtggacggtctgcgcctccagggttttgagagctgccccgtttcccctcctgtcgggtggcgtccggcgcgcgtgactcggttccgctttgggctgctctgttgggccctagcgcaggagctcggtccgaaacaatggccgagccattttatttaacatgtactttaccatagttaaaaaataatatgccaaaatcattgaattgtacaaaatgggtgaattatatggtatgtgaattatagcccaataaaacttaaaaaaaaaaaaaaaactctgaaaagggaaacaacctaattaaatgggcagaagatgtgagtagacatcaaggaagatacaaagtgggtaatgggtacatgaagccttcggcattgttggctattagagaaatgcgaatggaagccacggggaggtgccatttcataccattagaagggttataataaaaatgacaggttgggtgcggtggctcacgcctgtaatcccagcactttgggaggcggaggtggacaaccagatctcaggagaactctatcatgagaccataacttaagggcatggtactaaaccattcatgaaaagccacccccacgatccaatcacttcccaccagtctccacctccagcattgggtattacctttcagcatgaggtttgggcggggacacagatgcaaaccacatcagccatacaatggaatagtgttcaataataaataggagtggagactgggtgcagtggctcatgcctacaatcccagtactttatgaggactaggtgggaggaccacttgaggctaggagttcaagaccagcctgggcgacatatcaaggcttcatttttacaaaattaaaaaaaaaaacaggtgtggtggtgtgcacctatagcaggggtccccaaccctcaggctgtggaccgctacaggtcagtggcctgttaggaactgacctcacagcaggaggtgagggcaacctatagtcccagctatttgagaggcagagtgaggaccacttcagttcaggaatttgagaccagcctggggaacatggcaagactccatttctaagacaaaacaaatcaagtctaaaaaccatgctgagggaggattgtttaaagggaatggatctgggaagtttagaaagagactgcatctgtaaggtgttatttctctttaaaatatctgaagcaaaaaggtgaagtgctatcacttgtgaggtctgggcggtggttacgtggcagacccaccccctcctgaagtgaggagagccaggaacctgggggtgagttttggagacagttcccacccaaaggccagagtgcctggagtgcctggagaactctcatcttattgtagcaggatgagccacagacaaaacttctcagacactgggttaaagaaggaaggggttttatttggctgggagctttggcagacttgtgtcttaagagctgagctcctcgaaaaagaaattactggcccttttaagggcttacaaccctaaagggtccacgtgaaagggttattatgatagactgggaaagcatggagaacatgactggaggctacaagcatcagctaacagaacagaaagttttacaatgctttcttatacaatgtctggaatttacagataacacaagtagtttaggttaggggttgatattattaacaccagggccaggtgatggcaccaaggtcatctggctatttatcttctgtttctttctcactttttgttttctcccatttctcctgtcttataaactaggcaagacagggggagaggagggcagtaggagaagtggtggtctccttccttactatgatcaacatttgtaagttaatttagcttgaaacaatttcaagcttagataaaaggttgcatgaatagtgcaccttcccagagacccccattcaagggtcaccaggtgtccctgcaatgtctctgaaggaaaggagcctgttgcctggcaagagtggtgtcatctcgaagcaaaatcactgtggtggccgatgttagactcctgcataccaaggtcttcacacaaggcctgtagcattgataacccctcagaaagatgctacctaacttccccagc

SEQ ID NO: 587328 - DNA, 4001 bp, Homo sapiens
tgtgcatgcctgccagcagggcacccagctgctcctccggcaggttggcgctgaccccaagacgctgcacagcctctcggcagtcctccccctgcaggctgctgaccacaaacttcagcaactttctgaacgtgctcctgtctaggtcccctagtagccgggccattgctgccacctctggaggaagctgggcccccaagaaactcactcggccactgtgactatcaccaggatgatgcaggtatggagttgcagcccccacagcagacattgctgctgcttcctctttgatcagccagcccaggaggtcggtcccagatgcagatgcctagagtggggtggaggagagaagaccagtgactctcacatcctttgggccagcgagtgagggttgatatggtccccatcatcagcatgctgacagtgtgaactaccaatgacagtcagtgctgcggagatggccctggaagcaggtggcagaggggtccatgtcagtcccaggaggagcggaggcctcccagaggaagtgacatctaaggcatgaaggacaagcaggaattggcagagaagtagggggcagggaggaggaccaggaaacagcacaagttctccaagtaaattaatagatgaaagaatgaactaggggaacggtccggggaacacagggacactgcagctggcgccacagaccacactgagaccatttaactattcaatcttgaatccttcacaacagtgggcaagaagaattaccattctcacctgacagagagggagataaggctctaggccaggtgcagtggctcaagcctgaaatctcagcactttgtgaaggtgaggccagcggatcgcttgagcccaggagttggagaccaacctgggcatcatagcaagaccccgtttctacaaaaaatttaaaaaactagccaggcgtggtggtgcacgtctgtagtcccagctactcagaaggctgagaggacagaggatcccttgagcccaggaagtcgtggctgcagtgagacgaaatcgagccgctgcactccagcctggacaacagagatgctgtgaggaaggaaggaaggaacgaacgaatggagggaggggggagggaggggaggcagggaagaagaaaagaaaagtaaaaagaaatcaaagctctaaacacagctgccaaagtcaaggactgaagcctagacctgtctattcagaagtcccagctgtttccaccacagccccaacccccgggctggaagagctgagcaacggctggcaacagaggcaagtgcggcaactaaagagggttccgacgcacctgaaggagcagtgcagcagcacaagcacctgctatgccagaggaaacgcacgtgcccacctcagcacaccaggtactggagcagagctcagcggggcacagctcctgtcctcgaggcacttgtcaggccactctgcacagcgctgggggagcccaggagctccccacgggcttcacggcgccccattctccctgggagtcaacgaccacccactgccaactccttcaccgtcccgccagcaccaggagctccttcccactccaaagagccatccgggaaggcctccgagctgcccgcttccggtcgcgcggcttggaaggccgggttcgcaccctgactccgtacccgcggctctgatgggggcgcggcgtcgcccgttccggggcgcggggaccttggtgcacagagtcaaattggcactcggccgtcgccgcccccacggttcggggccaacctaccggcgggcgctcctccgcggaaaagccccgcagtatccagagctctccgaacacagcggcgaagcagcctttcctaggcccacacccccagctcgggagggagactccatcctactccaccccacgctcccgctgtccgagtcgcccccagcacctggcgccggcaatccccggctgatgcagccaaaagcgggcctggtccccggaagcgccctgagagccacttccgggccgctctaggaaggcagcaatgaccgccccactgtggtccgctggcccgaggggcggagccgaggccgcgccaggtcccgccccctccccgcccgggggaatcgggggtcgccggcggggtcccagacctcgtcttagacagttttttttttttctttccccaaagaaaaagaaggcggtgttgtgtttccgtttctgaggtagaaactgcggcctgcgcccgcgtctccctccccgcccgcgcagagtgagggtaaagcgggagaacgcgtcccgtggtctggggtcagaattccagtcacctgaggctgaggagctcgctggctttcgtcggcgtccgggtgggcggcggggaaaccgcgagaccttgaggatcagcgcggagcggagccgagcgggcgtccctgtcccgtgtggacggtctgcgcctccagggttttgagagctgccccgtttcccctcctgtcgggtggcgtccggcgcgcgtgactcggttccgctttgggctgctctgttgggccctagcgcaggagctcggtccgaaacaatggccgagccattttatttaacatgtactttaccatagttaaaaaataatatgccaaaatcattgaattgtacaaaatgggtgaattatatggtatgtgaattatagcccaataaaacttaaaaaaaaaaaaaaaactctgaaaagggaaacaacctaattaaatgggcagaagatgtgagtagacatcaaggaagatacaaagtgggtaatgggtacatgaagccttcggcattgttggctattagagaaatgcgaatggaagccacggggaggtgccatttcataccattagaagggttataataaaaatgacaggttgggtgcggtggctcacgcctgtaatcccagcactttgggaggcggaggtggacaaccagatctcaggagaactctatcatgagaccataacttaagggcatggtactaaaccattcatgaaaagccacccccacgatccaatcacttcccaccagtctccacctccagcattgggtattacctttcagcatgaggtttgggcggggacacagatgcaaaccacatcagccatacaatggaatagtgttcaataataaataggagtggagactgggtgcagtggctcatgcctacaatcccagtactttatgaggactaggtgggaggaccacttgaggctaggagttcaagaccagcctgggcgacatatcaaggcttcatttttacaaaattaaaaaaaaaaacaggtgtggtggtgtgcacctatagcaggggtccccaaccctcaggctgtggaccgctacaggtcagtggcctgttaggaactgacctcacagcaggaggtgagggcaacctatagtcccagctatttgagaggcagagtgaggaccacttcagttcaggaatttgagaccagcctggggaacatggcaagactccatttctaagacaaaacaaatcaagtctaaaaaccatgctgagggaggattgtttaaagggaatggatctgggaagtttagaaagagactgcatctgtaaggtgttatttctctttaaaatatctgaagcaaaaaggtgaagtgctatcacttgtgaggtctgggcggtggttacgtggcagacccaccccctcctgaagtgaggagagccaggaacctgggggtgagttttggagacagttcccacccaaaggccagagtgcctggagtgcctggagaactctcatcttattgtagcaggatgagccacagacaaaacttctcagacactgggttaaagaaggaaggggttttatttggctgggagctttggcagacttgtgtcttaagagctgagctcctcgaaaaagaaattactggcccttttaagggcttacaaccctaaagggtccacgtgaaagggttattatgatagactgggaaagcatggagaacatgactggaggctacaagcatcagctaacagaacaga

SEQ ID NO: 587329 - DNA, 4001 bp, Homo sapiens
gcacagcctgttacagaagcaagcagataaccaagcaacttaagcagccttacagagcagtcagtcaacgtctctacaaagcctttttagatgtctgcccacagaaagaatccaaatttaattcctaagctttgccagatttcaaccaaaagctgaaaaatgtgtagacctcatgttggaagtcaagacatgaatcgaaatcttggcttctccctttactggagaaaagaagaaagacaagttactgtgctcctattacatacattctagacgactctttttatacattatctcacctaatctctatgacaataccaataagtaggtcttatttccatattatgacaaatgaagatggataagtaaatttcctaaggtcaatcaactagttagtgacagctgtgagatttgatcttaggtctgactattgctcagttgagagttcacttatgtcagtatgatcataaattacataacgtatttgcttgttttttaatttgtaacaaaaggatggatatactgtactgggttgtcatgaaaattaaatgacgtggaaatctctagctaggtgcttccgcagttcaccattgtggaatctgaatactgagagacaaggctagccttgtaaaaaaaactgtgaggcagtagaagtatgtcctcttgttgaccacagctttcctttctatctaaccattagctttcgtgctctttttactctcaaacataacccgtaataattatcttttcctgatagcaggaaatctctcaggagatgctctcaggaaaagataaatattatgggtaaagatccctcgacttgtcaccactcccagggaaaaatggatattgttgaagggcaaaaggtcttaagctctatttttataatttctggcttatgggaactggtggagtaacattttagagaccaggtagtagagcctccgtgtgcctccgaaataattaccagcaatcaaaaaactattataggcccaggcctcacgcctgtaatcccagcactttggaaggcgaaggcgggaggatcgcttgaaggcagaagctcgagatcagcctgagcaacacagcgaggacccatttctattaaaaaaaaaagaaaagaaaatagctcatagctatttttgagaccttgggctgctgactcgatttctgaaaacagctgcaatccccagtttgggattagttgaagacccaaacaaggtgcatgtcgacactgggctcaaggtagggtgtgtggcatatatgacaatacggatgttcagaagtgacaacttaaatcaccgcttgttgttctccccttacatcacccgggggcaaatggattaaagcgacagaaaggggagtgaaagccccagcggagggcttaggctctacttgcagatccaagacgcatattctgtccccctcccagtcggtgaaagctcttcacccctttcacctccctctccctctgggtctcttaaactccgccaccctttccctcccctgcgtctcgccagggacctcctcactccttagtccagggcttcgccgccaggatttcttgctgctgtttcttgtcgtatttgtagatttcatcgatactctgagcttcctgcatgttgttggccagttcccaggttttctgggccataccgctcccggacgccgccatcgccgaggaagcggagaagttgtcgtctctacaaccaagacgcaactttacctcgctaggtttccgggtgtgggccttgaccctccgcaccacgggaacaaactcttacctagactcttggggcagccatgacacctagaaccggaggtgaagttggtagagaccattcagggaagacagggacctttccgggacatgacgatataaacagcagttacagtaatagcgagagacgaatcttcttgttgcttaaatgagaacatcttgtctcggaaaattatatgtgtgaaatagaacaaacaaagttatagggtatgggagtggtatagtcttccgcaccggaagaagggcatgtaacgttattccagaaactggtatttgccttctctgcttctaatgcgcaggctcggcctccgccatattaaaggtagctggagccttaagagcgggatgtggagggcggaaagtgtttttgtgtgggtataggtaccttaaatgagataagtttgttgaaagactaaaaggtaaggctgtctgttgtacaactgagctaaaagtcgttctggaagctggttgagaggaagataaacatggcattcccgtttacttcaagatgactcactgtacatgcgtaaaagctaacgggctcgtggtggcttggcacttcacttgcagatgggctttttctatcgatgcgaggaggcagtgggtactccttgattgcttttttgcgctttggtaaaagttaacatctacgtatatataatgtgccattactgatctgaaaatgtccagtactcagttctcgtaacaggttacagttaaatctttggcactcctgtgaaccgcatttgttcccaaagcgtaattaatctgggtaactggtttgttttcttcctacagttaatacaatgtttaatttttttattagttcacgtgttttaggttttcttttttctccatctcattcttccatccgtgcaagattttaagtttcaagacacagggagcaggtctgcgttccttgttttatctcctagcacctagcataggtgttcaagatttttttttcttttatttcctgaaaagatagcatgacaggccaggcgcggtggctcacgcctgtaatcccagcactttgggcagccgaggcgggctgatcacttgaggtcgggagttcaagaccagcctggccaacatggtgaaaccccgtctctactaaaaaaatacaaaaaaaaattagccgggcgtgatgatgtgcgcctgtagtcccggctactcatgaggctgaggcaggagaatcgtttgaacccaggaggcggaagttgcagtgatccgagattgcgccactccagcctgttagacagagccagtctcaaaaaaaaaaaaaaaaaaaaaaagaaagaaagaaagaaaaaagaagaaaaaagaaaagatagcaccacagctgttaacaacctggcccctatgcacctcttccagcttcatctctttttagtccccccttgaaacttttcattctagcaatgcagatatctttactttggctttgcatatgtggtcagcattgcttgaaacgctctttcgtaaattttctgcctgggaactcctattaatctttaaaaatgcagtccagtgagatcgaccacgaactctttcttgacgctccaattaccattccttccattatgtctgtaagtctccgtaggtgcttctataactgttacaatgcgttgtaataatcagttaagacaaaaacattagaattattgaatccacaccacagcttgctgttttggcactgactttccgttgaagaaaatttcctttaaaaccatcttacaaagaaatttagggtaaaatagtacattaatacctacccttagttccactctcctgggaaactagaggtctcttttctagtggtagcatatggccatatgcgattgtattggggtgaactgaataatatgttgaaaatggtaatgaaagcccaggacccaacgttgaccacactcctgggctaggagtaatgccctgagaggtatgccaacacttttcctctcactaccacccctccccatttttctttccaggctcttacactgttcctaagctggctggtgcatgggaggctggagaggctgcaatagatttagcctgagaagtggcccccacagtttaatagcccctgggcacagcaggagaacgagttgaccaagtccccggccagcgtactggcgaaccgagagcagcgggcagctatgcggcctccaggacagcagggggcgatgtcttgccgcgcggccgcctgcagtgggggcggggccgt

SEQ ID NO: 587330 - DNA, 4001 bp, Homo sapiens
gagccatggtagttactgtccttgatacgtatgctaaccttaagagattcagaaaatatgattaagtacagagtttatttaagccacaaacttgagaatggccacctggaagcattgattggagctgccctgaatatacactccgattagcagcagttacaaatgaatgtttttcttttttggcagaaacagggtctagctatgctccccaggctggtcttaaactcctgccctcaagtgatcatcctacctcgtcctcccaaagtgctgggattccggcctacaagtgagttaagaaaaaatgagaggcaattcctaaactgtttatcaaaaatttacattaaaataacataagctattgactgactaaacgctgtcctttatatcacaaattcaggaataagatttgggttgagacatgggtgaggggcggcactgaagtccaatactcaggtctctgcgtcctgcatacctcatgtagctctcactactctgagctttttttccctttctcgggtaaaataataaaagaaaaactcagaaaagatatcaaaaggaattctcatgcatagtacattttactacctagagaggcacagcacgacagtggatggattcctcccacaaagcctaagctgtctcttggcttagcctgtttcatcttccccccgccccccatatactgagcgaccaccctaaataaacgcgacaaactgcggcacactagtaatggacgagcaaaggcaacaaaaatctttccaacaacaagaaaaataagcagtagctccgcattggtaattaacgattgcaaacccatttatgcaacactttctcttctaaaaattttctgtccactcgttaaaccttcgcgacaaccctgtcagatcatgaggcaggtgttttccacggtcacacggtataccattaaaacctggacgggaacgcggcaaataccatgagggcccaaattccctaactgctcctttgcccagcctcacctaaagacctaaggggcctaaaaacttttgcgtccctgctggccttcagctaacgcggccgggggtaggatgggaagccgtggggcaagggaggttgcaggaagcccatccttcccctcctgcggcaggtacggtgaccctcctccagttttccagctctaatttaaaacgctgccacacagcgagcgacgctgccagctgcttcgcctacactaacccttgcgcctcacgaccagctgcattagaaaccaccaccccttttctcacgggagaaacaccggggccagataggtcaaatgacctcaccaaggtcacaatggctgtgaaaaagcgcagcgggtaccagccccgggccagctcactccgaagccagctgggttctcgagggtcccgcagcccacccggcttcggtggggccgtcgcaacccaccccggtccgtggtccgcccgccgccctccctcaggccgcagcggaagcgtgagagagtagatgcgggagaggcctgaagctgcaccacggcggagacacacagtcacgactaaatccgaggcagagagaaagcgggagggtgccgttgtgacaacccgcagtgtcggggtagggatgcaaaagggaccggactcacctcaacaccaacgtccttcctgactaaaggaaaaacgaaccgtgctgtagccgcgcgcaggcgcagaataagagtgcacagcgagaacgcggcgacggtagccgaaggagttcaaaagacctctagtgcgcccaccgcaggtgacagccgaagttcatttcgtggtctgcttctttcctgtgtgaccttgcaaaacgggcttgacctccttatttatcgacctctttatcttcttagtaaattgaagatattagtcgtactcatacacagagtcccaaaccatgtgcacaaaccgacattttaattataaccaaccttacgcgaataaccgtttggcttgggtaaaagtgaaaaagctgacttctaggagctcacagcccagaagatgaaaaagacaaacagattaataccgatcccatgcagtgggcactaccacagagacgtggcccagctactgcagaagcaattctctacctggcaaagctgaggacgttttgatagaggggcggtatttttgtgggtttcttaagaaaacaaggattttgaaggaaggcaactggaagttcgtggaaagtggtgtagaagggtgaggctcttgtgccttaatgatgccaggctgtttgtattgaaataacctgaattttaaaagcattatttaagtcaacccatcaagccctgtggaaggtagctgggacacaacagatgcatgatattgagtcgatatatacactgagtacctactatgtgccagattctgctaaacaagaggacagatcttcggggagtctcattctgatcagggagtctttgtcctcaacctattaaccaacactctggagggtgaaacctggccacaaagaaaggtgctcaattgaggttcaaaagtaggtttggactttaccaacgtttttcaggcctcttatcaagggtctacccagctgaaaatctttgcatggaatttgtccagagagtaatttgtttctattctctttccatccccacccccagagaagaagtggtgaacttaagagttcacagggattagtgtatgtgaaaccatcagggaaagcttcagacaatacgtggaagagatggaagcagagctgagtttcagtctaatggaaagcctggaaaactggagaaattggagagaaaacattggctgggagaacatggcaaagacaggcacactcagggcacagagcctgacctgagtgaaatactgagtgtttgttctgtgcttccctagctatccagtgaaccatagtgaatgactgagggtgacacgtgaataaaacctgagcgatagatgaagagagacatgttacatataggttctgttctagagccgaacagacctggatttgagtcccagctcatcaacttgtagcggcaaatttcttcatctttctaagtctgctttctcctctaaaaatagtacccattttgttgggttgtgatgtaaattaaatgggataatgtatatgcagcttgagtatcccttatctgaaatatttgagaccagaagtgtttcagattttggattttttcagatttttgagtatttgcagaatacatgccagttgagcatcccaatctgaaaatctgaaatccaaaatgctccactgagcatttccttgagcatcacatcagtgctcaaaaagttttggattttggagcgttttggattttggattttcagattaagggtgttcaacctatacagtgcttgacaaacagacattctgaatatgcattcctccctgtgttcttttgcctgtcctgcattccttcaatctttcttttagtagcagtgcttaatcaatccttcatcacttctagccatgtgattctacaacagtcaaatcttattccagactgggtgtggtggctcacacctgtaatcccagcactttgggaggccaaggaaggcagattacttgagcccaggtgttggagaccaacctgagcaacatagaccaccatctccataaaaaactttaaaacttagccgggcatagtgtgatttatgcctatagtcccagctactcaggaggctgaggctggaggatcacttgagcccaagagttgcaggctgtagtgagctatgactgcaccactgtactccagccagacagagtgagaccctgtctttaaaaagaaaaagaaaaaacattattccagttgagcagatgacccaagagtagccaagcaatgtagcccatccccttggccacagtaatttgttgaggatgggcacaggattctggccaggccagtgaaactcaattctatgacttctgttgaaactactgggggaaaagatatctttttatagagagaggagtttgcattgggttgcagtaggggtcttgca

SEQ ID NO: 587331 - DNA, 4001 bp, Homo sapiens
ctgaagggttccagtcgctacaaattctatacgaaaagggtgccaccactggcctcatttcctcttcaaagtggtgcttagggaagggtgcacacctgctcagctgaagcaggcctggtaacttttcacggaggagtgccacacgctgaaataattatgcacagagccacagctgagtggaggagtgaggtcttaggtcatacacgtgtgtctaaatctgtgatctatgtttatcatctgacccggcatcagccaggagagtcagaattaagtcccccacaacccaagcctgcaccatcagtctttaaacatgagcttcttttttccagatctctaaaggggtcacaaattatcggaggtaaagttgagatcttgtatgtccaggccaaaaggcagccctgggatgttaactcctttccgttcctcccagaaatactggggtggaaaaatccgtgatcatattgccatctatagcccctacctcagccaacacctccatctcatcctgcctcccctaaaactgaggacatgtttccaaaatttcctctgtaagcactgtattcagaggaaccctaaaggcagtgccaagattctttgggagagaaagagaaatacaattctcttttccagggtcacacttacaaattctcttttacactatttctaaaaagaacaacttggttttaagacactgtacactaccttgtcatgatccagatctacatgaaaacttttctcaggtggtgattattgaatgatagtagcctatttaaaaatatgtaagacactgagtttactcctctgtaaaaaggaattgaactagaggaagtatttaaggtttttccagatctaaagtgcaggcaagccataatttccagattctaagaacgaccccctgcatatgtgagcaaatcacatgctgtctataccacagcaagccttcaggataataagaatgtgcatagtaacacacggcttccagccctctgcctcctgaagaaaggcatatagaaagcatgcttacctacggaggggggacaaaactgattgttttactcctatgtttttccttcagaaaaactatccataattttacagttgactacttttattctgcttattttgagttgaatcatttgcattgctcatatttaaaaatctaataaccactctacagactaataagcacagacaaaaaaaaaatcacactcagttcttaatcactgatgaatttcaacccaccgctcctacatacaattgtaaagaaaggcttagttttcaggtcataaatcatgtaggacaacagcatccccaagcatcaaccaaggcaaacactgtaaatactgaccatggctactccaaagacagaatcccattcaaccctgggtccacagctaaggttggcacatgataaaaagtataaaaagccaggttggagcccaccacattctctcagtgagctaaagccaagagcagagagctgtgagtacattttatatagaggaccgtgaaagtgtgcagattcactcagagacccccaaatcagaaaaagtgaggcacactctggagcaaaccagcccccagatccaaatcaaagctgtgtagggcatgaatgtcgctccacttacccagcatagcggttgttataaaggtggctgtgccccggttgcagaatcttcaaaaagagccagcaaagaggcaggaaagcagctgcctggcccctgcgcttcccgagacacttcatagtgttaagaagagaggagttgaaagttacttaagcagccacccgaggctggaggtggctcacagcaccctctacacaccgcacaggttctccgggaagggggtgggcgaggaaggttgagagtgagcaaaatgtgacacttctctccagctacaagggaaaaaaaaagttcaggcagctgaggaagggaagttgctattacgacttggtcttgggacaagcagcagcagcagcagcagcagctgagcctgatctttaatcaggctcccctagaaagggctgggcctccctcgtgctgactcacggcaggggttcactgggtgctgcttcctttgggtgactcctctctgcttttggtttgtttgctttcccaacttgaggcctctaacttttctgtgcaagctttctttctctatcttcttcagcatgaggatcctacctaattgcaaatgatttgtctgatgggctaaacaagcagacatggattattccaagcttaatgtttttttgatctcccatgacagattcctaaacggattccacctaatgaaatgcacaatgaacaatcatgatgagaacgtgcacgggggtacctatagcacccagatccgaacagctggcttcagttcactgctcctgacttacaggagtggtcagtggctttattgggcttcagggagatcttggtactcattctgcatcagcagcacccagacctgctgctgtttcagaggttctcgtggggaataggaggccttcgagtgctttgccaccttggctgtacatttggaatcatttagggagccagaccttgaaaatagaaaccgtggtggtgggatcagtggtttaaaaagctccttaggtgattccaatattcaaccaccatgctggtctggagcagggcttctcagagctccacatgcatagaagtcacctggggatctcattaaactgcagctctgacgtaggttggaacaggggcctaagagtttttatttttcttttttgagacagagtttcgctcttgttgcccaggctggatggagtgccaagtccccatctcggctcactgcaacctccgcctcccaggttcaagcgattctcctgcctcagcctcctgagtagctcggattacaggtgcctaccaccacgcccagctaatttttgtatttttagtagagacgaggtttccccatgtcggtcaggctggtcttgaactcgtgacctcaggcaatctgcttgtctcggccttgcgaagtgctgggattacaggtgtgagccaccacgcctggccgagtctgcatttctaaagaagcttccaggtgatgctggtgccactggctcttcagccacacttggagtagcaagacttcactttagaatgaggtctgctttttcttccaagcaaaccttggagaaaaccatttccttctcttttttcccatgttgatgatgaaagctttttaaaattattatttgcatccacttgctcctattccaatacgccacaaaacccattacaggggatgtgcctcgccctattaaataagcataggcacctagggtgcctcctgttacctttcatgcccagtcctggttgtgctctaaaacagagagtgagccactatttcctcatcacactcacaaaacttttcaggcttcctggagagtcatagccaagaactcctgtaccctctaatactatagccagagtccctgttagaagagagagcacccaatctttcccatcttctctacctggggagttgaaccaaaactcctttgacagattcaatgtcaggttcatgaaacagctgaaatggttttcatttgaaatgatgctctgaatttttctgcaactttctcagcatcagtttggttaatgcctcctctgtgtccctcacaaatcctggcatgtcctctactgtaggaattaccacatcaaatttcttgtctggtttcctcatgaggctgctttctccttgaatacagaactgtatccttttggtcttcctgtgcacttccttatacctcctcgagggaatacaatgtttcctgaaggagtgatcaacgatgtctgttggatgaacgatgaaccagggaagaaattcatttaacaaacattaacatagatgcttctgtgtccagatagaggagagagcaccttgggagcagagaacactatgggtgcttttggagagtggaagttccccgggtgatcatgtctggtttcgtttcttttttatgttgccttctt

SEQ ID NO: 587332 - DNA, 4001 bp, Homo sapiens
aaatgtataataggttgccataaacttatatgaaaatgaagaccattgtctataaagtgttcacagttataggtaaaattagaagaggtgtccagtcattatgcaacccttaatggcaaacactccttctgtttctcccgtcctggagcctcctctcccttcctattcttcagggactagacctgaaagaagaaatcctgaaagagaactgcagacttcattgtggggtttgtgccaggcaccttttggtctgtggggtcctaaaattcagctccacctcacatctagagtctcaaaatgatccagtcccagagtttgaaatttttcagcccagagtgggatgtatttttccaattcatcagccaaaaggaactgacctattaataattctcgcaaaggcaaaaagtggccctgggtaccacagatcaatgactgagacatctattgttgtcactataattgccattatatatgtcatctgttttcagttcccttttcgtttcccatcctttgctgtttccctctacctatgttctaggcttgcacaagttctgtttggctctggctggcagcacacacagagagctagtttgctgacccttattaatgacatcaggatatatgtggctatatatagcttaccactaactacgtgtcaagcactttgctaaatgttttacaagtaggatctaatttaattctcatagcaaccttgtgacattttatctctatttcacaaatgcagaaacaggccctaaaaggtgaagtatcctgcccaaggtcatacagctaacagccctcatagcatagatttgaaacctaggtatctggcttatcccaaagaataatgttcttttacattaagcaataaagcctgtgccctaaaaccatacggacttgaattccaaaccctaatgccaccacttaccagttgtgtaatttgatgaattattcaacctgagtttcctggagaatgaaacagagtaacatcactttaataagtgcttgggagcgttaaataacctaacatataaaaactgtctagcacagttgttgtgggacattgaaatcaagtcacaatattcaatcccgcccttccctctatttgattatccattatagaggtggcctcacaaagacaacactaaggatatgcaaaaagtgcagatgatcattaagtgcaacataaatggttgatctgctcggtcccaacgggttctggccgtgcgcttcctccacaatcctggtgtagggaacccaaaacactagacagaagaatcttgaagctggaggagaaacgggagctgctagactacttctcacaatctccttgtttaccctgaaatcaagagtcacctcttcccactccatctgccagcttctcgggtgctctgaagcgcgcgccccccgctcaactgggcattggcttcaccacggacgtggtgtgggtaccctatccctctccccgcgtggtgctgcagcgatttcgggacctgtcacccttctctgggccacaagcccgaccctctccgcccagggaaggagggcggatcccagcctatccccagccccaggtgcgcgagcgccaggcccaggcggggccttgcggcccggagctgagccccgagcccgggctcctccaggaggcgtcggcggtgcctgggtccagccaggccgcgacctagctcgggagcctccccgcgacctgccgatccccagctgcgcgaagcccacggagcacttccagcagcagggcccggcgggacctgccgcacggagcctgcgggctcggatcctccaggccaggactttccttttcccccgggcggtacggttgctgggctgctgcctcaccggcccaggaactgggagacgcccgcactcacgtgggagtcttagaggtggaagtcgagcgacggtggagaacaggttggcagcgtccggagcgacgctgggaccgcagggattcaggagaacctagggctggactggcagagcaagggggcggggagggggcggggatggggcgggtccagtgcgcgcccgccccgcacagcctgcgcgaggatcagcccatccgcagggagctgactccgggctgcatgtcagctccttgccagtaggctggcgcttcgaggccattctggaggccagtcgcttactgaaaaggcaaaactgactttaaggtaagtggtttggtgcaccaaaataaattccttaaggattaaataatttaaatatttgagaaaatttatgccatatctgaactgagaagactgggcgcagtggctcacacctgtaatccaaacattttgggaggcagaggtgggaggatggcttgtgcccaggagttggagaccagccccagcctggggcaaaaaaatgagaccccctccaccgctacaaaaagtaaaaaaaaaaatagctgggcgtggtggcacgcgactgtggtcctagctacacaggaggctgaggcagaaggatcacgggctcaggctgcagtgcgccatgttcgtgcctctgcactccagcctgggtgacaaacagaccctgtcttaaaaaaaaaaaaaaaagttaccaagacaaattatcaacatgaaaatagcgaaatacatcttagctgttaaccatgcttatatgcttatttagggcattcttaatgtgcacactaccaaggacattttatatccttcattacctttaatcctcatgattctgtgatgtatttggtgccagtatacccattttacaaatgaaaactgcaattgagtaacatgagatttggaagctaaataattggcctacttttctgaagtcacacaaattgtaagtaaactaacctcaaagtgcaggctggactgcttgctactccatgctgcctgcagctaaacaaaacactatggaaaatattgatacatgactgctcgataatttagaacttcttcccaaggaaacagggacaaaatcaataaaacacattgggaaaaatattggtcccaaacctgacagagttagtatcttaagttcatttattttttatttttatttttttgagacgcagtttcgctcttgttgcccaagctggagtgcaatggcgcgatctcagctcaccacaacctccgcctcccgggttcaagcgattctcctgcctcagcctcctgagtagcttgggattacaggcatgtgccaccatgcccagctaattttgtatttttagtagagccagggcttctccatgttggtcaggctagtcttgaactcccgacctcagatgatccacccaccttggcttcccaaagtgctgagattacaggtgtgagccaccgtgcctggcctcttaagttcatttaaattgataagaaaaaaaaaaacacccaatagaaaaatgggtgaaggttttttttaattacagaagaaatggaaagggtatcaaatgaagaaacacagacattcttaagtaaaaactttactcttaatccaagaaatgcaaactaaacatttttattttatttatttttaagaaatggggtctcactatgttgctcaggctggtgttgaactcctgggttcaagtgatctgccagccttggcctcccagagtgctgggattacaggtgtgagccaccgtgcctggcctgcaaattaaacatttttaaaatcgtatcagtgccagtgaggattcattcatttattcaacaaacactatgtgcattgctctagacttgtgagcaagacagacaggaacttctatcctagaggacggttgaatcttaagttagttgttaaagacaaatgagatttcagccagccagaagtgccatgagaaaagttaaggcagggtgatgtgatagagggacttgaggatagtgtgagcttatttagactggggatctgaaaagagctctctaagatggtatttgatctgagatttgaaaaataagcagcagccagttatgcaaatatctggggcacaggaatggtagcaggggcaaagataagaa

SEQ ID NO: 587333 - DNA, 4001 bp, Homo sapiens
attttacttaacacatttggaactttgtgtttgttaaatgtagcatgcaaaaatatttaaatatgtatgtataatgacttttgaagtgcctttaaaaaatctccaaggtccttccagctccaaaatgtgatctatgataactaatctcaaatgcatgcgaagaaatagtgatgcagttccccagatatactgggaatatatggcattgtcagactgggttgcactggaaaaaagtcagacccaggaccaggagcctgtgacaatgtagaagaaaatcttaccctcctttctccccaccagcctagggtttattacacttatcttgagctcccaggctttcttgttgcagatgtggagaagaaaggaaatgagctgtaaacagcaaagaagagagcagagacaaaatgctatgggaggtgaagtaagcagaactccatgaaatcatctgtaatttcaccttctaaccctgatacaaaagaatcccagaggtttaactcaggcagggttcctagctaaacatcttcattttggagattaagaaattaaaacctaaagagatcaagtggcaagtccaaggtcatccagctcttctggaacctggacctggcaagtaagaacggctgcagtgaccaactgtattaaagctatgtgctaagcctatttgtttacaaacagataagcgtctttctgggccttatgtagccttcttcagtcacctgcaaatcagccagcacctgtctcaggaaaacagacaagattcttaacaactctgaattcaaaagaaaagcctggttttacaaacaagtcagagtcatatggttctgccttcagagtcacccttatctttaagaaatacatgaaataatattatagtgacaatgattctttaaacgtccaaagtagaagtgaacaaaacacaagcaagaaaaaacctaggcatattttgttttaagcaaacacatatagccaagtccaacaaaaatggaaataccagggggcgtttccagagaccatttgaacagcatagaactctttttaagtggtcccaatcagaatgcctccatttgcaaaagtgcgacattcacacaactttttggaaagctatcaaaaaacaggagttgtaagcctgcgtctccactgcttccacttcatacatctttattttcactcatgcactgattgattcagctgtatctcgtatgcactcatttattcacttactcatttgttaattcactcagttctacggcataggtactcattcaattacttattgagtagctctgagtcctaagtcagatgggactttgccctcatggaacttcgattctaggagagtccagtagcagaaactagacgcatcaaaagcgaaagtacacggtaaaatgcgaaaggaaccccaaaagaactgcataaggcatattggaggctcagggggaccaggattgtttgcagatgggggatgaagggggcggcttggggctgagccctggagctgaggggaagtgaaaccgtgttgggaaggacggctgagggccgtgctcgctgctgtcccgcagcaccctccaccacccccacgtcacagcttccccatttctaggctcggtgactccactgtcaccgaaggggcagccacaggctcccaacccgccgctccccagccaggtcctcccgtcacgcccccgaatgagcgatgctggaagtccgtccccctctgcccccgcccctggcctgctccagcctcagcccgcccgacccccgcgggtaggagccaaggcctcggcccagccgcccgcgggcactgccagttcggctgcaaacacacctgatagggcggctctgacggcggcgacggaggcggctcccaggactaagctcgcggcctagccttacggtggcggcggccacacccctgactgggctggggccctccgcgccgccccgtgactgcagccctgcttgccggccaggccgcggggccgagaggcggggcaaagacctgactcgggaagccggggcgggcgccgggttcgggctgggggccacctccggaacgcctggggggttctcactcgccctccaagggcgacctcagggccacagatcggccggaaggcttctcagcttctgggctgtggctcctgttagaaaattgagtgtcgccctgggtcccgagcccctaggcctgactccttcgtgcaggggcgtcgccttcagactgggtggtgcgcaggccagggccgcgtgcttttcagaagcgcagcctcaggcgaggcgggcggcaggggcctgagaaggctcatggcttggcagaagggtcctgtgcttcagtgggtgcccgtgcaggtggagaaggacggggctgcgaagctgaaaggaaaacgtgaaaggtttttgtgtgtctctgagcctgagtaaaggccatgctttctgagctgtcaaacgcctcccaaagggaagagattattaaaccgttttcccaccctgccaggtgtaggattgttaggcggtgatgatggaaggcagagatgacccgaactgagagatcagaaaaagcgttttctctttcgtttgtgcctgaattatatgagggtgcccaagaagaaaggagactcatctgattacccggtgtggcttatctcaacaagtcacacgcattctggtcacagagtatgtgctcagtgttttcaatgctttatgttttgataagtgcaaattcctttgtttaacgaaactcttatcaaatacaaacagttatctttgtgaaacactgagcagttccagtctctcctcttaactaaaaaaaccaaacagaacttttaattagaaaagaaaagaaagaataagcacatgcctactgggaaaaaaaaaataccataaaatgtgcaaagtccactcaccttcggttaacagtccctctaaaccttactagtcctgttgcccactgaaacaagtgtgaactctgaggcattggagggtccacataaacatggccctggcccacctttcccgaatcatctctcggatgccatatctaaccccactgaattacttttttctcaaactatcaagggtaaaagacaagtttttattatttccaatctgacatggaccattatttctgtaaaatacaaatcaaaacctgctagcaaataagaaaagagacaaaaactacaagcccagtttttattacaagtgtacaatgagtatgccaaaaagtataaaattagtttttcaattattggttgttgttgttgtttttatttctaaatgcttactcacaatttctatacttacctgttcatggagcagtaaaaagctgttcactgactggcggtggttggattaccgtttaagtggcactgacttgctgttctttaattatgtcaaatgcttttcaacttctgggccttttctcatgtttaatgtgaacgaagttctttcccactcaagtttcaactcgtaataacaataaaagcttcacatttattgagtgccttgtgctaagatttttgatgcattaactgtgaattcttatttgtcctatgagctacctattattatcattattatttccccccactgtacagataaggagatggaggattagagaggtcaagtcacaaaaccagtgaggtacaaagtcagcattaaactgagctggcctgattctggagcccaagcaatcaaccaacatgctgggcccctctctgtgaaacctcccccatttgctttcaagttgaaattaatcactcttgcttacacctctactctaacattttttcccgttggttttcattcatgtcagcttcccacgctaggctttaagcttctgagtacagtgaatttgtctgctcacactaatcacaggaagcagagctcattcgcatctttgcattaccactatcttttatgcttacttcatgatatgttttaattatttattcttgtcagcatcctctactaaaccatacaatgttcagagttatcttaccaaagat

SEQ ID NO: 587334 - DNA, 4001 bp, Homo sapiens
ggactacacacaggccactatgcccagctaacttttatattttatatttgggccaagcacagtggtgcactcctgtaatcccagcactttggaaggccaaggtgagtggactgcctgagctcaggagtttgagaccagcctggccaatgtggcgaaaccctgtctctattaaaaatacaaaaaaaaaattagccgggcgtggtgtcacacacctgtaatcccagctacttggtggagggtttagggagctgaggcacaagaattgcctgaacccacgaggcggaggttaaagttagctgagatcacaccacttcattccagcctgagtgacacagcaagactccgtctcaccaggaaaaacaaaaaaaaaaattatttgtagagatggggtcttgctatgttgctcaggccagtcctgaactcctggcctcaagcagtcatcccacttcagcctcccaaagtgtgggactataggtgtgagccagtgcacccagcctgagattcggttacaggactcgccgtggcttcagtcttggtgggtgtctcattgtgagggaggctgccatgttgtgagctgccccagggaggggcccatgtggtgaggaactgcggcctcctgccaatagtgtgttaggagcagaaactccagccctcgtcaagccttcagaggacaggagccctggccagcaaatacatatgtatgccggggtaggtgcccaggagggttggcctcctttggcctgagcttctgacccatctgcctgctgggtcagcccctattcacaaccctcttgtggctcctccctgctttgtggagaatagtcctgaccacggcctacctccctccatccccaccaccacatccagtctataccacggccacactgtgcatgtctctccaccctcaactgctttgggcctgtgcacaggctgtttcttctgcctggaacaccctcctctcaccatccctgggcctgggtaagaggtactcctcccttcaagagcaatggagaaactgcctcttgcaagttgctttcctggaccagctttcaaccctccggcaaccaaaacaccactgtatttcccaaacccttgaggcgtgtgccccactgtaccaagactcctgtcaacagtctgtccccatcctagacctggccttgttccttgtgctaccaatgtccttcccccgacaaactcccgctctgcctcagacaggctcttctgatcatgcgactggaaatacacagtctccttccttcactcctttattcccgcagcagcacttgctgcaggggcaggtgtgtttatttagatgttccccttccccaagtgtctgcaggtgtggttcacatggtatctctgctacccagcgcacagtgggcgttcgctccttccgaacaacttgctgaaaaaacggaagagcaaacaagacggctagggcagcgcgcccttcccggtggggtaggaagggaggcagaacagggtagcagctgtgagaaaggatctgagcacaagagattcagggtcatgtcctggctcctcaggctgaggaacgttaagcaaatcactcaacttgtctggggcttggctcttccatctgcaaccgggggcggtgagagcacccacgtcgcggacagccgggagggctcccagggcccgacctacctcggcgtcgcggttgaggcggtacacgtagagctgcgaggtcccggccactaccaggttgcgctcgctgttgttgaagaagttgcagtacatggagaactccagaccggtgggcggatgcgcctgtttgtacacggcgtacatggcgccaacccgggctgcgcaaggccgggagaggaagggtgagcggggtcgcccacgcaggagcccggccccgcaccgcgcccctccccggcctcgcgctgccgcctcggccgcccgcccggccgcccacctggcagttggagccgactcgagaggaaccgggacagcagcgaactcagtccggccgggcccagaagctgggcgggaaggttccgggcttctgcgcctgcgcagcgccgccgcgtgagcgtggctgcaggggcgacagcgggccctagtggcccgggatgcgggcggctggcggctcggctccgggctgggcgtccggaacccaaacccctagcgcgcgaagtgcggggcctccgctgcgggcggagcagcgcgggttggaagccgcaggggcgccggctgcagcggctcggggtcggccggggggtgcgtccgcgccagacccaggacggctgcagggagaagcgactccgctcgtagctcccgggttcagggggcgcgccggaatccagaagagggggcgcggcgcctcgccagtgtctggggctccgagaaagcttcctagagaggccgcacgccccctctgcccagtgtccccgcgcagagcgacccccgccgccaacactcccgcggaggacgcaggaccccgcgagcccagcgctgtccgcccgccttgctcactgctgcctacccagggcgggcccagtgccagcttccgggagcttggatcctggatcaggcacgggcctaggacctagaaacggaatcatgagaaataaaacaagaaagtatcgttacgcccaagaaaatggcgtggaaatatgtgtttttgttgcatccaaatctacttgctcattgggcagtgggggaagggccacttggatgctcaggcgtgtgacccctgagccacactcaaccgccttttaaaagtcaataggaggcggtggctcacgcctgtaatcccactttggaaggccgaggtgggcggatcacctgaggtcaggagttcgagaccagcctggccaacatggtgaaacccagtctctactaaaaatacaaaaactgtgggggaaagagagagagatcagattgttactgtgtctatgtagaaaaggaagacataagaaactccattttgatctgtactaagaaaaattgtttttgctttgagatgctgttaacctgtaactttagccccaaccctgtgctcacagaaacatgtgctgtaatgaatcaaagtttaatggatttagggctatgcaggatgtgccttgttaatatgtttgtaggcagtatgcttggtaaaagttatcgccattcttcattctcgattaaccagggacacaatgcactgcgggaagccgcagggacctctgcccaagaaagcctgggaattgtccaaggtttccccccactgagacagcctgagatatggcctcatgggaaaggaaagaccttaccgtcccccagcccaacacctataaagggtctgtgctgaggagtcgtaaagagggaggcctctttgcagttgagataagaggaagccttctgtctcctgctcgtctttgggaatggaatgtctcattgtaaagccaaccattcccttttgttctattctgagataggagaaaactgcctggaagcaagaatgctggcagcaatactgctctgttactctttcctacactgagatgtttgggtaaagagaaacataaatctagcgctgctgctctgttactctttgctacaatgacatgtttgggtaaagagaaacataaatttagcctacgtgcacatccgggcacagtacctttccttgaacttattcatgatacagattcctttgctcacatgtttccgcgctgaccttctccccacttgttgccctgctacactcccctcgctaagatggtaaaaataatgatcaatactgtgggaactcagaggccggtgctgatgcaggtcctccgtatgctgggtcctctgggcccactgttctttccctatacttcgtctgtgtgtcttcttttctcagtctctcgtcccacctgatgagaaatactcacaggtgtggaggggctggctcccttcaaaaattagccagggtggtggcgcatgcctgtaatcccagctactcaggagactgaggcaggagaatcacttgaacccaggaggcagaggtt

SEQ ID NO: 587335 - DNA, 4001 bp, Homo sapiens
ctcacaggtctacattctctttaaaacaccactataaacacctggaaacggaaactaaacgtagacaaaacgaataacattgtgttgctgctgcacgtgaatacactttgtgcatgctaagtaaggggtataggctctctccctctctccctctatgtttcaagctatataaaaataaacaaatggcataagagcagcgctatggtacagaatactgtatttttttaaattttttttgtgctaaatgcagattctttttggccaaacgcaccgttttatttcccaataatctccatgagtttcctgttgctgtgagcttgctgtgctaactgctcggccctggccatttccaagacttcccggaggaggtggaaggtgagatccagggagatgggaggctcctcggaccgcctttctctctccggtgcctcctggtggccgccgagggcattcctagcgccgcgctccgcgagagccgcggggctgtcgagcgagcgccgaggcagcagcagctgctgcagcaacacgcggaaaaagttggcggtcgcctgttccggcgaagggcggctgccgctgcctccggcgaggagcgaggaggcgggcgaaaggggagcggccgggctcttgttgaggttccccaggcggaggaagtactcctctcccatgcggagcaggaccggccgagcctgcggctgctggggctgctcggactgcggcggcggctggaagaaatccaagggctgagggtgctgcggcgcctgccgagctcccgggaccggcccgcggctcaggagcgccctgcatggcgggcagggcaggagagccaccagcaggactcccgcggacacaagcagcggcagccgcatgttaggggcactcgctgcggcacagaggtgggcggagggcggaatgagagaggggaagagagaaagaaagagttggttagagttcgctcagctgggaggtgcacacggggtcttcctacgggactgccttagacgtgctgggctttggcctcagtgattcggatgggcgctgtccgcggtgctgaagcgcctggggagcggggaaagggggcgcctgcagggctccgcacctaagctcatgcgctcaccggccaggagtgacccttctttctagactctgaaaggacggtccctgcgtcctcttcctaacgatcctcaaaactaattttcccgatcctagagaagagccacagatttaagatcccacccgcgctgactacctcccttccggatatttcagcattttcttccaaattgagaactactgcctcatggtcctccctctccacttctgcccttgctgccttatctcgggggttaggatagaagggggtgggggagctcctttacacagccagcaaggagcaactggcagcacgggtaacgaagagcagccgtctaagtttgcttttgccacatcccagctactattgtaatcttaaggaatagtccgcgaacacgcgcgcacacacacacgcacgcacgcgcgcatacacacacacacatacgcatacacacatgcatacacacacacacacgcacgcacacacatgcatacacacgtacacaggcaggggcagccggctccgcggcgcacatcgcggcagctcaggcaacgcaaagttggtggcgtgttccgtccaggcgctccctaccttcccaggcgcttcgcaggtgagccgggtgctgccgcctctctgcagagagacgtctccgggggctttctctggaggttgtcttcctttctctttactgttcccactctctttttctttctctcctctctttcccctcagtctctcaatggacttggtctctgagtttctccactccagagcctggagtgggattttatagtgtcgaccctcttcaaaaaccacgcagcatttgcctaataagctgacgctctcttgacagctcgattgcgtgctgcctctgctcctgcataaatcatagggccctgccaaggaacgaggggcagaattttgctatctcaacactgaatctcacatccaattatatcaacagatatttatcgcctcttggtgacgtcaacgagccctaaaatggaagggcttcttatgacttgtccattgacaaaaattcttgaatgagatttcccaagtgtgaaaacatattgacctcttactatgaaaggccatattaggggtgtgcaaagagacagcgaatgggaggaggaaggggaagtgggaaggaagtgaggtgtcccagtgcagccctgccaggaaagcagcagccagttggagggggtggacctggatgccccttctcctaacctccctgaccaggtgtctctgacaacacctcagtatctggaaatatccctttgctagagacagagtcccaccatctttctgcctggaaaagaatgaagcatcaggagaggggtgtgcaggaacatccagcttttaaacgtctatctgctttttcctcccaagagcaagcacataaaggagttatgagcctgcagaagcaaggccaataaatctctcaaaatgcagttcaagttttttagatgatgacaagagctactcccatagtgaaggggcacaaaccggggttagtaaggggtgcggcaaagattttaggttatctcagaaactctctgctcctttttttgtctctcttctcacaatctaaaattaattgtggactcccttttctattcccaaattaaagagagaggcggccagtgagagatgcatgagttaaacaagctttacttattctactgaatgcaaactcaatgagaggcatccattctaacttcctaatctatgttgaaaaaggcttaaactgcttgactacagggctaaattcattagttacatgttttcattggtcaatattgagtctgtaaaaaaaaactcgttcatttcacctccaaatactatcaacatccataatagtatccacatctgggccacccagggtggttctttttaattatttctttttccaaatccaaatgtgcttcatgtcagcctgttaaataaataaatgctctctgacatgtcgcagaatggaatggaatgctaagcctgtaaaactatattcaatttttgattaattgacactatcatataggtgggaggcagttacctctaattctgcaattcaaaatgcaattccaagttcttgtgcctgtgattcaattcagcttccagataaccatcagagttgtttatcggaaatttcctgctcctcatttctgattacttctgctgcttcctttgtagctaatgtgacaaatgatgcaatgcatatttcaacttccattttgggtctataccaatccacaactgctcttaggaacaaagggaaggcagggagagaaatgttgacagtttgcagagaagccagcccatagttggatcactgcaccatgttatgtacttttgacataagagaacagagagaatgtgcctacttggaaagatgtgagttgttaatagaagatcatgattatggaaaatggttgagtttctgggagaaagctgtgttttatattggtaggaaagcacacagaaccttagattttgttattgtgggctttttttttttttattaagctggaatgggttcaacatttttgcttactttcctttatgaactgttttctgaccctgttagcagatttcagcttggatgtcaatctggaggtgaaacgttgacttggaataggaagtttcagtgcagtaaatggacacagaagataaactaggaaagggatgtggttatgagtttagctggggaggtctgggaggttcttccagagaagacacaacaagttttgggctctgactaaacccatgcccatacaaatctctctcccattgggctatctgggggatattgttttagtatagctccctcatcactgttgagtccttgctgtgaggttttcttggggtaagtcattaatagagccaaagtggctccaactagggagta

SEQ ID NO: 587336 - DNA, 4001 bp, Homo sapiens
atttaagacaacatgaattacaaaacaaaggttggagtatgttactcctagctttgctgtaaattcttacacaattaactaatttaagacctttgttaaaaacaaatctgagattcatttccaactgaagcctccaagtacccctgaagttcaggtttcactaacatacatatatatgtaaaacattttttaggtcaagaaaggtcaagaaactcaaagtttggaaataatttgtaataaatgtttcgctttaaaaagttagactaatacggtcatattacctcaaataaaacgtttcatcataagtaagcagataagaaaatggaatagtgctatgatgctcaagtctgccatgattcacacttgacagaacaaggttgtttccaccatttgggaaaatctgaccaagcctaaatatctccataattgaggcttaaatcaattcacacagattgtgactgccatttcctccccattgaatcagctggacacatattgtcacaacaatcccttactgataagggtctcaccatattcccttccacacaatgacggtaacttctaccaaatactatttcaaaacatacctcttttaagaagctttactgttcactgctttactctgaaattcttcatgatttatatgcagtttaaaatatactactttgtacttcttaccatactgtgacttacatcttgaaaacagttcatcaagagtcttggcattctgatcactgtatctcctggaagatcctatcctgaacttcagaggggttctggccacccccaaatcatgagacagagatgtcagtaacccagtgcaactcagaaagtcactgaaatccagtgataatttagccacctgtcatgtttattaaagaatgagtttgcactaacccaaaatgaatgtttgccctaagccaaaaggtattctactatttaaaaacacaaaattttgttttatataaaattgtgttttatgtaaaattgttttgcataaaataatttatgtttaaaatacacaaaattgttttacatgactttatatttttattatgttttacataattttatatttttcaatagagtacttcaggatatgtaaaatattttacatatcacatcaaacttgcaatgatatgtaattatgtaaaatattttagtgaaaagctttcactaaaaagaatgtttttgcaattttctaataaaactattttgtcaagacagaattcaatcctttttattctgtccactttaaattgttgttgaaaatctagtcatcttttcattttttttcattcatcccattttgttttccttccagctaacataaactgagcttagggcatgtgtcagccacacaactggggaatgcaaagattaccatggcacagtcccttcctacaaaggaatgtgaggctagagaaagagacaaggatgtaaacactgcaagcagaggcatgtaaatgaggctatggaagtcagagaactgagtctgggggcacctaactctgtatggagggtttagacaaaagcaggttaggctctaagtgagtcttaaaggaagcagaaaggagaaattcattacaaagaaaacagggagggcaataggcattctcacatctgcaaagggcagcaggcttggcaagatttgttcagcatcaaaaatctcaaggcatacggaataacatggtagatgttcatgtgagatagcactgctttgtatttgttcaggttgtactcacttattcacagtactcttgatttagcagacctcttggccttttctttccacacaggagtttccatgttcttattccatcttccttcaagagctgcccctctctcaacacttttatcatttgattttccttctctggacaacatctgatctcattcattcactatttcagatacagatttgacacgtcttgaccaagcataagatatagtttcatgttttattaccagcagcacctttactggattgtccagcgttctggtggttactttgtattgtttgagttgctatgacatacaggggacattccagaaacagtaactcccatgttcactcctggtcttgcctaatagctcattatccttgtatctagttgctgccttccaacccctcatacttactcaactgaaattctacttcctcccttcttactcatatggcctttaaggtttattctgtcggtggctgtatttcactttcactatccagcagaattttgtcattaactaattttgagattcatttcccatttctcttccaattagattgacttcaacatttggccttagaggagagaaaattattgttcaaacttctccaacattgtgtattataagtactttgtaaaaaaaaaaaaagaaaagaaaaagaaatttcattttcctgccttaatagttacagttactaccttataaaaagggaggcgaatgtgatagttgaggagggagaaaataaagaacctgtattttacaattattcatgtcccaattcaaaccccacttcctccaggaaggctaaagccttctacttaaaatgaggttgctagaacagcggccaccacatcacctggggtcttgttagaaatgcagaatattggggttcccaaaactactgaatcaaaatatgtattttaacaagattcccaggggattcataggcacattaaagtttgagtagtattagactaaagcacaccttatttctaccctccaaaatcatacctacttgctttgccatgacaaaaatatgctttctatctttaatatcctgctaatttcaaaatactttttggcttaaaacttaaaatataaagcatgcatggcttactaaatagactgtgtccttgttcaaatgtttgccttgaggtttatgagctgccaatatagaaaatctgctgtcttttatgtatgtatgtataagtagttgacttaatcacaccttattgattctgttaacaagtcaaaagaagaaaaaagtaacctttgccagatcagtttcaggttcttatttttagccagtttaataacccagtaatccaagttacatatttgggtcaacagttaaataattttcattatttagattcctgtacaaccatctgtacttagcattcaatctgcaatatgagccccaaacatgctatttggtatgtatctgtacttgatccatattatctaacatctgaatacttaaaaagttaatccgttactaacatgtctttgattatctcgttctagtctccagatgttgcctagtcaaatgtctccaaagggcaagcaggagacaccatgtaaagtggctggacagagtggtgtgaccaatggcaaatcagagaagaaaccactactttaaatctctgattcctggcaataccttgaaataatatagtaaacttcttcactgctattaaacctttgaactttactttttttttttttttttttttttgagatggagtctctctgttgcccaggcaggagtgcagtggcacgatcttggctcactaaaacctccgtctcccaggttcaagcaattctcctgcctcagccttcccagtagctgagactacaggcatgcaccaccatacttggctaatttttctatttttaatagagacggcatttcaccatgttgaaggactggtctcgaactcctgacctcaggtgatccacctgcctcagcaaccaagggctgatattaccggccgtggtatgagccacggcgctggactaaacctaagaacttcaaagcatggtaaaacaggttaatttaaagcacttaaaaacttcccatacatttgattccacaaatatccttaaggcaatttctccaaaactactattttttcataatgtcctatcctcaaacccccttctttcctgccctctcaactcagctgatgatcttgacagttcactgtgtctggacaaaagagaagctttcacataattcccttctgttttcttcattaaacgctcca

SEQ ID NO: 587337 - DNA, 4001 bp, Homo sapiens
acttagtaggaacattgcatctaaaggcatttcgtcctactctgaatgtcaagagctcttagaaacaaaaggaacattaataaacgaatatgcagaggaaaataccctcaaagaaaatcttttttcaacttcatataaaataaatgattaaagaacagcatgaagactgctgactgaaagcatgaataaacatttcttttgtacataccacttgaaaaatgtccttaccatatactccatattagaggctgttggatacacctgacttcgtaatttattatgaaggtccaaaatactctgcatgtcattgtctgtgatggcccttttccctcgttgtttggctatccaccactcaccatcctcatccatgtatttttccaaaagtttctccaataaagtggcattgggaaccaccatggctggaattgctctagccatgaacagcactgtggttactctgagccactcccgcgcggtacacttcataatgaatgacctcaggatttccccaggaaaatctccaagacaggctcttccactccttttggctataacgacatgtcatgtgattaagatgaaaattccagcagatatgaattttctaataacacgagcaaaacaacagttacaaaggaagtgtgccagtttgatttgtctatttaacagcagaaaatggacactcacattttgaaataacttatctccaacccattttttttcttccagaggacttttcacaatgcaatttccacaaactagacaactgtattatccaagataatacccctgaggccaaaagtaaatggcaaaagtagcctagaagagtcaaagcttgaaaatactatgtgaattgcaagactttaagtggctatacattacatataccctgcaaaggatgttatatctacctagaacgtttgatttcaatctagaggttcatgtttctctatgaagagttttaaggtgtgaatattttatttggtattattttattccagtggcccatctctgtttcacactcagaatgtccacagcattctaaaattgagagtgaatgtttcaaagaaatacaaaaggctattcatatatgcatccatggctacatctagggggccccgtgaactactgcaaatgaatggtttgggttcctggggtaagtctcttcctattcaggctcaggtcaagaactcaatctttatttcctggaaagtctgtgactaatctgtggcctgcacccgaagaagccagcagctccccggcaacttgagagcttttcctctcaagtgtgaaggcacacactgttctttctctgaactcaaatggaaagcgcgcgacagagaaagtaggtgaaaccaacaaagtcacttacaagaactagagctcccgctaatttctatcgtcgctgctttccgggtagcccacccacccatcgcgcccaaccactctgtacagttggcttttttttttttttaagtacagtttaagaaggcaaagggagataggaaagggtggcagcttgacgactcagcgatgcattttagaatcgcccttacctctccagtgtgaagtttcctgggagaggtgagccaaaccggacggccggcctctgcagccgcccagagccttcacaagggaccgcagacggagagccccgctcgcgaagggcctgagcaccgagcgtccgggggcgacgtgggtgctgactgcaggaatacgcgagcctccgcctctgcggctccctcaacctggaagaaatggcaggcaaagcgtccaaaattagacctgcagttggggtgggaagggagctgcttcgttagtctgccagggtgggcgccccagcgtttctgagcagtagctgcaggagcgaggggcggggacacgaacgaggctcggcggcggaggctggcggcgacctcttgctcctgctccgtacagccagtacgcgcagaaccaggcgcctagcgcttccgtcgctctctcgcgttcgcgagcatttattgcggccccagcgcgggcacgtgacttgagcgcccctcctcgcccacccccacctccaaccagccgtggccagaggcccgccagatccgggagaagcagcccgccctgcttctccggaacgcagcgaagccagggcgctcggcctttgtgggcgtgctttgggctcccgagacccaagcccggaaggtctggcccctggtgggagatgtgtgcaaggagggccccaacccccctcagtcctcccagctcccctgcattcaaagatcctcctcccagtcagttcctttctgctgagatgctgaaatgcctttaagggtccttacagacgaggggctgccccatagagcatggagtgggtgggggatggggataacaccttcaatcttggaggcacaaaaggggaaataggggacgaaatggaaaaatacttttccttttatttttcccaggggtccgcatccttgatgaggaccagatggggaagatgttcaatagaatttggggtcaatatgtgactcagaatggcctgacagttgagaccccctctttattcataaaatatgaggcattgtcttctcaaggtggccatagcacttttttttctgatgatgtatacatttaaggagttgatataaagggtaccattaatttatcagggattgttgacaggaattgaaaccccagcgctagaataggtagtgaaaggagaggccgttcctttgttcatgttgtaatctggggtaagaaaattactaattttaaattcacaacagcttaccctaccaagtgtggggctgttttttatttttatttttaattatttaatccatctatgtttgcttccctaatgtggtgaatcatagtctcaattttccttctttctaaatgctagagtatctagcatatgatcaaataaagtacaatattatggtagtaactcaaatcatcccaagctgttgcctgtctctttccaccattcaactacaccatatctatcaaacctaaaaactcaactctaagcctcagctggaggtgagaccttgcttcctgtcacaaagaaaagggaagcatcacttattagaaaggtgcagaaggtgaaaagttttgatgcacataagacttttatagaagtgtaattttgcaattttttagcagttttaagtacaaaaaagttcttaactttgtatttttcaaataactattcataatttccatgcacagggttgagaaaactggctttccctcttagaaactgatagaaaacctccaaagtttatggtaaaagaactatcatttgttacagcagatgaagactatgtttttatactgcaatgtccatgtggcattgaaaagtatactgaatattgaataaagagccatgaaagtaataatattacttgaaacatttgcaaagagaattcaaattaggaagaagggaattaaaatgatagggaagtgaagttaaatgaatttgtaactcttgaatatttcagttataaacattcttacacaatgtatgaatccaacacctaaaggctcacattaaagaaaataaaaattgttttaggtctttaattccaaatctttctctaaacaaggaaaaaaatcctttgactcagcatttcttttggcttccaatttgggtactgcaggtgatttaagcattcatcatgttagcatttcaataatacatcttgtcattcctgattgagtatatatgttggaaatgccattttgaacagtaaaatcaaacacaatattcttgaatactcaaagatgatactgttcacgttttttatttgtagttgagaaatctgtgtgtagacataagaaaatgtcttcttcacacagaattcacgtaaaagtggcactttggtttgtggctaaggctgttacttgtaaagccctggttgtttttagcattactactttcttgtggcaaacactggtggttgcctaaccaacaaccagccttccacccctttcttccttccaagcccata

SEQ ID NO: 587338 - DNA, 4001 bp, Homo sapiens
tacgcccttcaagttgaccctgaattacttaagcctcttaaccacttgactttctacttaggaaaggatttgggaggaattctccttcagttatttttgtttgtattattaactttcagccaaggttttttttattttttctattgttagtaactgaaatacagttctttatgaaactccacacaccctcatttaagtacagggcagttcattaatgcaaaatcaaatcattaactactctggcttccattattttatcttaatagtgtgacaaaagtttttggaaaaaaaaaaaaagcaaaaccatcaagcaaacctctatagacatttgttaaatgaaggaggaaggtgaagggggctttctgaagatatgtatatgctgagtgcagcttacctattttcatttttatgcctattgaattacttctagaaaaaaaaaagactctctgctgaagcttggaaccatatatacagcttcctgtttcataccatcgcatgtcaacattaatgatattttacagtacttgttttattttgtattttttaagtttagtcttatcagatgtaataaaacatcttattgcatagaaactcaaaattactggttacaagagcagaactaaaacaacattccagagattttcatttgtccccggactaaaaccaagcttccaatccgtaagggcactattctcaaagagctctagacagtgtccctctaagacaccatatgtcagaaagaaagctcattcttcaatttccaaaaccatggtatttaaataattattttctagcaaagtcaaaattagagtacctatttgatgacagggtgactattttaaaaagctcagtattctgtcccaatttccaatgggagaacaaatgtccctatgtaagcgaactgtttcaaaaagatgtagctcttccagctctatgattggtttaagtcacttgccactctgagaagagataaatccttaaaaagttgggaaagttagatgtagatgtagatgttacagcctttaaaaagtgaatgaaaaggattcaatggagccaagtaattgtattattttggaagaagtatcattctcttgaagtaataacttgttactaatcaagctattgacagtagaatgaaatttcatacatttcaaacacatccagaatattgaacacaaagcagaccatgcaaaggtttgtttcttgagtgaaaatgctcacttacctgggggttcaagaagggaaggttaggaggtggctacatcattgctcctctgggtcaaaattaccttggcgtctttccttgaaataggaaggcagctaaaataaaataaaaacaaaaggcaacccttgtaaatttccatgtcttaaatgtatgtggtattacaaaatgggaacattttaaatcacttagtatataaaatacaatgcatctgaaagtattaccccaaaaagcaggatggtatttgttctctccctgtttcaatgaataaaatgcaaactatttgtttaaaaaaaaatcaaggctttaaacagtgataaccatgtctaaaggtgtctaaaaatgaagctgaacattttcatgtgaaaaagagcaaatcaaaaaagccgatctcgcaggaaagaaacgtgcccagctgccagcgagccgcttcctaactcgcagctctgcttccaatgctctgacagcgctgaagtcacactggggtttccaggttggggtcaggagggaaagtgctgcccccctctgcaaggactgtgttcagcgccaccacttaaaaaaaacggtttcatgaaatgaaatgttaaaaaataaaaaatttccttttttccccagagaaggtaagagcgcacacgctggaaaacggtgggagcagggaggaacgaccgccttcccgaagcaccgcagggttcgccgcacaacgccgctggtgaggaccgagcgcatctgcccacagcgccccagccgcgcctggagcctcccgctccccagggagaacggtgggcgcgtcccagggaacacgacacccaaggagagggcgggcgcgagtcccaccgggtgacccgctccctggggggcgtgaagcccccagacctgccctgcccctgcctggagattgcgccttgcagggagtgacaacgggccccagccgtcccttccttttaggaatatcaatggaggaaaccgatgtgtcaactagataaaagcagaatgggaaagaggtgcaagcaaaatactctggaatgaagggcaaggggaaaatactctggaaagggactaagcccttccagttaatttcatgtcaataatgttgtcttcaattaacgaaggcacagtcctccttcccgagttgtcaggatttttatcccatctgtctttattattcgaataacagcaaatatccatctatatatgtatttgctatttttatatatatatatacatacatacacaaatatattcatatatacaaacatacaatttgctattactgtgtgtatacacacacacacacacacacacacacacacacacacacacagaattgctcccatttcacatgcaggaattaaaaaaaaaaaaaagtagaaagaaagaaagaaaagaaaaacaggcccagaaagcgccaaaggaaaattgctaagtctcaggtctaaagacagctggtccccagttcctccatggggatggcctccaaacacctctccaaaggttttctctgactcactgacatgaacaaagtcagctgaagtgtgaggtgtatcactatagaggtttagagtctattttgtacccacccactctcaccccagttcactgtgggtttactgttggagagggttgccgactgcctagggccagctcttggccccaactcggtcctctactgcggtgcctgcgcggctcccaccacccacttccgcctctgcctggccaatcaatctatgtctacaccaaattgcagttggcagcaacgcagcaatgcctaagtggaataatcacttggacccgaatctgagttgttttctgtccccgacaacaaataatgttacttcagcgcctgcaggccaagagttgaaataagcttataatttggcttccaatccatctcacattctgattcccaaccacttaaattttcttttctgtgttttagcttgcaggcagcagatctggaggctccatcactggcatggtctttatggatatccttcatgaatacccttggccatctaagtaaaaaggggggaaatctacataatccaaaaccacacttgttttaacaatgaaaacaaatagactgtcagctggtacctccacataatcattaataatctaatttgtactttcttactccagcaacttgaagaactgttcacagttttctcatctacacacagtaacatacatcgagccctggagtgtgtggtactagcaataccaaactgcaggttcggagccacggcatggctcagctcctccctctttttccagtgaaggtacttattaaaagtctgctcttcagctctggaaagtacatgtctccttagccgttccaagcatcatattcctccagagaagagtcatctcaagctagtaactgaaaaatgaagagactagaaggcaaacccactgccaagacccccttggtaatcagggtggaaggggaatagcatcttggaaaattccaggaggtgacctgcaggtatactaccagctaatgagaagtgggtatgttcaactggacagacgctctataggaagaaaagagaaggaacatcaacagcacatccataatgtgtccatacaccacacaagctatgttacacatgaactcattccaaccacaacaatgctatggatatgtgcattaatatttccactttacaaacacagaaatgaggctcaaaggtgttaagtaacctactaggctcatacgtggtgaagtcaggatctttctaactttcaaaaccaaactctacaaaggaaagcgagcctt

SEQ ID NO: 587339 - DNA, 4001 bp, Homo sapiens
aaaaagagaatagtgcaaattttaaatacagtataacaactatttacatagctcttacactgtgttaggtattacaagtaatctaagaggtgatttaaagtagtcatgtgtcaccgaatgactgtgataggtctgagagatctatcattaggcaatttcatcagcacgtgaacatcaaaatgtactcacacaaacctacacggtattaggtttttatttatgtatatgttttcacatggaaaaacaaatatcccagaaccattactgaatatcaaccatttttcctacttgatctgcaatgccactatttagtgccatatgtcaggtttctacatatgccccattatcttatgggaccacagttgtatatgtggtcccttgttgatgaaaactgcgtgtgactgtacagactgtatacaagacgatgtgtgtaggttacacaccaatactactccatgttatacaagggacttgggcatccagatttcagtatccccaaaactcctggaaccaatcccctgaagatatgaagggacgaccttactactatcacaaggtcatagaagctcattgggatactaggaaagcatctcccacctccctgcagagcccccactgcccctgccaagccaccaacaccaagcaataggaagaaattcacagcaaggaaaggaacagagtaagaatggaaacagtagaaaggcaggaattggatatgtgtaagaggttgaggcaaagaatgagaactagaccagcagatccataaatgcagcgggagagagaggcaaagggggaaatggtgcatctgtccttcgcgcccccatccccatcgctggctcctccatcacagcagacttctgtcgccaccagcacaacattaaaaggaagaactggggacctagggacctgggaggagagaggtcagagcagatacaagacaagtctcctgggtctgcatcaggtaagtggtaaatctgcaggcgacatactgcccaaatctaaaaataacaaacagacatttctaaaaccataatttggtacgtccaagggttcctacgcttgaagtgcctgacctcggcacttgcagcacctcatctggcctggatgtgcttccaagttcccacttgctccctcaactcctcccatctctgtcccctgccctgggaatgccaggctgggccagagtctgggcccgtgccctgagcaccatgctcagaaggcactgctcacaccttctctagccacaccatgtcatagggcagagttcacagggcccccaagacatgttcacctggacaccaccccaccttctgggtcacactccaggtctccctgggcctgctgctttacctgccagtgtccattttctcaagggtgaagcacttcaccagtttgcataagagaggttgtctgcagaggtgtagacagacttgggacctgtggccagggatgtctccctgtaccacagaaagattttggacaagaaacttgaggagtctgagaattctacattggagcctggcttccaggttgttgtgaaggtcgtgtttatttaccaggatggcagtataggacctgatttttagagagcttgacttagaacttggaaacagctacttagacacatggaatgtgagcctctgtttgtactcctgcctcgggtccagcaagtgttaggagcgagcctgtctctcctctccctgctttgggccgctaggcaatgtgcccagaaggtctaatcagagtgtttgctaatgagttggcaagctcacttacctcccttcctagggctcttcttaattagaaacaaaacagctcccagcactccccaaacagaaagttgcagcaaatttcacacccaataaaggaaacttccctctgccactcacccacacacgagatcaaaaagatgacacctgttgtcacccctgcccggggacgtatggtctttcccggtctttgctgtcagtactctactcccagggtttccacctaaggagagcactcactgatgtacactgggacttcagagcccaaagattgtgtaaaatattcaggcaacaacagccaaaaccacaaggaagccattgacacaagtcttgggttactcacctccgtgcaattcggggccacaccaatgcacagcctgagcaaggctgcggatcccagaacaagcccgtctgcccaagtttgaggtctggttttaagcagcctttccggccagcacagataacactatcctgttctgcaatcagggccaggacactgcagtcagcagccctcacaggtccaactgcagaccgctgtcaagcaaccccatgaccatatatgaaatcccaattacctgtacttatccatcgctagttcacttcgctgcagtccttcgtaaaccaaagagcaggtagaacgagttcaccctgaacacagcatccctttaaatgaccctggagaccgtgatttgccattgccagacaggatggacgggaacagataggcaactgtgtgcgatcacaggacataatggaatgaaatgtcagatcaggtgttaggatttgatctgtgctatggttcaatctgtgctacagagttcacacttggtcaggcttttccacgatgtgtaaaattctacaaggtctgtgcggcatcacctttactctactttgctcaaccacgatcactgtgattaggaagcctgcctatagccacatgaccctcgccacctcccacagcctgggggccagttgtcatggcattttatcaggatcttggtcatgagaaaccactctaaaaatgggtttcagaaagtagaagcaaggcaaaaaaagctctgacaatttaaaaaccattagaattactaagagtttggtaaggtgtcaagttcttttaaaaatagcctttccacacaccaatggcagccagttagaaaagattgtggaagagggctatacagtccctttcgtaactgatattaaaaataactacctagaactgaacattaaaaatttgccaaaaacacacaaaaaataccaagcacatgaaaggaaaatggaatagacagaccatatacctggaaagtaatttattatatagatctcaagtctttcaaaatttatgtaaaatgaatattaatctaattaaatcccaaaaggattttttctacagcttggcaaaaatgattcttaagctttcatagtgtaataaatgtaagaaaagtcaagaaagtatttttttttttaaggaaaagctattgagggacagagggcaagaccacattctaccaaatataaaaatatgtagtaaggccaggagtggtggctcatgcctgtaatcccagcactttggaaggccaaggcaggtggatcatctgaggtcaggagttcaaaaccaacatccccaacatggtgaaaccccgtctatactaaaaatataaaaattagccgggtatggcggcacacacctgtaatcccagctacttgggaggctgaagcaggagaatcgtatgagcctgggaggcggagattgcagggagcagagatagtgccattgcactctagcccaggcaacagaacttgactccatctcaaaaaaaaaatacataataaagctcaatgattcagtaataatctagcaacagacaggcagatcaatgcaagagaacagaaaatcctgaaacagatctaagaataaataatttattatatggtaaaggtggcatttcaaatcaatgggaaaaggtacgttcattgacaaaggtattgaagcaacgggttaagatttggaaaataactatctctgctcccaaacattcaccatatgagactgtagacctaataaaaataaacataagattatgagaataaaatatcaataaatattttatactatcttgcagtgggataggaattgtctcactcctgctggggtgactccccataaccccagggctctcagttccaaagagaaaaagggaacagatgcctcctcccctcctcactcccctg

SEQ ID NO: 587340 - DNA, 4001 bp, Homo sapiens
tctgcaagaagctccccagtcccgagcgaccacgagcttgggtgactaagacccactgtttgcgatccccgagatctcggggcgcattcccgcagacacccccttgtgagggtggatgccggtgaggaggagctggtgctgagcggtcagctttcacggagccctggacgccccgtggaggcaagtgcagggaggggaagcccaggcggcacgtctctcccccgctctccaggcagatctggagtttcctaatgaaccagatacagtcctccttcgccctgccaatcactcttccatctggaccactggaggaaaaggaaatgggtggaaaagaagatggaagaatctagagaggacggggaaatattatgtagggaaaaaagcaagtgaccattgaaaaaaaatcgtaagattggactccaacctttaaaaatgaaacgaaagaaaaaccctttgtagatacagatactcccgggaacatctatggaagtgctgactgataaagaaagcatctaaggaggctaaaaatgaggacaggggcaggtatttccaatgtgaaaaccaatcagtattctctctctctctgtctctctccctctttctcgccctgtctcaaaagggagcttatgttctttcccggagaataaacaagtacacaagctattgccagccttgaggtcgcagcctgtaggctacttagaagaaaacattccccaactcattcagggagaaaaccaagctcacagagccccaagcccaggagccacccagagaaactccttcccctgaccagcgtagaaggaggatacccgtgcgcccacagtgaatgtatctgacttggaagccggtccagaactcctagcctgtttcacgcaccttgccaacaccttacaacttgcaaggagcgaagtccgggggagaggaaagcgggggcgaccttctagaggcagctactcctcgccggctgaggacgttggagagggaaggaggagaggaggaatggggtgtatgggtgcgaggaggccgggccggcggagacctttgcctattggtaccaaaacccccgtagagagcccgaactttccaggccggcttcacccgggacgctttcccaggcgcgtcgggtccggggagaaagtcctgggaactgcccctcagccaccccgacccgtggagtccacgtctcggaggaggcaacaccgccccggcggagcacagttccagcccaactcgtattgggttcctttctccttgacaccctgtactgccgagaaaaagagatctctcctgtgagcccaagagagggggaaggaatggcggggtggggcgggggcccaggagggctggggagagcgcgatggaagctccctcccgtgcatcgcgttccccgagcttcggcgatggagcagcgccgggcagaggcggccactccgtaccctgcggtccccaaaacgcacactcgcgtccgcacacggggcctccgagggctctaccgcctccccggccaggagcaagtccgtcttacccttcgctgcagtgaggagcctcgcgcacagcaccagcagcccgagaagcaggagcagcgactggaatctcctccacgcagtcatgtctgcagatactccacacgcacgcgacaccgatggctcctccgaggaaggcagggctatgagcggagccaaataatcacccgagggcaaggcgagccggagagagagcccggtcccaagacccgccgcgcatccgacgcctcctgaaggtctgggcgcccggctcgcttccctctcatagcatcgggtcccgagccactgcagggctgagctgctccgagcgcggagacccgggctggcggggccggggccggggacgagcgccggccgagccgggcaggaaggcaccaaggcggcgaggctgcgggagggggagaagcggggagaggagcgcgcgcagccaggagagacctggagaggaggcagctggagagagagccagcgagtgggagatgcggggaggggggcgcgggggggaggagagatccagtctagagagaaaaggcggagagcgcagaagaagggctgctagtggcacaaggagccgctgccgtggaggctggactcaaccatccttacccacagagaggggaccgaggctgggcacggcgcagtcccagacagacagagcccagcctcggggcctcgggctgcccgcaccgtgctgcgcttcattcggcctcagcgcagcagcgcgcaggctggagaaaggagacttgttgggcgctcgggtgggggaagctcacgccgcacaccggggaggaacaatgtaatccggcaactccagcaaactggagggtttctgcaggggcagagtcccgcctccatcctttgatctcccttccttgctgaccagagagcagccccctacctaacttagatcagaaatgcaggtggaaagggcacaagcttcaactccaagggaggaatatatttatacatttatatatatatatatatgatgatatgtataatgttttgcaagatggactatttgcaaggagttacacaaatttacacatttcctgactttggattgtgttagatttagccatgcccaaacttcagcttcagataaaacgtgacatgaggaagtctctagaattaatattatggtctggttgtgagagccggcatgttggcacagcttctgatgaaactatatataaaattctgtgggttgggaagggaccttaaaagagaagagacaggttctccctgattctgcaaaaggatgaagcccgcagagagagaacagtgctttagaatagcagtacttgatacagtaaactggatttcacccagctccccaaatagaggaggcattcctgcagttcctggggaacgtgtaaggagagacattttaggagaaggtggtcagttaatagaaacaccacgagtgagggctggtttccatagaaggacatttaaaggattcgacatccttgaccaaaaaggtttagccctttcagaggacagaacgtggaaatcccataccctagtaagagagaattagcctccaggcctggaaccattagagtatacaaccatctacctgcggtatccccacagcaccgaatgcctgtggtgggagggacagcccaccgcttcatcccacctgcacttcctctgtcagtctttgagattaaatgggttgacagtttgataaagttttatatccctccttcaattttcttagattgctcctgcctctgtgacctagtctaccctagaaaggcataatggatccaggaaggactgcaaccttggcatggaaacaccgaagcctgactttcttagtctccctgcagcctaaggtgcaggtggccacaattggggccacctccacaacccttttctcctcgcagatatatgagatttaaatatggggtgggtggggagggagagaatgcgtgctcttggagttgcagtcctgaacatgacttggattttcctcagcgcagagtcccgtcttgcctcatgtatccctggagggacactcggaagacagaatgcctcagtcacgggggaattcccatagaacccctgagttctattcttcaggctgaaccgggcctgtggagcagagggtcgccccctctgggattttaaatcagacctcagatagtatctgtgagtcagcgagtgaacaaaaatgctttccaagacccattaagtgctccaatagttcatttcaagcgcctcatccggaaaaacggatctcttttcaggagcttaagagctgacttcttcttgagaaacggtgccctgtctctacactgccattcctaatggctcgtgtcaccaagaaggatttctgccattaaaaaacgtttccaacatctaaccatcctaggctaggactcatagatgattttcacttgattaggatcccaatcaggaacgacggtgagtgtcacctgagagatggaacacctttccacataattg

SEQ ID NO: 587341 - DNA, 4001 bp, Homo sapiens
cccacgcgaagcgcgcgtctagcaggcagccccagggccatccattaaccaccaactcccagtggcaggcgaactaagcataaatgtgtggctcctcacccgtcgagccagcgacaaagaaaccttgtaagcaacctgagccgtgctttgtacatttggcagtgtagttgtgccacttaggacaagcttttcggctcagagctgctctgaggccccagagagaaaagaaaaatcaagcttcaaggagcaggttgggattacaaggcagttgctgccacagagaccggggcgactgacttcctggcattttgggatgtaaattaaaattctagacatgccacccatcattggttatagtagagggaaaggtaacctctccagctccctcctcccaaaacatgaattatcatttccactgaatgcaaatgagctgccttccgtggggggacagccagctgcaagctggacaataaactgtttcatagagacgcggcccgattgcagttcagagaggcactcctttacaaaggaagaagcgtccagtttgtgttgacagccctggcgcgcctgggccaaaacagcaccccctttcccgcgatcccccgcccccccgcgacacacagacacccgggatttgaaactagcttcactgaaagcggcatccatagcgtctattcgagctgccatgagtatggagaggtgattgttcaaaaaatgatggcatgagtcataaacacctcctgagtattctttgcagcaattaatgggcagcagggtgccggagaagttgtggaagagagctatggatctattttctccctaaggacagctctttttcccatgatcctgactgtcccttgccttcctgcttgggaatacatttttacatcccacctaccccctcccctatctgtgcatgtgacactcactctacctgtctgaacgctgagacttgctggggattttcttttggtcgtcagctaatgactttcctcctacctcattcatcccttaaggtggttctttacacttcatggcatttcagacccttcgaaagcctcattttttgccaaacctctaccacaggtcctagggaagctcccctacatttaacattgcatagaagcccaatttacatacatatgcatgcagacattcatgttgatgtggcagtgcttggaagatccctgtgccctaatgcatttaaaatcaacacattcctagcacgtcgataactttcttccctgaaagggttaaaaagcatttagaccagcgtctttaatatatatattccacccaaagcctcaagccctagtgatctgacaagaaatcaaggtaatcctcaccactaagaaaagtcttgcagaggaattctgcctggatatccactagttagaggctatactaaccaactcacgtattcgtttgagcatactgcaagaatatttattgagcacaagctcaatcaccgcattgaacgccaaatctggcaagcaaaatgcatttcctatctgagggggggagaacgagctgtgaatcaactcctttagtattatcagattattttatcggtgcaaattgcaaagtaagctgccagcctctctccatctacaagtcagcccacctccatccaaagcggaggggacccccaaagcagacctacctttcacacaagacaccgtcaataaaaagacgaggttccaaaacgtaaatccacttttaatccccattttcttcatcaggatgaagtctaggcggccacatttagcgcatcttcgcttgccaggctcccagggtttggattcctttgctcggctttcccctttgcggatccctttcatattattcgcgagctcctaattcctgctcctcagcccggcgcagtggagttgttgctgttgttggtgcgcggtcacagctcggagtgaatggtgtttctgggataccacagcaaccttgacgaggactcaaccatctctccaacgggggcacaaagtctccgctactctggattctgtcttttcttgtgcgttttttcccctccaccaaaatctaccccaattctggctcgttatagcaaccaccagaaaccactagtgagcctcttaaagcccacctctgctctctgataaactccacacaatatttgaaattaaggggcttgctttttttccccgaatagatcaattctgcctgtaaaagcagcccaagaaataatgttagtgagctctccgttgcaggctgcgaatacagaagcatgtcaaaggaatattttaatcggaggatctgtgttgcttttggggaaaccgtgacgataatgaatcgggctccatcgatgcccacgtcgttataatgggacatgtgttactactgtagttgcagtatatttcaggcaggcttctcccatttattatcctgtgatttaattgaaaaaggaaatcacagagaattttctcaataaattctgccttcacacggaaaagaatgtatttgaacacatgtatttacatactcaaataactacgtgtaaacccttcaccgggtttttatgattcgggaaacggatttcatccgtggcctgggcgggggtggggtggggagggaagtcaatgtcgtttcctcaaatagttctccctttcatcctcccaacccccttttcagtttgtgtgtgccgcagttaaactactttatctgtggtagttatctagaacaaacccatttgtcttaattctgaatcggtaccaaatatgtaaataggaggtttctttcaaaacgaaaaatgtatgtatctatacatctggatctgcttcccccatgcaccacgcaagggttaagattgcacaagggaagagttcttgcgccatctactggccgtctccgagccgcccgttcttccttcgcatgtataagggaccctgtttttgccatcccttggtgtcaggggagctgtgtccccgggaccagtatgtcgtgctccttgatttttttcgaccacggtcctggcccaaatctttcaatgaacaagttccttagattaggcaactgattggtgatctgaccttttcgggaatctggtcccctctcagcagtggggagtgccacagcgctagttctgaaacaggatattgctgttgcgtgtggctccatttaactgcctcaggctatcatgggcgtgagcgtctatcaacaaggcttagtctagaggactgcccaacttgagtttgcagctccctgcactgtgcacaaataatgggtttggtcccgtgcaccacagcattaccctggccagctttgtcccttggctcgcgttggagctgcccgctcagcagaggaaggcgttagaatctggaaggagttccgctctgggaagtgggcacactgcgagtgtccataggtttgagtggcgagtgagttcaatctgcaggcgtaggaaggcttctgatctctcggggtacgtggcattgtgtgtgggcctgtgattctcccagttcgtgtgtgtgtgtgtgtgtgtgtgtgtgtgtctgcgcgcgcgagagcataaacgcgctgtagtgagaggtaagtgtgcgtgtttatgaaagatacaaagagtgatttgccatgcgtaggtgttttcccaagtgtatttttgcagtacatatgcgtgtgcacgcctgtgtgtgtttgtgtgttagagagggatttctgtcctgggtagggagctgtagcaaaaggtaaaagctgtagacgcccagctgacctcattaaattcagagagatactttaagagccctcaggcagaacattgtcccttcttttcagtgctctctttcattgtctgcatatgcaggtttcgaaggggagtgggcaacaaggtagggactagacagagactgggaggatcaacatggaaaacgacattagcctgctaagccaccttggcagctgctctggcattgatttcagtcaagatgtcagcgtgtggtgttgctgctgttgcctttgctgggctggacaaccag

SEQ ID NO: 587342 - DNA, 4001 bp, Homo sapiens
gaatggagcatcactgaataatgggacaacataacaggtattctgcctaaggaaatcctcatttgctccccaaatcattgctaatgtagctcacaaaatacagagttgttacaccagaaaagagacttaataacatataatgatgtccatattgctatcagtcagttaacaaacagataccgaatatctactttgtgctaatgtctgccaagagcatatgtctaataagtaaaattcgctttgagtttagactataatttagaagttatttctcccctttccactgaaacgagtaggcaaagttcagaggcagccagtagaaaacacttcaagatggattcaaagccaaagactatttaatacacacacacacacacacacacacacacacacgtgtcatgccgaggaaaataagaaactatcaatactttacgaacagcattgaaatatggaaccctccttaggaatgaagctaagagggaccgttgaaaaatgattattccccagaacaatttgctaattgctgaagagtcagcaattagtattagcgggatttgattttttaaaattctgccaacataaaatcggagtagcttatgtaagactaaaatatgagagaaatgaccgacataaaaattagaagaacagagaaatgaagtaagagcaagccaggataatttggaactagaataatggtttttataattacttaaagaaaacttaaaataagtatcagaagtcttatacaattaattttgtgtatgatattttaattttttaccaaaattttagtcaaaaatggtgctgtgttcttttaatgtcatactggagccctgtctaagacgctcactcaaggttgatttaattatctatatgaatgtaacttttattttgtcaattggcaaattcttatttaagatgaactcaagctcattgttttaatgagatgactcaatgtctttcatgaatctggacatttataaatttgttcatttgaacatagaagataaaatttaattacttttaaaggcaggatatatatatttaaaaagtaggttcctgaagtagacaaatacttccaaatagcctttgaggcataaaagttatttgattgatgtacaaatttctaataattattttttctttaatatgaaatgttaaaacatctttaataatttggtatgtttcttatatgagggtatttaaaagtaaatacatgttcaagaactgtttgtttagtaattcatattttgattcaaataataataacaaaaaatatattttgtagaaaatttgtcatttcattcaaaaactgggaggtgaggggttggaatgtacaagacacttaagagtaggtggcaaattctgtcttctgtcttttctgtattatttatgcgtttgttgtccaaaataaactaatatataaaaaaattgatatccaattttttttaatcctcatcaaaagaaagtttaccactctctctttccagacctggccaggcaggaggcgccatcatgggagttgacacccgccacaaggaccgaaaggttcggcgcaaggagcctaagagccaggatatctacctgaggctgtctgtcggtcaagctgtacaggtttccagcaaaggaaccaactccacattcaaccgggttgtgctgaagaggttgtttatgagtcgcaacaaccggccacctctgcccctttcccggatgatctggaagatgaagcttcctggccgggaaaacaaaacagccgtggttgtgggggccataacggatgacgtgcgggttcaggaggtgcccaaactaaaggtgtgtgcgctgcgcatgaccagccgggcccgcagccacatcttctagggagtggggtggggtgggggtggggcggagcggagcggggcgcggggcaagagcctcacttttcgccagctggcgctggactcccccaagggctgcggcgtcgtccggctctccggtcctccaaagggccgaggggtgtacgccccggaaaccctgcaaaccctacatccgctccaatggccggaagttcgagcgcgcgagagaccgaagggccagccgaggatacaaaaacaaaccgtggagcctaccctcttattaaaaatattttggatgctgaaataaagaagtttaccttcattaacatcattttctttttaaaatacagaaaagaataaattatttcagtatacacatgaagtattccagttgtaaaataatatctgaaagtgatttatctatttcttatcaatttttggagatgctgataagtcaaaagtgaaatctagagaactaacattacagtgcaaattgggagctttcctaggattttgtcttatgtgccagctatctgaaagctgagttttagttcatttgagctatatttttaatccaaagaaggtacacatttcaatttttctacgagtttgtgttagacggtatttataaaacttgcaaatatttatttttacaaacaatagaaactctaattttagcaaagcaccacacttggagttggaccatctgcaattcagttcaatcatgctaactggctttgagatctgtattggggttcaataccattaagcctaaaaataagctttcaacccaaaattattatagcagattgtgttgagtaatgatttatctgccaaaagttatttattcaatactttcaaagtagcacctggatgaaaaaatattaaaatatattttctaaaaaataaacgaggagcacgcctgaaaatggtgtgcttgcttttttggaagattttcaaaatggtcatataagtttggatttaaatggataaactactgagggaatacaataaatacacaaataaataaggctgatacaatgattacagctctttaaatagatttttctggcttctccaaaagttccattatgagattaataataataatataacatagacagaaaacatcattttctactataggcataacccttagaacggcatttattcttggtatgacaattttgctaagcacagtgagtcatttgtgaacttctgaatatggtgtaatgtgaagatcctgtattatgaataggaaattcaactcaaattagcattcacttactcaaaaaatacgtatccaatgcctcctcagtgtcagtcctgtgccaagacctgaatatacgataatgaaacaaacttatgcaaatggtgaaccaaactgacattccttgtttagagatatagtctagttgaggaggtaaatattatataagtaaacattttaattatatattgtggtaagttatataaagaaaagaatagtatttaatcctcagaggatagggtagatagtagttttacgttatagtggacaagaaaggcattttagaataagagatgtgtttttgaaatttatagaaagagaagaaggcagccatgcagcgaacctaaaaagagccttgtttgtagaggaaatttgtatgagaatgtctacgtgcaagaatgtttgctgctttaatgcagtggatttcagctaggggagatattgccactccccaccatgggaaatttggcaatggctgaaaacaattttgattgtcacactgaagtgtgtgtgtgtgtgtgtgtgtgtgtgtgattaatactggcatctagtggatagaggctagaaatactgctaaacattcttcagtgcagaagacagctcttcataagaagctaaacttgagaaaccctactttaaagaaattgaaagaagtgcaatgtgccccaaagcacaatgttacaaaatgaaattgaggaggtagaaagggatcatgaaggagcttgtagtccatgacaagaagtttggattccattctgtgaaaaactgtgtattatcattaggttttaagtgagatactaataacacttcatttacattttaaaaatcattactctgggaaatagtgggttaatgaaaaggggtcttttattttctacagtaggaatattttagtg

SEQ ID NO: 587343 - DNA, 4001 bp, Homo sapiens
ttcagataatcaaaaatattatcaaaaatatcattctcatccatgagccctagccaccctgttctcctgtccagaacaacaaacattgttatttcttgtctccatgcagataattttttaatgcacctataaacagatacttttatattatcatatacatatttatatgcatgtgtgcattatattcactttttcctccagttaagacaagtagtccagcattgtttggcatcttgctttctcaagaacagcaaaattaaagaaaaactaattatctttacatcttcacttaattatacactaatttctataaaaataaataccaacaacaattttaatgcatcattttcagtctaggaaaactaataacatgattttttttagcatacaagaatatctttaatataacatgtttctgagaaaaaattattagggccatgtgttgcttagaatcacatttctttttttttttttaattttctttttgtatcaaagagcattcagataggatgaaattcctaaaaacttctaaagttaaaccacttctgatttcataaaaatggatattaatttttattgtggtaaaatgtatataatataaaacctaccattttaatcattttaagcattcaattcagtggcattaagtacatttacaatgttgtacaaccatcatcactatccatttccagaattttttcatcatcccaaacagaaactctgtaaatggatgttaatttttgaagaaaaacttcgaatttgagtagtatttccttacacaaaatttaaaaatcaaattacatttagggatgatgacaatgatgactgtacaacttgtaaatatactaaaaaccattgaattgtacactttaaataggtaaatgttatggtgtgtaaattatatctcaacaaagctatcaaaaatcaaattatatacttttcaaaccttcaataataaaatactatgtcaagaagcatagacattagatgagtattcagatctgaagcttcatcccttttttagtcctactatacacataatactatagtattaaaaaattatcatttctaaacaaaataaaacttggcttttttttttttctctctctttagacagggtctcgctctgttacctaggcttgagtgcagtggcgtgatcatggcacattgcagcctcaacctcctggcctcaagcaatcctcccatctcagcctcccgagtagctaggactacaggcatgcaccaccacgcctggccaaaactttccttaaagattcagctatgagcactatagatgaaataaaatttgactgtagtttataaactgatataaaaatcaccattttgtgccttatttctcacaatgtagctgaatgatgggaacttttcaagaatgtgtcatatcactgcttactacatcactgaaacatttcaggcagggaaaaggccagtgtaatataaacataagtggatgtttatggattcttacagaatactaaaatccacttaccgctatcaacactggaattctcttgataaacatttctggcctatttaactccttgatgatagagggtataacagaggattccttagggacacctcttacacatgcttctaactctcttccaaaagaaactaaagcattccatatgcttggaattttaaatcatcctagaaaggaactgtttccttttgaaggaatctaaacctttttttaaagatacagaatttaagcctaaggagagaaagttttgattctcatgttcagaatggaacatcatatataaaactaaactataaaatctatgaaggcaaggcccatgcgctattcaattttataatgctggcacataactttaacccaagaaaatgttcattgaataaatctgcaaatgaatatatgaatgagtgcctgagacagaggaagaaatgagaaaaggtgagggggaacaatatactatacttaatattccatttctcctgttagcggtctgactgcatagagagaggtagttaccaaagttacatatcactagtcacacagggtcacaatggatgttctattgtgccaaggagtaaaagacaacaatgctgccaggatgatgccaacacactacctgcccatccaggaacaagcaatttacaaatttacaaaaagtgtaagtttaaggtggcttttactgctgtttttcaattctacttgggggtttatgtggaagaatggaaagaaaaacataattcattttcatttacattattattcatatatacatatatatatatatatatatatatattttttttttttttttttgagacaaagtctcactctgttgcccaggctggagtgcagtggcgcaatcttggctcactgcaacctccacctcccaggttcaagtgattctcctgcctcagcctctcaagtagctgggattacaggcacctgccaccacacctggctaatttttgtatttttagtggaggcggggtttcaccatattggccaggctggtctcaaactcctgacctcatgatccgcccaccttggcctcccaaagtgctgggattacaggcctcagccactgcgcccggcctattattcatattaagttaaatttttatttactaagagtatttgtttttcactattaattcaaatagtattgtaaaattgtcttgacaagtaacaatatataatgccttctgagttatttataactttattaatttaatgtttagtcaacagaaaacactaactttttaattcttattttgtcatcttgtaccaacattttatggcattagaggtaagtcacagacataaaattaggaactgtatagaacaatgtaaatatcctattcttttaaaccatgcattaacaatagcatctcaattgacttaatgagctaaggaacacggtgaggcttacttattgtgcctgttgtcttctgatggatctagcagcaagtaaagcatttgtgtcattttagggtcatttgaagtgatgtcacttcatcaagtataacatcaatgaccctaagatagttaacattatgcttcagaactatagtaattagaagtatttggtttctataacagttgtggcttacataaaatacttaagactaaagtatataacttcttcataattaatttaccttctaacagagcattcatcataattactctatgaaacaaattaccatagaacatttactttcttttcattattatactaccatgaaaaagcattatgtaaaaataatcaaaagacaaattataggaaataataataggcctttacacaatgggtgacttacaaggagatgtgactaattgaggagacactgtactcttaaatttcagctataaaggtatcactacaaggacccatttcactcatacaaaatgaataaaaactgtagaagagtatctgtgatttagtttacaataggataaacctaagacaaagaggaatgataattaaaactacaaggctgggtgctgtgggtcacgcctgtaatcccagcactttgggaggccaaggtgggtggattacttgaggtaaggagctcgagaccagcctgaccaagatggtgaaaccctgtctctatgaaaagcacaaaaaaagtagctgggtgtggtggcaggcacctgtaatctcagctactcaggaggctgaggcaggagaatagcttgaacccaggaggcagaggttgcagtgagccgagatcgcgccactgcactccagcctgggcaacagagcgagactctatctcaaaacaaataattaaaactacaactagacagatgcagtggcacaaacctatagtctcaactacttaggagccagagaagggaggatcgtttgaacccaagagttcaaaaccagccggggcaacataccaagactctatctctacaaaaaatttaaaaattaggcatggtggcctgagcctgtagtcctagctagtcgagaggttgaggcaggaagatc

SEQ ID NO: 587344 - DNA, 4001 bp, Homo sapiens
acttctcatccatccagagatccatctaccgaatgaaaggttctccatcttcctcctggcagatggcatccacatgagcaacttcctcccatgggtacaccaaaattttgacaaatttccctaaatattgctaagatgtaaatactgttgctgggggaaagagagggaggctgggagacaggatacaaagagagagtgaataaatatataaaaccatgttgaagtctttcagtagctattaataatacacccttaatggtgattaacggcagtagcataaattagcctttgggttatgccaaattgctgaaacacttgctcaaacacccttgcctgccactcaggaaagtacatcagaacctaagtcagaatgatgttaaaaggataatctgaaatctgctcaaatgtgtaacagttaattcatatttgtctgaaagcttcatctgagaaaaactgtaccgaaagtagcctgtttcaatttactctgtctaaactcacccactccctcccaggcggccatctggcagaagacccaaacttgaacgggcacaatggctcagggccgtaattccagcactttgggaagccgaggcaaacggatcacttgaggtcaggagttcgagaccagcctggccaacaaggtgaaacccccttctctactaatgccactgcactccagcctgtacaacagagcgagaccctgtctccaaaaacaaaacaaaacaaacaaacaaaaaaacttgatccttgtggagcatttcagcagacatttaatcaccagaaagctagcgacctcctagggagaagaatgatatggagaaaagaaaatacctcaatagcttccatggagcttgtcaacattacaagtcattccttcacacagaataaagcctaatttaggctttttataaattcctatcggttgcttttaagcccctgcattttccaaggtgtttggaaagtaggtgatggtttacttcagaatttagtcttccccgcaatcctagttaagcgtcttaatcctacaatcttgagagctagcctctctcaaaagatgagtcccattaataacatgtactgacaactggatttgagtcccacataagattcctaaaatcaaggcagttagaaacaagaggttcaagctcaagcagtcgggcaatcacggggggaaatacggtcacaacagtacgagctacgagctacggtgaagattaaataagttttactagcaaagcagtgcgcacaagcgctcccacgttaacaataacaagcaccgaggggcaagaaaggcgctcggggaggcttgacggagcagggggggcctggccgttggggagagaaggcgcatgggaaccaaggaaccgctcgcccccgggccctggaggtggctgactaggaagcgtcgtcaggcaaccagctatcaacaacaccgcgggcagcagcgaccgcagtggcccaggaatccggaccgtgtaaccagggaacctccccgaccccggcagctgcaagacccctgctcacagaactcccgcccccaaccctcataactcgtagtcaccgatgccggcctcacggcggcgaaatcccaactctccacacccttaactcgggcacctcccccaccgcacccagccgccacgagaccccctgccgacaagaaaccccacccccacccccagattccagagcctgtaactctggcacgtcgccggcctagttgcctcgagacctacgccccgagggagccactgcccctgcccccgctccggggcagcgaatgcagccccaggaccctccaccctcaacctacaccaccccaggccacacctcgccactcacgctccccatccgcggctggctgactcttactcaggggagcgggctcgcgtccggggagacacacagtgctctagaggatcgtcgcggaccgaagaggttacagcggccacctggagcgggaacagcatgacagacctccgggccggggctccgcccctcaggcccagccctccgctcgcccttcgccaaccgccgggtacggccccgcccccactgcaggcggccgcgcggcaagacatcgccccctgctgtcctggaggccgcatagctgcccgctgctctcggttcgccagtacgctggccggggacttggtcaactcgttctcctgctgtgcccaggggctattaaactgtgggggccacttctcaggctaaatctattgcagcctctccagcctcccatgcaccagccagcttaggaacagtgtaagagcctggaaagaaaaatggggaggggtggtagtgagaggaaaagtgttggcatacctctcagggcattactcctagcccaggagtgtggtcaacgttgggtcctgggctttcattaccattttcaacatattattcagttcaccccaatacaatcgcatatggccatatgctaccactagaaaagagacctctagtttcccaggagagtggaactaagggtaggtattaatgtactattttaccctaaatttctttgtaagatggttttaaaggaaattttcttcaacggaaagtcagtgccaaaacagcaagctgtggtgtggattcaataattctaatgtttttgtcttaactgattattacaacgcattgtaacagttatagaagcacctacggagacttacagacataatggaaggaatggtaattggagcgtcaagaaagagttcgtggtcgatctcactggactgcatttttaaagattaataggagttcccaggcagaaaatttacgaaagagcgtttcaagcaatgctgaccacatatgcaaagccaaagtaaagatatctgcattgctagaatgaaaagtttcaaggggggactaaaaagagatgaagctggaagaggtgcataggggccaggttgttaacagctgtggtgctatcttttcttttttcttcttttttctttctttctttctttttttttttttttttttttttgagactggctctgtctaacaggctggagtggcgcaatctcggatcactgcaacttccgcctcctgggttcaaacgattctcctgcctcagcctcatgagtagccgggactacaggcgcacatcatcacgcccggctaatttttttttgtatttttttagtagagacggggtttcaccatgttggccaggctggtcttgaactcccgacctcaagtgatcagcccgcctcggctgcccaaagtgctgggattacaggcgtgagccaccgcgcctggcctgtcatgctatcttttcaggaaataaaagaaaaaaaaatcttgaacacctatgctaggtgctaggagataaaacaaggaacgcagacctgctccctgtgtcttgaaacttaaaatcttgcacggatggaagaatgagatggagaaaaaagaaaacctaaaacacgtgaactaataaaaaaattaaacattgtattaactgtaggaagaaaacaaaccagttacccagattaattacgctttgggaacaaatgcggttcacaggagtgccaaagatttaactgtaacctgttacgagaactgagtactggacattttcagatcagtaatggcacattatatatacgtagatgttaacttttaccaaagcgcaaaaaagcaatcaaggagtacccactgcctcctcgcatcgatagaaaaagcccatctgcaagtgaagtgccaagccaccacgagcccgttagcttttacgcatgtacagtgagtcatcttgaagtaaacgggaatgccatgtttatcttcctctcaaccagcttccagaacgacttttagctcagttgtacaacagacagccttaccttttagtctttcaacaaacttatctcatttaaggtacctatacccacacaaaaacactttccgccctccacatcccgctcttaaggctccagctacctttaatatggcggaggccgagcctgcgcattagaagcagagaaggcaaataccag

SEQ ID NO: 587345 - DNA, 4001 bp, Homo sapiens
caatccatttaaatgtttactctaacatttcctctatttgtgtaagttgcctagtattattctgtataactatatttcccaatgaaaacaaaaaacaaagtttcttagatattaaagtaacttcaaagcttatcttttgactacagtatctgggattggatgataaaatccaatagttgtctgggaagaatcctatataattagactgatgcttgctaatcaatttgtgtctccatcgccagtttgagttttggtttgataaatgactttttaagtctttgacatcgccattttcctgactgtaagaagaaaaagacactactacttatttactgtcagagaaatagttaaaaaaaagaaaagaaaaagcatttaacaattacaaaagtattcaaagacacaaaaagtaaagcattttaaaagtgcaaaatatttcaaaatagtttggtgtgttttagactttatttttattttagtaatttaattcactctcacaagcagatatatacaatgtttagacatacatttcaaatgggaataagactgcttctgatattctttgatttttttcactattattcccctcagggcaagatgctacacagactaaattttacttcattatatatcagtggatctcaactggggacaattttgtcctccaggggacacttggctatgtctagagacatttttggttgtcacaacttgggagaggggattgctactggcatctagtatgtacaaacgatgctgctaaacacgcgacaacggacaggacaagtccccacaagaattatctggcccaacatgtccattgtgccatattgggaatttttattcaccttttcatctaaaagatacatttcaaagactatataactttacttgactcgattccgcaggtgttacatcagtcttctactttaaaatgctaacccaacatatgcttagtactctcaataaatgtctgtggaatgaaaaaaaaaagatgtgaagggaagcgcacttttatacgcccctgtttctttcactggccaccagggggcagagctttgtggaagcttgaaaggaacgctttgaaagatcctatacaaagaagttgctttatagaatctgttgaaaccttaatgactgtggacttcttctgtcagcaaaaccaaatccaacctacaggatgcacctgagcctgactgcaaaatcttttccaagtctggctagagttgtgggaaaccacaggtactgtaaatccttgaaggggggaaaatagcaagcttcacaggaaaaatgggtattttgtgtatcataactacagactcataaaatgcaaactacacatgaaccatactcatttggcacagttttaataatttggacacttaaaatagaactgttgcctgaacacatagtccccttttgtggatcaaaattacacagcctaccaccaaaaagtgctgtgtgaaatggcgggaatttttttcccagcacttttgaatccaatacagaactagctgccagggaacttggtatattagctcagtttaaaatggcagcttaacaaattcaaaactttctttttaattaaaaaaaaatgccccaacttatgtcttgcaatgcctgtaaatcatgtttgtctgcaagtgagactgaagtttataatatgccaaggactacggtagctctgaaaggctccctcataccacaggccagagaacctctccgccctccactgggtttgttgatttttagagggaaggattttaagcaaacataccttcccacagatgagcccctggaaagcactcgggccgttcatttccagtttcctggaaactgttttctcccgtagcttgactgtgatgctcctacctggcggccacatatgaagacccagggtgtgtgtaatgacagactgcccatttggtttaaacagaagcaaaacaggtccttagagggttagcgccgggccccttcatttccctttccggccttaaaccttctgaaccattcctagccccagctgtggttgtccaacaaagtaaattgcagcccatactccctaggaagatgacccaacgtgactcatagtcttcaagttacaaagagttggacggatgctttgtgggggttgttattctctctcgcaggcagacgtggccaccagccccaacaaaggacacgttgcaccgccctggcccaggcccaggtccatgtgatcagcgaggccagggtttttcccaggtccacttcggacgtacccaagctcctcatcctactctcactgccgccctatccctcccacccttcccaaggggtccccctggggccagaaattattgggggactccctgtacttcggggagacccaccgggcccatatcgcatgtccgctccacgatggcctcccattttggtctcccctctgagttccaagactcactgcacgcataaccaggtccttcttcacctgtaaataaaaagcatgacaccccggcgcagcaagacacacgacacacagctgtacagacagacacccccaacagccagactgacgccctgcccgtggggcgcgcggccaggtcccctccaccagcgcggcggtcccggctcggctccctcggactcaccaggtccaccacctccctctgccggagctgcgccttttgcttccccttggggatctcagaggcgctcgacggcgcgggcagctgcagcagcaggagcagcaggaggccgcggagccgctgcggggaggcggcggggccctggggtcgcatggctcccggctgccgggcagcgcggagctggaggcggaggagaccgaggagaggaacgtggtcagcgtctggctccgccgcgctccgaggccgccgcaggctgcatcaatgcgcctttcacccgcgcgcctctctccctcccttaattcctcccgcccccgcgacacccggagcttccatcccgtaataggccccgagcccccaccccgagcccggcgtgggggcggaccgagagccgggcccgccccctcctactgcagtcgctcggcctgtcaggacccccgcggggctgcgcagaccctcgtggagagcccgcctgcagggtctgggcggggtggcccgtggtcaggagccgcaggtcggggattcccgcaggtaacacagcgccgcctaaatgaacattttagagacacgtggcttaacctgggtacacgagccaccttcaagggtcgtcaatctatggcatgggtcggcgagtcttatttgttttttgtttgtttgtttgtttttgagacagagtctcgctctgtcgcccaggctggagtgcagtggcgccatctaggctcactgcaagctccgcctcccgggttcacgccattctcctgcctcagcctccagagcagctgggactgcaggcacccgccaccacgcccggctaatttttttttttttttttttttttttttttttgagacggagtctcgctctgtcgcccaggctggagtgcagtggcgcgatctcggctcactgcaagctccgcttcccgggttcacgccattctcctgcctcagcctcccgagtagctgggactacaggcgcccgccatcacgcccggctaattttttgtatttttagtagagacggggtttcaccgtgttagccaggatggtctcgatctcctgacctcgtgatccacccgcctcggcctcccaaagtgctgggattacaggcgtgagccaccgcgcccggccccggctaattttttatatttttagtagagacggggtttcaccgtgttagccaggatagtctagatctcctgaccttgtgatccgcccgcctcggcctcccaaagtgctgggattacaggcgtgagccaccgcgccctgccttatttgttttttggaggtgacatttttggaggctggaaggtgggggtggggcggaggcaggaagaaaccataggtatcatcaggttttccaagagtcccatgacccaaatga

SEQ ID NO: 587346 - DNA, 4001 bp, Homo sapiens
cttctactttaaaatgctaacccaacatatgcttagtactctcaataaatgtctgtggaatgaaaaaaaaaagatgtgaagggaagcgcacttttatacgcccctgtttctttcactggccaccagggggcagagctttgtggaagcttgaaaggaacgctttgaaagatcctatacaaagaagttgctttatagaatctgttgaaaccttaatgactgtggacttcttctgtcagcaaaaccaaatccaacctacaggatgcacctgagcctgactgcaaaatcttttccaagtctggctagagttgtgggaaaccacaggtactgtaaatccttgaaggggggaaaatagcaagcttcacaggaaaaatgggtattttgtgtatcataactacagactcataaaatgcaaactacacatgaaccatactcatttggcacagttttaataatttggacacttaaaatagaactgttgcctgaacacatagtccccttttgtggatcaaaattacacagcctaccaccaaaaagtgctgtgtgaaatggcgggaatttttttcccagcacttttgaatccaatacagaactagctgccagggaacttggtatattagctcagtttaaaatggcagcttaacaaattcaaaactttctttttaattaaaaaaaaatgccccaacttatgtcttgcaatgcctgtaaatcatgtttgtctgcaagtgagactgaagtttataatatgccaaggactacggtagctctgaaaggctccctcataccacaggccagagaacctctccgccctccactgggtttgttgatttttagagggaaggattttaagcaaacataccttcccacagatgagcccctggaaagcactcgggccgttcatttccagtttcctggaaactgttttctcccgtagcttgactgtgatgctcctacctggcggccacatatgaagacccagggtgtgtgtaatgacagactgcccatttggtttaaacagaagcaaaacaggtccttagagggttagcgccgggccccttcatttccctttccggccttaaaccttctgaaccattcctagccccagctgtggttgtccaacaaagtaaattgcagcccatactccctaggaagatgacccaacgtgactcatagtcttcaagttacaaagagttggacggatgctttgtgggggttgttattctctctcgcaggcagacgtggccaccagccccaacaaaggacacgttgcaccgccctggcccaggcccaggtccatgtgatcagcgaggccagggtttttcccaggtccacttcggacgtacccaagctcctcatcctactctcactgccgccctatccctcccacccttcccaaggggtccccctggggccagaaattattgggggactccctgtacttcggggagacccaccgggcccatatcgcatgtccgctccacgatggcctcccattttggtctcccctctgagttccaagactcactgcacgcataaccaggtccttcttcacctgtaaataaaaagcatgacaccccggcgcagcaagacacacgacacacagctgtacagacagacacccccaacagccagactgacgccctgcccgtggggcgcgcggccaggtcccctccaccagcgcggcggtcccggctcggctccctcggactcaccaggtccaccacctccctctgccggagctgcgccttttgcttccccttggggatctcagaggcgctcgacggcgcgggcagctgcagcagcaggagcagcaggaggccgcggagccgctgcggggaggcggcggggccctggggtcgcatggctcccggctgccgggcagcgcggagctggaggcggaggagaccgaggagaggaacgtggtcagcgtctggctccgccgcgctccgaggccgccgcaggctgcatcaatgcgcctttcacccgcgcgcctctctccctcccttaattcctcccgcccccgcgacacccggagcttccatcccgtaataggccccgagcccccaccccgagcccggcgtgggggcggaccgagagccgggcccgccccctcctactgcagtcgctcggcctgtcaggacccccgcggggctgcgcagaccctcgtggagagcccgcctgcagggtctgggcggggtggcccgtggtcaggagccgcaggtcggggattcccgcaggtaacacagcgccgcctaaatgaacattttagagacacgtggcttaacctgggtacacgagccaccttcaagggtcgtcaatctatggcatgggtcggcgagtcttatttgttttttgtttgtttgtttgtttttgagacagagtctcgctctgtcgcccaggctggagtgcagtggcgccatctaggctcactgcaagctccgcctcccgggttcacgccattctcctgcctcagcctccagagcagctgggactgcaggcacccgccaccacgcccggctaatttttttttttttttttttttttttttttttgagacggagtctcgctctgtcgcccaggctggagtgcagtggcgcgatctcggctcactgcaagctccgcttcccgggttcacgccattctcctgcctcagcctcccgagtagctgggactacaggcgcccgccatcacgcccggctaattttttgtatttttagtagagacggggtttcaccgtgttagccaggatggtctcgatctcctgacctcgtgatccacccgcctcggcctcccaaagtgctgggattacaggcgtgagccaccgcgcccggccccggctaattttttatatttttagtagagacggggtttcaccgtgttagccaggatagtctagatctcctgaccttgtgatccgcccgcctcggcctcccaaagtgctgggattacaggcgtgagccaccgcgccctgccttatttgttttttggaggtgacatttttggaggctggaaggtgggggtggggcggaggcaggaagaaaccataggtatcatcaggttttccaagagtcccatgacccaaatgatatataaacgctgttttcataagtgctaacacttactaagctctggcacattgcaaaaccttgcacgcgtactctgtcctctcagcaatcctggcgggttgggaggggtagatgcctcctgggctactctcataaacgaatgaggaaactgaggctcagggaagttaatcaatatccagtggaaatggtagaagttcacttttgagtactctttgcctctgatggatattatctttttgtaaccccctctgtcctcctttggcctgtccattgtagaagaaaacattctcagggcccaggctacccaccacgtagggccaggttggagcaggagatcttttatatataactggctggaatcaggcataacagaagtcttgccacacccataacaacacgaggttgtgacggatggtaatactgtgaagtcaaattcagctcagcaggggtctccctatagacccatgcaggttttccggagttggtgagtccagctgatggatgttaaagagagggagcagtctagcagggaagcaggtcgcggcagttctgcaaatgcccagtcctgggctggtaactaactaaaggtaaatttcacttgtttttctagaagcagcaaaaatccaaatgaactgtaaagccagggctggttatataatttgccccacccagtgcaaaatgaaaatgcaggagcttttgttaaaaaattattcagaattgcaaaatggtgtcaatggagcattaaatcacgtgtggggtccttctaagtgcctggccctgtgtgacagcacaggtcatatgcccatgaaactggccctgtatggggttgcaatcctagtctctgataaaacagactttaaaccaacaaagatcagaaaagacaaagaaggacattatataatggtaaagggatcactg

SEQ ID NO: 587347 - DNA, 4001 bp, Homo sapiens
aacagaaaatatctgttacccctaaaatgggtgcaacttctcttccaactcccaggtccagcagctggggaaagaaaagaacctgcctacaaaaagagcctccccagtctgctaaatcagcaccacatgggcagtttcaacctggaaccaaagggccaccacccctcaccgcctaaccagttggaaacagggctgtcctgagccaacacccaggagagctgtgccagggccgtgtctggcctgcgttgccacctggggagcaagggacctgtgcctttccaccagggggtacccccagctagaggacaaatgaccaaagacgaagggaagcctctgttctccaggagacgtttgactctgtctttgggaaagctacacagggtgggcggcccagcccctttctccaggagctggcgggttctaagtcaccagcaccagagccaacaagaaacagttcttggccaggcaccgtgactcaccgggaggccgagacaggcggatcacctgaggtcaggaggtcaagatctgcctggtcaacatggtgaaaccccatctctactaaaaatacaaaaattagctgggcgtggtggcgggcacctgtaatcccagctactcgggaggctgaggcaggagaatagcttgaatttgggaggcggaagttgtagtgagccgagatcgcgccactgtgctccagcctgagagacagagccagccaacgccctcttaggcctcttcgccttacgttcctgaacgtttggattcaaagagagtgcatctcagctatcctctcctccggcagcaggcagtgggaatgtttttccaggctacaaaaaggtgccaggtctgcatttgaaccccacagcgtcacttctccagtgggtttggggggtctctcgtccgttaggaggaggagtgtggggcctgcgctagggtccttttctttgccagcctgctggctttctcagcgcctgggaagggggtgacagaggcccaccaggaagccaagtgcaattcacttccacctgggtcgcccaccccagcctgcctgcaacgccccacacccagcacccactgctccccagaggccaactccccccggcctccagggctactaaccgagggggaggtggcgccccagggactctgcccggcctccctttactggagtccaggagcagggtgcgcccccggccttctccccaccggcatccaatcgcccattcgcctcttggtttcgctgtctggtttctcttcctgtttatggatttaacaccgtgcggcttcctccccagcccacccagtgccagattcctgttcttcaacaggacctgtcttctggggtcccaggaattgcgtgggatcttgcgcagaaagttggccaggcaaatccttcgcaatgagggggaaataaaccgaaaatagatgccggcagatgcgattatgtcggcagtttggcccggagacaccgaggcccaggcgctgggagcgcggtcccaggcagcagtctccggacccggccgagctcttcctcgcaggcgcctccctcggcggtcctggccgcgtccccgctccgagggccggggtccggcgcacagcccggggaggggagcggagggcagagggctggcgggcggagctgttttctgcttttctcgccgacgcttcggagcgcgcggactcccaccccagcccgcccgtcagggacagtcccgagggtcccggctccccgccggcccccagggacgccgcggggccgcgcctgggcccgactgagggcgcagaggaacccgtctcggcggccgggtagcaccgtccccgccaaggtcacttacgctgcggtggccccgggtccccagcactcacccagcgctgcagccgagagcctgcagcccagcctgcgcgcagcggagcggttggcgttgccggagcggttgccggagccctgcagccgccgtagcctgggccagccccggccctaagtaccctcccggccccgccccacgtgaccaccgcgcagccccgcccgggccctcccgccgcccgcgcacggtgcttcccagcccccaccccctcccgccaccttccgccgcccgcgctccccgcttcccggccccgcacaccccccgcccccttccgctcggggtccggggccaccgccgggggcgggcgggggcctgagcgcgcgggctggggaagaagggcttggagccctgcgggccctgggtggcgaaacgctgcgaattggggccaggggatggggaaaaagcccctaaaggtggtcccaaggcccccaccccgcctagaaaagtccccccgcctcgcgggaccgcctccgccagaacccgcgcctgggatccctgcctgccgagttggcgggggtggggtggtggagagggcgccgtcgcttatttcattcattcagaagccgctgcagaggctgggggtggcgaggctgtggaccccacagaacagcctttagaagggccactttgttgttcagagaacgtacccacaaaacactacagctacgtacaaatagaaaagagtggctgtcactgcgaaggaacctaggagctgcgtcaggatttctaagaggagaaggaccttgggggcggaaatcggtttggcacaggagtacccggagacctgctccgagaggacggacaaagtgcacatttacttggggtttattaccgggaggccctggaagggagatgcaggggttggctcaagactcaccctcctccagacactccccaaacagctttaatccttaagacaaacctgcaaagcaggcatgaccccagttgtattcaagaggctcagaggggctgggttcggtggctcacgcctgtaatcccagcattttgggaggccgaggccggtgagtcacctgaggtcgggagttcgagaccatcctgaccaacatggagaaaccccgtctctactaaaaatacaaaactagccgggcgtggtggcgcgtgtcagtaatcccagctactcgggagactgaagcaggagaatcgcttgaacccgggaggcggaggttgcggtgaccagagatcgcactattgcactccagcctaggcaacaagagtgaaactctgtattaaaaaaaaaaaaaaggctcagaagaatcgtattttatccaggctgtggcgacagtaagaaggcagtagccgggtgcagtggctcacgcctgtaatcccagcactttgggaggccgaggcgggcggatcacgaggtcaggagatcaagattatcctggctaacacggtgaaaccccgtctctagtaaaaatacaaaaaattagccgggcgtggtggcgggcgcctgtagtcccagctactcgggaggcggaggcaggagaatggcgtgaacccgtgagctgagatcgtgccactgcactccagcctgggcgaaaagcgagactccgcctcaaaaaaaaaaaaaaaaaaaaaaaaaaaggcagtaggactgcatgggacctggttccctgcagcctggtcgtcagctgtcacacagccctgagcctgtcttcagagacatgcctgtactcccgcctggttagtaacaaactaaggataggagtggaaggaaaaaataatctctggagcccaaacatggtcactaagcccccagcagagtgggatacccgaggaactgaggaccaggaggctggaggtcaaggtggtcccaactgcctgctcaccctagtcatatcctgacagccatggactctggactccaaatcatttcagacctctataaggagctcataagatggccaaaatggggaggacacagccagaaccaggataactctcccctctctcatccttagagtgtgacagaaggtatgcagagcagagtgcttgacatgcgttatggctatttgatggaattttccatcagtgtcattatagaaatcacttttgagaggtaaaaatcacttttgaaacaaaagaaacaggctaggcgcggtggttcaccactgtaat

SEQ ID NO: 587348 - DNA, 4001 bp, Homo sapiens
gcctggccaacgacaagcagtgagggctattctcaggctcatgtccaacctgggatcatgccccccctctgtgaagcagacactgcccctacccaaggcatcaaaggggcagtaccctccaccggacatacgcaaaactgaaggagcccaaaagcctcctgagacatgcacagaagacgccccagacaagaagtgggcaggacctcctggacccaggaacacagggaaagcatccctgggggtagtggagaagtattccacatgcccactgccagactggaggcctcttaccatcgtcaaactctaagacatctgtgtagatgggaggggccatggcaatggcctggccaggaaagtaggggttgaagtagagaccttcccgcagtgacaccccggtgggtggctcgcagtagcccgtgagcagggagaagacgtagtcctcaccaccatgcctaggaccagatccatggctccttagttccaagcacaagtcagcccttcccccatctctccagcaccaccccatgggcagcccgtgtacctagctcgcacgatgtagctgaggtcagggggcaatgctccgttgttggcagctcgagcagcctcactgttggggtatggttttgggaaatagtcgaacagcttccctggccgcatgaacatctccccatcttcattggggccgtcttgaacctccacctgccaccgagagcctcatcacaaccctgccatctcaacagtgggagccctgagccctgggtcccaggcatccccagaccccacacctccgcagccagctccttagcttcatcctccgtgtagcacacgcccaccaggtggcggtaggccacgaagtccatgctgtggcaggaggcgcacacctgcttatatacctggaaacccctccggatgctggagggagggaaagggttaggaaagctgaagattccaccttaccagctccacccagaacctcccgctgccagccagccagccagctgcacacctggtgtggtccaaggaagagaggaggccacggtgagaccacggatagctgggggggtgcagctccaggtcactggcactcacagccgaatgcagagccatggccagccccgcaccccctgccgccagcatgcccagcgctgacagcatcactttccggcctcgggaaaggccagacttcgacgacaaggccactgcctgcaagatctccgctcagcgcctgccaggacaccacccagccctacctggggatctgactctcagcgcccacctctccacccagcaatggcctcctcctgcagggcaccagacgcacaccctgtcccactacccaccccatccctctccgccgctgacccctagaccgtgattcgctctcaggagagggtgttcctggatcctgagccggggatcagaccgaagtgaccaagggtgctgggacaggccaaggtcacaagcagctggccgagatcaggctggggtcacttcaggacgcgggcccagtttggacagccagccgcaagagccgtcctgggcgcgccattcgggaaagccccagccccgccacggcagctagcccgtcccgccaacccccacgctggggacgggctctctgccgttcggagaggtgggcgcccagccctgatcccacacgctcaaggtcggcaggcagctgggaccggggacgctgggtggccggtaccgcttccgcgctgcccaggcccgcgcccgcagcctccccgccgtgaccttcacggagatgcggggccgcgcggaggccggggcccggcccagcgctcacctgaggtgtccgtagcgggagctgcccgggacgcgcgctgcacagcagaccccgggcacgcgcgcccgggagccccgcgccccgcgggcccaacactaccccgcgaagcgaagccgcagctgccgccatcttggcctcctccgcgcggccgccactcccgtcggcccctggggcgccacgagagtcaaaacctcgcgaaagccggggagcgcggggcggggccgggctcgggggcggggcctgtcgggtgggcggggacgaagcgcgctggtcccggtcgcgtcagtcaggggccggggcaccgcctgcctccccacgctcttcgggttgtcgtggaaactggcggtggggcggggccccgtcgcgtctctctgttgccgtgacagcgccacgctccgcccggcgtttcccacgccgcctccgagaccccgacgctccttttctccaccttcccaggctgcgcgatggccgggtggagggtgcccctgcaggctgaggacctccagagaaagggcggcttggagggcagcccggcagagggcgcgggcaggggtctcggccgcaggcagcgcgtgacagcgggaggctgggcccccaggctgagcaccctgttctccttcattcccttgactcatggcccgacgcgtgatgcgcgccttgggtcctagcgctttgggaagctgaggcgggaggatcgcttgagccccggaggtggagactgcggtgagccgagatcgccactgcactccagcctgggcgatatcgagcgagacctcgtctcaaaaaagtaagtaaatatgatcttgttatgtgagaatatttttattgtaaaatatttaaaaagtaagcaaaggccgggcgcggtggctcacgctgtaatcccagcactttgggagggtggggcgggcagatcacgaggtcaaaagatggagaccatcctggtcagcatggtgaaaccttgtctctactgaaaatacaaaaattagccaggcgtggtggcgcgcgcctgtagtcccagctactctgggaggctgaggcaggagaatcgcttgaacccgggaggcggaggttgcagtgagtagagatcgtgccactgcactccagcctggatgacagacggaagactccctctcaagaaaaaaaaaaaagcaaataaaatttaaaaactaggctgggtgcggtggctcacgcctgtaatcccagcactttgggaggccccagatcacttgaggtcgtgagtttgagaccagcctgaccaacatggagaaaccctgtgttatatgtaaaatgtttatttagaaacagaacgcttgttccctggtaccataaggaaagatcagcattccgacaaaaagttctctcagcaagtcaattttactttctgcagagagggtgctcctcacagatggaaaaatggtgagagcacacctgaataaaggagagaagctatttttatcccttacacagcttgtccctgctactgtgtcctgtctccattggctagagccagatggcacaatctaaactaaaagtcgactggctaataatttaaaacttttctaaatagataaaggcaagggagaacagaggaaaagaggaagttgcttatgccaaatagggaaggggcacaggctgtgagctggaacgtgcctgtgagcacgtccagcacaaatattttggttaaggtacaaggacatagaatgtactacctgcctgtgagcatgtttaacagctacataagatagagcttaaagaattattagcaaaaccaaacaccacatgttctcactcataggtgggaattgaacaatgagaacacttggacacgggaaggggaacatcacacaccggggcctgttgtggggtgggggagaggggagggatagcattaggagatatacctaatgtaaatgacgagttaatgggtgcagcacaccatggcacatgtatacatctgtaacaaacctgcacattatgcacatgtaccctagaacttaaagtataataaaaaaagaaaagaaaagaattattagcacaaaacaaggaggcttgaaggaagttagtctgtaaaagaaactattatttctaacacttacgatttattctttaacaagaagggaaactttgaagaggaaactttttactttctacacaccatctctactaaaaatacaaaattagccaggtgtggtgg

SEQ ID NO: 587349 - DNA, 4001 bp, Homo sapiens
atgtcttctcagcccaggggtcttcctgacaatagtcaaaaggaggccgggctgcatgagaccccatcctagttccagcacataccctgtcagggtaactgactactgtcctgaggggccttaggaagctcactgaaagatccctcaatccctctcaaaaatgggcagttttcatattcctgcaaaattcctaagatttattggagactaggcctcttctctggatccacaaccgtgtccagcccagaatcaggacccccaaacgtgtctgggaccctgtccctttcattctggtctagacaagtccccacacgtggccaaaggacagcacccagactctgcccctgaccagtcaatgtgcagcaaacccacttcagtaggcagaagagtctacccctagggagaaggcgccaggagcaggcaggtgggagggaaagtgttcggcagggcagaaaccctgcctggctgtatccaactgtcactcccactggaggcgctgtgtatgcagggcccggcagtaagcccagctgcctacagccaaggcccagcgacagacatcctccttcggtagcagcagcagcctgtcctcctccagccggctcaggaggcctgccacacccagcatcgcccccccccacatcccataagtgttggccgtgaagacagctacaatgaggatggtcactgcgaccaccaacagcattgcctgaccagccacagagcggccctcagggccgaggtggccgccagccactgccagcaccatgcctcctcccaggagcaggttggcagaggagcggtccccattcacccagtggaaatcgaaggccagaaggggaaggccgatgacggtggccacccaggctccagcaaggcagtcttcgtgtgtgctcagccctggggccagcgtggtggtggcagccaagacctggagcaggaagccagcagcagcccctcgacttgcctgtcaacacagggaagggagaacacgtgggaaaaagaggccggggtcacccttttaaacaggaaagggtttggggcttccatggagacctggtcttagacgcacttcccaccaacctctctctaattcaggaaactaggtccttggggtttgggaggtatggggatgcgcccctgctcagccccagtgtactcacctcggctgtgctcacggctgcgtgcagagacaccactcccagcaccagatgggacagggctgtgctccactcggcccccggcttgggggccatggcacctcaggcggcagtatgtacgaggacacagataggagatactcaactttggagaggaaggaagcgcagaagccagcgacctggagccctacgcgcggcactctagtaagcccaggttccaggtccccattactggatgttaggagaagttcagtcctagactttccggatccctgaggccactgcacacacctgtggagaagaagaacctaattcagccgggaaacgggggaaaacgactcagggtctaagctggggggaacgtcagccctggggccctggagcccaagtgggagtgcgggcctggggaagagagagcggcgaggcgctgcaggcccacgcggcggcctcggcctgctccctgcgttccgggaggcgttgtcctgggaacccgggtccaggaggagcgacggcgcaggactccgggaggccagccgtgcgcagttaccgggctgcgcggtcccaacgcagcggcgagcgggaggcccgagcctgcgcaacgcaccgcccaccgccgtcggccctgcctcctctgccgtgcccccagttgcgggagcgagcgcggtcgggaacctccaccagcgagaggagcggaggctagagcggccgggcggggctagagcggctggggggggagggtcgaggcctgggggagagggtcgagacctggggggggccggttggaggccgtaggagcgggtggggtcgggaggagctcggggaccagaaaacgctctgtttgggtgggtgcgtgcgtgggcatagtggtttggaaggagcgtgatgaggggagaagggccggggcggggctgcgaggggcggggtctgggcggggctgcgaggggcggggggtctgggcggggctgagggagataaggtttaggcggggctgagagcggcgggtctgagagggagggggcctgggtggggcggggcctgggcgaggatgcgatgggggggtctgggcgtggctgcgaggggcggggcctgggcggggctgcgaggagaggggtctgggcgagactgagagggaccgagaggggaggagcctgggcgaggctgcaaggaacggggtttgggcggggctgcgaggagggggggtctgggcggggctgagatgggcggggctgagatgggcggggctgtagggagaggaaggagaaccccggcgtgttgaaggctccgcgaaaccggagcggtgggggactacgcggagggtgggagggattccgagaggagggtcgcgggagccgtgggcgctctcagcccggtgtccgcggtgtaggggttggggcgcgccgggcggcgccgtgagaaacggcgggtctccaggtgcggccgcgggcacctgtttctagtacccccgtccccgcgctcgccttccagccgtgggagccgggccgtgggggcggccgtcgcgagcatgcgcaccggcactgcggcgggcgggcgccgagtctgggcgcggggacgcggggcggcgcgaagcggggccctctgccgccccgcgctcccatgtacgccttttactcgttgctcatctacatcttctacagcctcttccgcagggatggtggcgccgcggcggccgcggagcccggggaccccgcccaggtgagcggggctggccgtgcagcccgtcgtctcccgccgcctgccccacccccacgccgaggttcccggggcgggggcgggcacggggcgcggggcgacggggccgtgccgaggaccctcggctcggccccgatgctggaagcgtagacttcggccccaatcctccggcccggttcgcggagggaaggggccagcaggctgcctgcccccctcctcaggggcgcccctgccccctccctagagagcccgcaagccccggggtcgccggcgcccagacctgcccgcgccagagctgtggaccgagctgaccggcctggccggtaggtgcgggctgggagtcccgcggtgcgagggcggtgccgggacctcccagggaggggcggaggcctggctcaagcacgtgacccgaaatgtctcccgccctcctccctgaccggcagccagctccgagcctgaggatgggtcggaaggcgcagccgagggccgcgcggccgcggtgtccctggaagaggccctactgcgcctcgccgagttcctctccgtccagctgggggcggaagagagctgcgggggcccggcggacctgggccaggtgagcgcggcggagggggctgctggcaggtaccacctgccccggccttcctggctttcacagccctgctcggattcttgtctccttcgcagtctggcgaggtcccctcactgttgacagtgaccagtcagctcttggcccttctggcatggcttcgaagccccagggggaggcaggccctgctccaggggactcagccagcccctcgggtccggcccccctctccagatggtgagtaaaggacagtaagttgaagaagaactctggagggagcaaatcccggtagaacctgggcggcctggagttcggggtcatgttccggaagatttggactagagacctcttcagtgctaactgggcccaccctactccaggatccacatcccaagaagaaagcccttcccacttcaccgcagtcccaggcgagccactgggggatgagacccagggacagcagcccctccagttggaggaggatcagagggcgtggcagcggctggagcagctcatcctgggacaggtgaggtccctggagccag

SEQ ID NO: 587350 - DNA, 4001 bp, Homo sapiens
acaggagggcgaatcagctctgggaaggatgtgcgtttctcgaaacgcctgtggtacagccctcccctgcctccaccctactcttcagttcttgaaggtcactgccccagagggccacctgccaggccaggccaggatatctggaactccaccatgtccctggagagtaagggcccagggctatgtcttctcagcccaggggtcttcctgacaatagtcaaaaggaggccgggctgcatgagaccccatcctagttccagcacataccctgtcagggtaactgactactgtcctgaggggccttaggaagctcactgaaagatccctcaatccctctcaaaaatgggcagttttcatattcctgcaaaattcctaagatttattggagactaggcctcttctctggatccacaaccgtgtccagcccagaatcaggacccccaaacgtgtctgggaccctgtccctttcattctggtctagacaagtccccacacgtggccaaaggacagcacccagactctgcccctgaccagtcaatgtgcagcaaacccacttcagtaggcagaagagtctacccctagggagaaggcgccaggagcaggcaggtgggagggaaagtgttcggcagggcagaaaccctgcctggctgtatccaactgtcactcccactggaggcgctgtgtatgcagggcccggcagtaagcccagctgcctacagccaaggcccagcgacagacatcctccttcggtagcagcagcagcctgtcctcctccagccggctcaggaggcctgccacacccagcatcgcccccccccacatcccataagtgttggccgtgaagacagctacaatgaggatggtcactgcgaccaccaacagcattgcctgaccagccacagagcggccctcagggccgaggtggccgccagccactgccagcaccatgcctcctcccaggagcaggttggcagaggagcggtccccattcacccagtggaaatcgaaggccagaaggggaaggccgatgacggtggccacccaggctccagcaaggcagtcttcgtgtgtgctcagccctggggccagcgtggtggtggcagccaagacctggagcaggaagccagcagcagcccctcgacttgcctgtcaacacagggaagggagaacacgtgggaaaaagaggccggggtcacccttttaaacaggaaagggtttggggcttccatggagacctggtcttagacgcacttcccaccaacctctctctaattcaggaaactaggtccttggggtttgggaggtatggggatgcgcccctgctcagccccagtgtactcacctcggctgtgctcacggctgcgtgcagagacaccactcccagcaccagatgggacagggctgtgctccactcggcccccggcttgggggccatggcacctcaggcggcagtatgtacgaggacacagataggagatactcaactttggagaggaaggaagcgcagaagccagcgacctggagccctacgcgcggcactctagtaagcccaggttccaggtccccattactggatgttaggagaagttcagtcctagactttccggatccctgaggccactgcacacacctgtggagaagaagaacctaattcagccgggaaacgggggaaaacgactcagggtctaagctggggggaacgtcagccctggggccctggagcccaagtgggagtgcgggcctggggaagagagagcggcgaggcgctgcaggcccacgcggcggcctcggcctgctccctgcgttccgggaggcgttgtcctgggaacccgggtccaggaggagcgacggcgcaggactccgggaggccagccgtgcgcagttaccgggctgcgcggtcccaacgcagcggcgagcgggaggcccgagcctgcgcaacgcaccgcccaccgccgtcggccctgcctcctctgccgtgcccccagttgcgggagcgagcgcggtcgggaacctccaccagcgagaggagcggaggctagagcggccgggcggggctagagcggctggggggggagggtcgaggcctgggggagagggtcgagacctggggggggccggttggaggccgtaggagcgggtggggtcgggaggagctcggggaccagaaaacgctctgtttgggtgggtgcgtgcgtgggcatagtggtttggaaggagcgtgatgaggggagaagggccggggcggggctgcgaggggcggggtctgggcggggctgcgaggggcggggggtctgggcggggctgagggagataaggtttaggcggggctgagagcggcgggtctgagagggagggggcctgggtggggcggggcctgggcgaggatgcgatgggggggtctgggcgtggctgcgaggggcggggcctgggcggggctgcgaggagaggggtctgggcgagactgagagggaccgagaggggaggagcctgggcgaggctgcaaggaacggggtttgggcggggctgcgaggagggggggtctgggcggggctgagatgggcggggctgagatgggcggggctgtagggagaggaaggagaaccccggcgtgttgaaggctccgcgaaaccggagcggtgggggactacgcggagggtgggagggattccgagaggagggtcgcgggagccgtgggcgctctcagcccggtgtccgcggtgtaggggttggggcgcgccgggcggcgccgtgagaaacggcgggtctccaggtgcggccgcgggcacctgtttctagtacccccgtccccgcgctcgccttccagccgtgggagccgggccgtgggggcggccgtcgcgagcatgcgcaccggcactgcggcgggcgggcgccgagtctgggcgcggggacgcggggcggcgcgaagcggggccctctgccgccccgcgctcccatgtacgccttttactcgttgctcatctacatcttctacagcctcttccgcagggatggtggcgccgcggcggccgcggagcccggggaccccgcccaggtgagcggggctggccgtgcagcccgtcgtctcccgccgcctgccccacccccacgccgaggttcccggggcgggggcgggcacggggcgcggggcgacggggccgtgccgaggaccctcggctcggccccgatgctggaagcgtagacttcggccccaatcctccggcccggttcgcggagggaaggggccagcaggctgcctgcccccctcctcaggggcgcccctgccccctccctagagagcccgcaagccccggggtcgccggcgcccagacctgcccgcgccagagctgtggaccgagctgaccggcctggccggtaggtgcgggctgggagtcccgcggtgcgagggcggtgccgggacctcccagggaggggcggaggcctggctcaagcacgtgacccgaaatgtctcccgccctcctccctgaccggcagccagctccgagcctgaggatgggtcggaaggcgcagccgagggccgcgcggccgcggtgtccctggaagaggccctactgcgcctcgccgagttcctctccgtccagctgggggcggaagagagctgcgggggcccggcggacctgggccaggtgagcgcggcggagggggctgctggcaggtaccacctgccccggccttcctggctttcacagccctgctcggattcttgtctccttcgcagtctggcgaggtcccctcactgttgacagtgaccagtcagctcttggcccttctggcatggcttcgaagccccagggggaggcaggccctgctccaggggactcagccagcccctcgggtccggcccccctctccagatggtgagtaaaggacagtaagttgaagaagaactctggagggagcaaatcccggtagaacctgggcggcctggagttcggggtcatgttccggaagatttggactagagacctcttcagtgctaactg

SEQ ID NO: 587351 - DNA, 4001 bp, Homo sapiens
gcggcctgcgagagtcgcggagggactcgcacctgggggcagggaggcccacgcgagctgtggcgccggcgcggcacccacgctccacgagccagtggcggccgccgacccctacggcggggtgtgcctgtgtctctgtcccccaagactcaggcttgtgttaggggctctcgcccccttccccgcaggggaaggacacaagtgaaaaatcccgccggccacccctctctgtcgggtgcgggaccccttaggtctccacaggagcaagcggagagacttccaggagaggggactccagacccctaacccaccggaatctaatcctctgctcgtccgaaccccctctaaccctggggttggagactgaaggggtccactgaggaaaacgaaggtattagggaatagggctggcttccacaggccggaggtacacaggagggcgaatcagctctgggaaggatgtgcgtttctcgaaacgcctgtggtacagccctcccctgcctccaccctactcttcagttcttgaaggtcactgccccagagggccacctgccaggccaggccaggatatctggaactccaccatgtccctggagagtaagggcccagggctatgtcttctcagcccaggggtcttcctgacaatagtcaaaaggaggccgggctgcatgagaccccatcctagttccagcacataccctgtcagggtaactgactactgtcctgaggggccttaggaagctcactgaaagatccctcaatccctctcaaaaatgggcagttttcatattcctgcaaaattcctaagatttattggagactaggcctcttctctggatccacaaccgtgtccagcccagaatcaggacccccaaacgtgtctgggaccctgtccctttcattctggtctagacaagtccccacacgtggccaaaggacagcacccagactctgcccctgaccagtcaatgtgcagcaaacccacttcagtaggcagaagagtctacccctagggagaaggcgccaggagcaggcaggtgggagggaaagtgttcggcagggcagaaaccctgcctggctgtatccaactgtcactcccactggaggcgctgtgtatgcagggcccggcagtaagcccagctgcctacagccaaggcccagcgacagacatcctccttcggtagcagcagcagcctgtcctcctccagccggctcaggaggcctgccacacccagcatcgcccccccccacatcccataagtgttggccgtgaagacagctacaatgaggatggtcactgcgaccaccaacagcattgcctgaccagccacagagcggccctcagggccgaggtggccgccagccactgccagcaccatgcctcctcccaggagcaggttggcagaggagcggtccccattcacccagtggaaatcgaaggccagaaggggaaggccgatgacggtggccacccaggctccagcaaggcagtcttcgtgtgtgctcagccctggggccagcgtggtggtggcagccaagacctggagcaggaagccagcagcagcccctcgacttgcctgtcaacacagggaagggagaacacgtgggaaaaagaggccggggtcacccttttaaacaggaaagggtttggggcttccatggagacctggtcttagacgcacttcccaccaacctctctctaattcaggaaactaggtccttggggtttgggaggtatggggatgcgcccctgctcagccccagtgtactcacctcggctgtgctcacggctgcgtgcagagacaccactcccagcaccagatgggacagggctgtgctccactcggcccccggcttgggggccatggcacctcaggcggcagtatgtacgaggacacagataggagatactcaactttggagaggaaggaagcgcagaagccagcgacctggagccctacgcgcggcactctagtaagcccaggttccaggtccccattactggatgttaggagaagttcagtcctagactttccggatccctgaggccactgcacacacctgtggagaagaagaacctaattcagccgggaaacgggggaaaacgactcagggtctaagctggggggaacgtcagccctggggccctggagcccaagtgggagtgcgggcctggggaagagagagcggcgaggcgctgcaggcccacgcggcggcctcggcctgctccctgcgttccgggaggcgttgtcctgggaacccgggtccaggaggagcgacggcgcaggactccgggaggccagccgtgcgcagttaccgggctgcgcggtcccaacgcagcggcgagcgggaggcccgagcctgcgcaacgcaccgcccaccgccgtcggccctgcctcctctgccgtgcccccagttgcgggagcgagcgcggtcgggaacctccaccagcgagaggagcggaggctagagcggccgggcggggctagagcggctggggggggagggtcgaggcctgggggagagggtcgagacctggggggggccggttggaggccgtaggagcgggtggggtcgggaggagctcggggaccagaaaacgctctgtttgggtgggtgcgtgcgtgggcatagtggtttggaaggagcgtgatgaggggagaagggccggggcggggctgcgaggggcggggtctgggcggggctgcgaggggcggggggtctgggcggggctgagggagataaggtttaggcggggctgagagcggcgggtctgagagggagggggcctgggtggggcggggcctgggcgaggatgcgatgggggggtctgggcgtggctgcgaggggcggggcctgggcggggctgcgaggagaggggtctgggcgagactgagagggaccgagaggggaggagcctgggcgaggctgcaaggaacggggtttgggcggggctgcgaggagggggggtctgggcggggctgagatgggcggggctgagatgggcggggctgtagggagaggaaggagaaccccggcgtgttgaaggctccgcgaaaccggagcggtgggggactacgcggagggtgggagggattccgagaggagggtcgcgggagccgtgggcgctctcagcccggtgtccgcggtgtaggggttggggcgcgccgggcggcgccgtgagaaacggcgggtctccaggtgcggccgcgggcacctgtttctagtacccccgtccccgcgctcgccttccagccgtgggagccgggccgtgggggcggccgtcgcgagcatgcgcaccggcactgcggcgggcgggcgccgagtctgggcgcggggacgcggggcggcgcgaagcggggccctctgccgccccgcgctcccatgtacgccttttactcgttgctcatctacatcttctacagcctcttccgcagggatggtggcgccgcggcggccgcggagcccggggaccccgcccaggtgagcggggctggccgtgcagcccgtcgtctcccgccgcctgccccacccccacgccgaggttcccggggcgggggcgggcacggggcgcggggcgacggggccgtgccgaggaccctcggctcggccccgatgctggaagcgtagacttcggccccaatcctccggcccggttcgcggagggaaggggccagcaggctgcctgcccccctcctcaggggcgcccctgccccctccctagagagcccgcaagccccggggtcgccggcgcccagacctgcccgcgccagagctgtggaccgagctgaccggcctggccggtaggtgcgggctgggagtcccgcggtgcgagggcggtgccgggacctcccagggaggggcggaggcctggctcaagcacgtgacccgaaatgtctcccgccctcctccctgaccggcagccagctccgagcctgaggatgggtcggaaggcgcagccgagggccgcgcggccgcggtgtccctggaagaggccctac

SEQ ID NO: 587352 - DNA, 4001 bp, Homo sapiens
tgtcagccacatttctgcaaaactcaaagctttatttatgtccagctggctgttgtgagctgttgacagtgatggcaggcagaagatgcacatgctcacatgcgcccatgcaagacctcaacaccatgtgtgaagagacacatgtacacatgtgcacagacactacacccatgccggcacctgcacatgcacacacagagacactcgtgcacacacaccacacatacatgcacacagacacatgtgcacacacgcatgcacacacaacacgtgcaaatgcaggtacagagaaacacacagcatgtgcacagatgcaagacgcacacacatacaggtgcgctccccttccttccgttatgtgcacccagccttctggacttgccttcctgggtcctgactccctcccagatgtcgtctgtaggccagcctcagtgaaggcccccacccttgagtgcccttttacctaaaccccactattcccaaaagcgttctcctcctgccatggagtgggggctgtcgccactgtgacatcctcgtccagtccttcccccgtcctaatgacaacattcctgcaggtgactgactccaagcatcagcctctccctgcccacctgaccaggcgccaccctctgcacgggccaggaaacatcctccccagtgccatcaaccgccccacctcgtgccttgcttctgagaacaatggagccaccagccacctgcatccccacctgcctcctgccccggactgtccccatcaggaaggtttgccaggactgcagggaccctgagcgccctgagggaggctgcggccccggcgaacaccaggctcagtactcagcctgtgacctgggccagtgggagtacccttctcagggcctcagttttctgacctatgggaaggacagtccccagaccgcaagagaaagcatcggccaaggttggtgcagagcgggttctcactacacagaagggctcattgctctgcatcttctctgcagaggtgcccgtgcccatttctccaccaccgccctgcttccccaacccacagggcagacacgaccccacggaatggccgtcctctgggtcgggtgctcaccctcactgcccaccacaggggcccagggcagatgtgcttttgggtcctgcctctctcgcctcccccctacacccaggctgcccaccctgctcccagctctcagctcgccgcttacagcaagaacacgccacatttgtgcccacgatgttgtctgtaggccacccagggctccaggctcatcctgtggggatgcaggctgtccacctgttgcagcttctccacgtcctccggcagcatcacacacaccatgcctgctcctcccaagtcgtacctgtggggccaagcacgaggccgtgctggatgggaccatgtccccgctagccccaccctgcagtcccaatccaaagtgtctcctgtccaccctcccctctcctggattagcggcttcacagctaaagccctcttgctgactgcccggaacctcttaacttcagtgcctctgagtcctgccctctctgcagcgagctgggatttgctctgcaccatcccctgccctggcagcgccacagaccagcacgtgctgcactccttccccatcttccaaaggatgcagagtgccgggacctgctgggaatggcagtgctgagtgcccggcagggtcctgggcagcaagggcagggctctgggtgttcccagcgagggccagggagggctttacctgaaaatgggccctagttcctggaaggtctggtgtacttccaggtgcaggtcctcataaccctgctccctccagatctgcagcagcctcagccacctgttgcctggacgccggggcatggcttcaaagggcagcactgtcctggggacccgggcggctctcgtgcccagtgcctgtgccctttgcagggacagccagggcactgccatgcacacctctgcctttgccctgagtgccattccaatgctccctccaccctgttcagctgcaatccttttatcttgcctggtgccttgccttcgagagggatcacgtcatgggagaactggccctggatctgcctgagagaccgagggcagaggtcagggctggaggcagggactcattgggggtgcatgagcgtagacaggggaaaaggactctccctcctcctccagggctgagaggagcaagatggatggggcccttatcttatccaagagccttggattattcatctccttgcaaggtttatagcaaaaaacgagggaatgagttggcatgaattgtattaaaccacatgtattttttttactttttaaaaattttagtgcaatcaaactagaactcaggattaagaaactcactcaaaaccgctcaattacatggaaactgagcaacctgctcctgaatgactactgggtacgtaacaaaatgaaggcagaaataaagatgttcttgaaaccaacgagaacaaagacacagcataccagaatctctggaacacattcaaagcagtgtgtagagggaaatttatagcactaaatgcccacaagagaaagcaggaaagatccaaaactgacaccctaacatcacaattaaaagaactagaaaagcaagagcaaacacattcaaaactagcagaaggcaagaaataactaaaatcagtgcagaactgaaggaaatagagacacaaaaaacccttcaaaaaattaatgaatccaggagctggttttttgaaaggatcaacaaaattgatagaccgctagcaagactaataaagaaaaaaagagagaagaatcaaatagatgcaataaaaaatgataaaggggatatcaccaccgatcccacagaaatacaaactaccatcagagaatactacaaacacctctacgcaaataaactagaaaatctagaagaaatggataaattcctcgacacatacactctcccaagactaaaccagtaagaagttgaatctctgaatagaccaataacaggatctgaaattgtggcaataatcaatagattaccaaccaaaaagagtccatgaccagatggattcacagccgaattataccagacgtacaaggaggaactggtaccattccttctgaaactattccaatcaatagaaagagagggaatcctccctaactcattttatgaggccagcatcatcctgataccaaagccgggcagagacacaaccaaaaaagagaattttagaccaatatccttgatgaacattgatgcaaaaatcctcaataaaatactggcaaaccgaatccagcagcacatcaaaaagcttatccaccatgatcaagtgggcttcatccctgggatgcaaggctggttcaatatatgcaaatcaataaatgtaatccagcatataaacagaaccaaagacaaaaaccacatgattatctcaatagatgcagaaaaggcctttgacaaaattcaacaaccttcatgctaaaaactctcaataaattaggtattgatgggacgtatctcaaaataataagagctatctatggcaaacccacagccaatatcatactgaatggtcaaaaactggaagcattccctttgaaaactggtacaagacaggaatgccctctctcaccactcctattcaacatagtgttggaagttctggccagggcaattaggcaggagaaggaaataaagggtattcaattaggaaaagaggaagtcaaattgtctctgtttgcagacgacatgattgtatatctagaaaaccccattgtctcagcccaaaatctccttaagctgataagcaacttcagcaaagtctcaggatacaaaatcaacgtacaaaaatcacaagcattcttatacacacttaacagacaaacagagagccaaatcatgagtgaactcccattcacaattgcttcaaagagaataaaatacttaggaatccaacttacaagggatgcgaaggatctctttaaggagaac

SEQ ID NO: 587353 - DNA, 4001 bp, Homo sapiens
ggaatttcccctgtcagccacattcctgcaaaactcctttatttatgtccagctggctgctgtgagctgttgacagtgatgacaggcagaagatgcacatgcacacgtgcgcccatgcaagacctcaacaccatgtgtgaagagacgcatgtgcatgtgtgcacaaacactacacccatgccggcacctgcacatgcacacacacagacacttgtgcacacacaccacacatacattcacacacagacacgtgcacacactacacatgtgcaaatgcaggtacagagaaacacacagcatgtgcacagatgcaagacacacacacatacaggagcgctccccttccttccattatgcgcacccagcctcctggacctgccttcctgggtcctgactctctcccagatgtcatctataggccagcctcagtgaaggccccgacccacgggtgcccttttacctaaaccccactattcccaatagcgttcccttcctaccatggagtgggggctgtcaccactgtgacatcctcatccagtccttcccccgtcctaatgacaacatccctgcaggtgaccgactccaagcatcagcctctccctgcccacctgaccaggcgccaccctctccacgggccaggaaacatcctccccagtgccatcaaccgccccaccttgtgccttgcttctgagaacaacggaaccaccagccacctgcgtccccacctgcctcctgccccggactgtccccatcaggaaggtttgccaggactgcagggaccctgagcgccctgagggaggctgtggccccggcgaacaccaggctcagcactcagcctgtgacctgggccagtggaagtccccttctcagggcctcagttttctgacctatgggaaggacagtccccagaccgcaagagaaagcagccgccgaggttggtgcagagcgggttctcactacacagaagggctcattgctctgcgtcttctctgcagaggtgcccgtgcccatttctccaccaccgccctgcttccccaacccacagtgcagacgcgaccccacaggatggccgtcctctgggccgggtgctcaccctcactgcccaccacaggggcccagggcagatgtgcttttgggtcctacctctctcgcctcccccctacacccaggctgcccaccctgctcccagctctcagctcccaactcgccgcttacaacaagaacacgccacatttgtgcccacgatgttgtctgtaggccacccagggctccaggatcatcctgcagggatgcaggctgtccacctgttgcagcttctccacatcctccggcagcatcacacacaccatgcgtggtcctcccaagttgtacctgtggggccaagcaggaggccctgctggacggggtcatgtccctcgtggccccaccctgcagtcccaatccaaagtgtctcctgtccaccctccctgctcctggattagcggcttcacagctaaagccctcctgctggctccctggaacctttcaactttagtgcttctgagtcctgccctctctgcagtgagctggggttttctctgcactatcccctgccctggcagcaccacagaccagcatgtgctgcactccttccccatcctccaaaggatgcagagtgccgggacctgctgggaatggcagtgctgagtgcctggcagggtcctgggcagcaggggcagggatctgggtgttcccagcgagggccagggagggctttacctgaaaatgggccccagctcctggaaggtctggtgcatctccaggtgcaggtgctcataaccctgctccctccagatctgcagcagcctcagccacctgttgcctggatgctggggcatggcttcaaacggcagcaccgtcctaggggcccgagcggctctagtgcccagtgcccgtgccctttgcagggacagccagggcgctgccacgcacacctctgcctttgccctgagtgccattccaatgctccctccaccctgttcagcccaaatccttttatctcacccaggaacctgctctggaaacatatcacgtcatgggagaactggctctggacctgcctgagactctcagagcgaaggtcaaggctggaggcccccagccaaaggtagatgaaggagaagtcaggtgcctaattccccattgctgcaagtcctgctggtctgaggatgctgagaaaaggcgtggggtctggactgggggtccatgctggtggaaggtggtgggacctggcctctcctttctccagggctgagaggagtaaaatggatggggactttatcttatcgtgagatgagagggagccttggattcttttaatagactttatttttataccacagatttagttcattgcaaaattgatcaaaaactgcagaaaatgtccacgtaccccctgccctgacacaggtacaccctccaccacaggagcgcactggttccatgtgaggaatctcgatacgttgttatcaaccagggtcctggagtcacatggggtctcctcctggtggtcaacatgctgtgggttttgacaaatgtatgtaatttgtatccctccttgcaggatcctaggagtattttcactgtcttaaaaagaggaaaagaaaacctgtgctctgcctgctcatccctcctgccccagtccctgacatctccgatctttttatcatcaccatgctttggccttttccaaaatgttgtatagttggaatgacaccgtttgtagccttttcaaagtgacgtatctcagttagtaatatgcgtttaaggttcctccatttcttttcgtggcttgatagctaatttccttttttttttttttttctagaggctgggtctcacttctttagtggttgccctagagtttgcaatatacgcttaaaactcatctctccaactccaccttcatataacactatacagcttcagaggtaatgcaagcactttataatcatcagatattcttaggctgggcatagtggctcatgtctgtcatcccagcactttgggaggctgatgcaggtggatcacctgaggtcaggagttcgagaccagcctggccaacatggcaaaaccctgtctctactaaaaatacaaaattagccaggtgtggtggcgcatgcctgtaatctcggcttctcagcaggctgagtcaagatgaatgcttgaatcaaggaggcggaggttgcagtgagttgagatcatcccactgcactccaacctgggcagcaaagcaagactccatctcaaaataaataaataataagatatttttaattccactcacccatcccttgcatcattgctgtccttcatttcacatatacataactatgatcatcaaatacactttctggcttttatttatttatttttattatttatttatttatttatttatttatttttgagacagagtctcactctgtcgcccaggctagagtgcaatggtgtgatctcggctcactgcgacctctgtctcccgggttcaagcaattctcccgcctcagcctcccaagtagctgggattacaggcatgtgccaccaccacgcccagctaatttttgtatttttagtagagacggggtttcaccgtgttggccaggctagtctcgaactcctgacctcaggtgatctgcccacctcggcctcccaaagtgctgggattacaggtgtggtgagtcaccgcgcccggcctatttttattgttgttgttttgttttagcaaactcttagatcaattaagattaagaaaaaataaaagacttcattttctctttactgattccttctgaaatgctcttcctttctttatgtagctcagggttgctgacctgtatcattttctttctctctgcagaacttttaaaaaacatttctggcaagtcagttctattggcagcgaatcccctcaatttttatttacctgagaaaatatttatgttcacttttgaaggataatt

SEQ ID NO: 587354 - DNA, 4001 bp, Homo sapiens
ctaaatagacaagcacataaaaaggtagaagacaaacagaatggtatataaatgtaaaactgcttaccttcgcagaagtagcaaagtgaaattttttccaatcaaaatattttccgtggcacaacaccttatggtatgacaagggatttgtgatgaaatggacatattttcccattagtttgcaggtaaaaacatgaccatgtttcctttgatttgctctgaggaactcaagaggattggcaccaaattgcagagcacagcccaggtatggaattaatccattctctagaggtggttcacccgtttgcctgtcagacacaagtgtatgatagacatggatgattacagttttgggtttttacttacatcaggttttaaaatttttcccactgacttcaaactttgaaaccctatagtttatagatatttcttttgttggatgggccctgctcttttactacagtaataggttatattaacctagtaacatgatatgttggtggaaaggattactaaatccatccattcatgcatccgtccatatacacattcaacaagcacccgtctactatgtgctcatcacttttcccagtgatacaggcaaaaggatttacaagaccaacaagattcttgttgtcagtgcggaaacaaaactacattctagtgtttatcactttgctaagcatcatttttctaaatatctcaaaatgtttcttttgattattttctttaaagacacagatcactgaataagggaggatttcagaactgaggttttgaaaatattcctagtttaaagatatctatattatattctataaggatggtttcagagaagaagaatctcatgtgagaaatcagcttattataaaatgaaattgagtaagataaacactgacggaatcatctattgtaattcagtgctcctttaaaatgtttttattagaacatgtaaacttattttccaacataaacttctgtacctcttgatagaataatacagtataaagtaattacctttcttttcttagtttgaagataagtagtttaattaaaagtaaaaactatcaggcctgaaagaaactgcaaaaggcagaaaacacatagcaatctacaaagctgaaagatggttagggttattttctctttttgagattgacatagcagagaatatctatatgcctccccacaattactccttgagccaattagaagttaaataaactatggttctggatctgactgtatttgtttttcttgcattcttgaaccagttgtaaataaatgaaatcgatgtcacatacactcagcaaactttcccaattcaccacagttgattaacatttatttaaaaacagtaatagaatgatcagctcaggctctatgctcttgttcaggcttaggctgagtctatgcgatgcacaagaatgagcttaaaagagaacatttatttaacaagagtatctattgaagccatgtgagagaaagcaatcctttccattgtagattcccacttgctacttgtatccttactaatctgggcttcctctttagatacacatataaatgtacatagagaccttatacaatttctgtcagttatgtttaacaccaatatacatttatatattaccatcggtatatgccaatactaaaaagggaagctgtcatatgtcttgtgagatatagtaaaaaagatattactttaaaaattcaaatcaaatttttcatttaaaaaataaggaagataatgctaatatgtgtaagtatagaaaaccaaatttactgtataaaaatgaaggtaaaaaaattaaatggatgaatcaaagagcaatttaaagataaaacattacttaccttctcctaattccaagaataagccatagacaacagcatgctgctatagcaatcccccaaatcaaagatgtggtcatcattttgcaaatctaggccaaaatctctgaggaagaaaatctctgattagaaagggaaggatgccactgaaaagagactcaagctaggctttttatatacatagtatccagatccattaacttgagcttggttgacaaagcaaacaattagccatttgttcattctattagaaaaaaaaaagtggtagtaactggccttgaactaagtccacaggtatcagaagtggttccaaagcaatcagagacctgcaatacttgataagttgaaggtctctcaaatatatgttgacttaacattcggacctggggacaacagctaatattaagagtttggtatgtgtaaaaagaacaaataaacctgtttaagatgggcatagctaataaatacataaactataatcatttaaagaaagataagaatgagttattcatcaagcttataatttggtcttgttaacttttaaagaagaattaatttaggtgctttgccagagagacggtgatcaagttcagaggaaagagaactgggaaaaacatttctgctgcttcatgtttcagtgcttttataaaatcatagatattttactacatatagtaacatgttactcacctaacatcctcaagagagtattctacataagtgcatcctctagataaatataacttattggaagcatcaaaattttatctatcattcttgtgactaaaatgtttatcaatgtttctaattattaaagtaataaatttcatttcaagtaagttaagactaactaaaacatatcttggtggaaagtgaacatctattaataatttacctaccatgctactcctttactcagaagtaaccactagtaacaatttggcatctgttcttccaaactttatttctgtgtacacaaaaatattagttgagtatttattacgtgccaagaactcttcaaaagtattccagttgcaggcattaataagataggcagatttcctaatctaatggagattctattccaatggagaaaggagtaataaaatacatgttatgaaaaaaataaaacatggtatagaaagctatgggggaatgaggacaactttagatatgatgatcagagatgggctctctgaaattgtgacatttgagatctgaatgacaagaagagactactcatgtgaatatcagaaggaaggatattccaggaagaggaagcagcaaatgcaatgtcttgagtcaaggatcaacttggtgagtctaagaaccaaaaagaaggatgtatcctactgaagcagagtgaatgagagttcacagaattaagacaaaagaaggtaggcaacagtactgtgtgtgtatatatatgtatataaacacacacacacatacacccacagtattctctatatttatacatgtgtgtatctatatgtgtgtataaataattatattgaatatgtgcttaatcttccattggataaatgtactataatttatttaactgatttcctattgatggatatgtgggttgtttccagttttggctatagatgccatagatttatttcatgtgttttttgtttttgcctgtttaaacagagatcacacattttttgtgtgtaatttatcaccataaatattaatatcaatcattgtatggcagtacatagatttttcttagaatctaggtttttggggggctttgtgcatttatttagacaggtggatttttaaaaaattaatatatctttttaaaaatatggcttatagaaaagctgatcttatacatggacaatcacagcaagatatcccagtcagataaaatgccaatctaatatccaaataatacagccctttagagttacttctcgggcaaatgaagaacaagcaaatatacaaaaatggaaaggaagtcaggcatggtagtgtgacatggtttggctgtgtccccatccaaatctcatcttgaattctcacgtgttgtgggaggaacctggtaggaggtgactgaattatgggtgcagttctttcctgtgctattgtcatgataatgaataaatttcatgagatctgatggttttaaa

SEQ ID NO: 587355 - DNA, 4001 bp, Homo sapiens
atttttattaacatatattcatgcatattagcataagctttaaaaaatctgtaagaatatatcagggactcttaaccatgtttctgttcttagaggtgatatctgaaaaatcattttcgtagagcattagggtaaactatccaaacattagaaataaggaacatgactctgtactgggacaaatgaagctatcttctatacactgaaatgcagtataatcaaagtagtgtcctatagatttggggcattaaacggtcttcctggtatgaaggaattggcagttgatggcatgaatatctcagtaaaataatttttcatgatatagagaaagatcagcctattctcagaatgctagaagagaaagcctaccttgcccttttgccttcctgtccctcaagttccacattctcacaccaatcaccttcactgatctaaactgccctagtcagcttgtctgtttctaccctgcatgtaaagtgggaatagaaccaacagccttcttttaccacctctctttaaaggcatacctaggggtgcatcttaactggcttgcaaatgcaaatagagaccctgcaaatagagaaggtggaacctacatagaatcacataccactgaagttcaagtgtcctgagtcctcatcttgggctctaaagcaaaagtacagccattggaaaaggcaacctggaagcgcacattccaggaacatctctgaaaactgacatgggaagaaaggcaaatactcctagagtactcatctccaggcattctagaaatgtccatagatatttgtatgcagtacaaaggtgtcacttcccccaaaactattgagaaacaacctgtatcacacacacatagatatctatacattgatacatatgtatgcaaatatacatacatatatcaattatcatccaacaaaatgcatccgcttggttctcaaaagcgatgaacaccagagcagtatgaaaataggacccagaaagaaaggaaaaacagattaaactcaaagtgaatgattttatctgaacttctctatttctacttccacaattcaaattaaagtgacacacgtctagattttgtcattattgtgtgttttgttttgtccttataaaaatgataggacaactgcataaaatactctccattaactcatttagtactcacaaaaatctcacgaggcatgtactattatttcagctttccaaatgaggtacagtgaggtaaactgaggaagagaggcactcagagttattgttcacaccatgcactggcattttcttgaaacagttctcttttaactgatgaaatttaagaatattcccctcctgaaatgctctatgaattctaggccataaaatatcaactcgcagtggcaaggcacacaatgtgtctgtgatgcataatgcataccgccaacctagggcttattacaacttacgctggagcagcaaatggaattcggtcccaaagctttaatatgtacgcgtatgtgtgggaaaaagacagaagaagcctttgttattacaaagtcccaaaggaagccagtaccccgcagcaagttctgactgtctgcactggaaatcatggagggggactcccctcgccatctgggtcgcgcgcggcccgcggggcccagggcgcatgcgtggcctggcggccgaggcgcttacctggtgcgccggacaagcaagcagagggccaggagcagcagggccgcggcgagggccaggcccgggaggcccaaccgctccagcgaaaagcggcccgtggccgcggacacttctcctgccatccggcgcgcgctaggccgcggtgggcagcccggggtctgcctgcgaacagcgcggtcggcgactctgcagcctgcggcggcttctctcggcggcgccccctagtccagggccggagaggctggcctgcccgcagcgcagacaggaatgtcaccgtggtctcccaggctgaatgacaaaagttcgtggactgccccctccccgcctatcctccacccacgcgtaccgccccgttcccccaccgtttccgacccggcagcttctggaaaacagcgcccttgatcctcccgggcaggaagaagggccaaggaaggggttagaagggaaagagttaggatttcccaagaaccagccctgaaggcctggaggtgggggatttcgcttcttagttggacgggagccccttgggttcctcacttcttagcccgcgccctgcgggaggagcgactctgcttgtccctcaagatgcttgtgaaggtgcccgctgcgctctgacaccggcgatctcttaggtacgacccagcggggttgggctggcggcagaaaccggcggagtgcgcgacctcgaacccgtttcgcgcccacctccttcacccccttacatcctatttgctcacaagttttggttcaggcctgctgtgtgcagaggcgcgtgccagagacacggaatacaaagacctaggccgtaagcctttagaagtcccgatgaggcacacagtacaggaagagagtgagacaggtaaaaagagattgcagaacagcgtggtaggggacgaaagagaagtggttcaagtactacaggctgtactcagaaagaataagggagaaacttttaaaatacctttttctgagtaatgaccatccactgggtactttacccacgtttttactttctatttttaatgtgtattttatagaagacataatgagactcagattaagtaactgaacttggttgctcacttgataaatgtttaccattcccactgataaatatcggccgttctaaccacggtcctattcgaggacttgtgtgctctgtcaatgcaacacttctctggaatgggtacagcagcttcaaaaccaatctctggttttttacccttccagtccatcatccccatttccacctccctaaaacacagacctctccagcttttactctgttcaaaactcttaatggttgtctttgtgacgaagtcatatcctccacctgcaatgagaagccctgcacaaattgtcttcattgtacaactcccctcgccagaacggttccatatatatactcaagcttgggccaccatgtccctcatactcagcctgttcacattattaacttaaaaaatccattgtagttttgatttgcatttctctaatgatcagtgtcattgagctttttttcatatgcttgttggccacatgtattttggaaatcagtgtggtagttcctcaaagacagaactaccataggatctggcaatcccattactgtgtatatacccaaaggaatataaatcactctgtcataaagacacatgcacgcttatgttcattgcagcactgttcacaatagcaaagacatggaatcaacctaaatgtccatcagtggtagactgcataaagaaaatgtggtatatacaccatgaaattctatgcagccataaaaaagaatgagatcatatcctttgcaggaacatggatggagctgggggccattatccttagcaacagaaaagcaaatacagcatgttctcacttataagtgggagctaaatgatgagaacacatggacacatagaggggaacaacggatactggggcctgctggagggcagagtgggtgaggagggagacgatcagaaaaaatgactaataattactgggcttaatagcttggtgatgaaataatctgtacaacaaacccccatgatgtgaatttacctatataacaaacctgcacatgtgtcctaaacttaaaagttaaatacataaaataaaaataaaaattcacaatttttaagttttgaaaaggagagaggagactttatttcttccaaagggttacagcctgcaaggtggccatccaggcaaaactagagacaggcccttcaaaggagggcttggggtgggagctttatgctgaagaggttggctaaacatatatatttaactggttacaggaggagctatgaatattcatgaaggtg

SEQ ID NO: 587356 - DNA, 4001 bp, Homo sapiens
gtctgatgggaaagactattaaccaaaataataatcatgagacaatgtgataaacactgtgaagaagtgatagaatcacagaagacgggtgctgaagggggcggggctcatgcaggaggtaagcaggaacagattactgttcggtgaaagtcttccagagaaagcggctaaactgggtaagggtgtgtgccacaggaggccttaaaaaagatgactgaaacgcactgagatttgcaagggtgaatactaaaccacttgtgggaaacgtagtgactgactaaagtggcaaggaaggtgggaccagagattcaaggactgggaacgatgccaaatccaagtgacaaatctaatttatattttagaaacattactgccttgtgacaaactgtaaacatcttttgagcagagacttattagcaatgctcacacacatgttgataatatctcctactcaaccaaaatagtgaaatactgttttcgcctcatctcatctcgcttactcctcattcaaactaatgacacagcccttctttctatgccttaggttcattcctgcctgaagacctttgctcctgttattctctttatttagaacaatctgcttacgcatggttggtcccttgtcatttaggtatcacaaagtacaatttataagtggttagcatgttaacgggggaacagaccaggaaggataaattaatttcatttaaccattctttcatcaaacttcttaagggatggtaagagaaaactgatgcttttaaattcatctttgtctcttccaacatccacaactaatgtgaagtagtaaagcggcaagaagagcagtaggaaggttttaaaagcctgtttaactctcagcccttcaacccacgagtttggctcattcaagtccacttttcagtaataggaacctgaagacaatcccagagcagcagctggaatttttctccactatagacaactgtttcccactcaccactagaggaaattcttagaaaaaggacttgaacagactttacttgctatccatccagttccgcagcgactccgtaagcacaaagtttgccttagcgaaaggtaactgagaaagaaccagaccagagtgccagcctcccccggctttactccgcgaaagccgaggctagacccaacgacttgcggaaaccgtccctttctccctaccaacttatcttacctctctgtaagtccaacttggtttcgcggacataattgtccggattccggctcagcatcttcaccttcatctcggttgctcttccggccggactccacgaggtgtccgctaggagttccgcccaccgccacctcctcccacaggcgacttccgcttttcccagactacttccagtcacgtgactcgcggagcggcggcctgctggctcaactggatcctgcgccgctccgtagttttgccggcaaacgttagcaaggggcggttctttagctgtgcagtcgcttccgcgtccgtgggctggagcatttgtgggcgaggcagggcggagactcgggagaggctgggacctcccctccatcgcgctttccgccggcgtgacgtagtgtctgtgccccgttcttgccccctcagtactagagtctccggcttcgctcacgcgccttgggcataagagtcctctcgttggtcccggaggtggggttgcgctcacaaggggcgaccgtcgccacggtggcggccactgcatcgcgtcccacctccgcggccctgggcgccgtggtgtcgacgggccccgagcctatgacgggccagggccagtcggcgtccgggtcgtcggcgtggagcacggtattccgccacgtccggtatgagaacctgatagcgggcgtgagcggcggcgtcttatccaaccttgcgctgcatccgctcgacctcgtgaagatccgcttcgccggtaagagcccgcccagacaccgggctgcatcctctcactgtcagcccgaactggatctcctccgtcttttccgttctagggggaggaggagcgttgaagggagcgttgctgtccgcgttggctaacctgaactagatttgaggaaatggtgcttggtggaggggtcggcctgcgatcttccccgctcctcaagactaagagagggggcatgtatgtagagaagtctgagaaaaaacatcctcattggcagagaagatgggattcaaagcctgatttgtaaaataaagaagggattgtcacattttaaggtttagtcctcacacgtgcaaatcattcactcttggaggaactttgaaatcttagcatacccacgtggtttggcagctcgactagtattgggatagggcgtaatcttcagcgaatggttgggagtagatttagaatagaattctcttgaatgtttgttttttggcatttgtagaatggtacaagtttctgtgaaaaaatagctagaatcgaaatactattttaagtgtattagatgaattgagtatgttgaaattaacaaagcattttagaagttaaactcaacactaaagtctggaaagagtttcaaagatgatctttgataactgaaattgcagaaaatagtttccaaataaagttattacaagttaagttcagccttgagaattaaatctacagaagttgtttattttagcattaggcaattcagttcacttgatttatattctcttaatatttgtagactgctgtatgggctacagaagtatctaataaagttcttgccttcagggaacttagaatttaattgtaggcgttagacttagtcatataaaaggtaattctagacaacataaaatcaagaaatacaaaaacaaaatataaatacaggtaaaccgttaagaaaattctacattactgatggccatgtgtatctttaaggttcagtggaagattggggcttggggtttcccatagaagggctaatattttgacagctggagaggaagcaagaacccgttctatgaaggaaaatcatcgaaaattatggagtattatctctagaaaaaacaccacaaagacatataatgtcatgaagttttatgatgcatgcacaaataattatgttattgacaagtaatctttatcgagtatttactaggagcaaggcagtgaactatgctttagatgcattatctcatttattatcctgtaaatctattcacaggaacaatcctgtgagtttatgatatctgctatacagatgaggataacagaagttgactaacttgcccaagtcacaagtttgtaaagatggatctgggatttaaacccaggtaatctaactctggaaccctctggcacttaacccctcaccgtattacctctataagtacctgttatacaatggtttgaacattggaagaattttagacttgcctgcaggtgcaggcctgtatgacttgctgtctgtcttcagtagcattttatctaggagcagaagaggtgatagtcgaggtgatcattgaagaatagtgtggttggcctgatgagtttagacagtgctttgaagcatatcattcctgaggaaagggaattcttggtacctgagaagattaatagtcttgatgaattgggaagagtattaggagactagtggggctgaggtgacagataaaaggattgagtttggattggaggcctaaattaaagatccaggagtggaagcaggactttgtaataataaagctcacagtgtagctgtgaaatggtgataggaggaaaacttaagaagatgaataacgaaataaaaatttattgattatcaacatcagtgctgagtaacatactataatttttatgcttccatgtaattaaactcatttaataaagttaaaatctaatgatgacagggtgtgggggttaattctgaatgcatgtgctattaaaccaaacctggaatttttctgtgagttcaagtataaattggaactcagaggtgtccagagtggtagaaagattagaaattacttcatatgaaaaatg

SEQ ID NO: 587357 - DNA, 4001 bp, Homo sapiens
ttgaatcctgacattcaagtcacaataatagaaaccggagctgctgtaccttacattctggaagatgcctcaacaaaagcacgttaaggactgtttaaaacttctattatttaaaaagatccacctttcctcccattgcctatggaaaataataaaaggagaatctcagagatctgctattgagtttgagaaggccaagtttaatgattccaaaatgtagccttaaaaacttctggagagactcagataaatgacctccccctcctctcctctcccactggcctcttcaagtacagatgatgcatgtatttccggaacccaggtaggactagtcaaacagtctcatgcttctctaaaaggcttctggtgtaagcagttttaatttattttagtttttgccaatcttcagtccttagaaaagtgtttttttgttaaaaaaaaaaaaaaagggggggataactattctaaggtattcaacaagaaaaggaaatagttatcttttatgaaaaggactttcaagctctctcagcccagtttaactgaaacaactttacagaactatcttcacataaaacagcaccttacccctagcagccggatggatgggatctacaaacaccgaacatctcttaaaatgcgctcatagaaacggtaatacgatgctctttacttctttaagtcaaatccacgttcctccgggctgcatcctgaagaattaaccgtaggagaaacaataaaggtcctcccggacagccatgagcagccctggtgctcctcggaagcccccgaggcgagaagagaaggccacactgggaatgtcgttctccgaggcggggtatggggagggtatggttgtgagcaggtggccatgacggaggctccagattctcgtgtagcagtcctggcccacggccgccacgactccttcttcttcgttcacatgcacgggtaggtaggcggagttattcacatgaccttcgtactgtgttacacatttagtggccctcaagtcccacagcttgatagttccagtcatgtctgatgacaccaggaattggccatcttggaggatttgcagagaagtcactgctgaatcatgggacaggcaaatggccttccacccgctgccttgatttccacagcgcagatcaatgccaaagatctccccagagcgacagccattaaacagcaaaggagtcatgattgcaaactgctgggccaagacatcactgctagtcccaaatgactgctggtgtcccgtcaccacgttggtcaacaggacctgctgagacaagcctgtactgaaagagtgatacgcgtggatgctcagggaccaggcacaggaccaggcatcagggatctggaaactgcaaagcatgccaggccgacgcattcctgggaagctacctatgaacagcgacgctgggagcagcacggcacagcttggagtatctgcaagtcccacgaagcacagcagaaggtgggaatccaagtgattcagtgaggcccagcacatagaattcaccttccgattagggacgtagagggttttgtgcgggtatacccggagctcaggggtcgtcaggcctcgcatggtgatgatgccgtacttggagcctccagcttcgacttggttcactgtgaagagctggtcagtgttggtattcgccagtatgcggttaaatcggtcgcttgccaaagaggagggatcccagctatgaatctggacctttttcctctgcatgcagcttacacgcagctcgcgagctatacggcaatagttggcgaatctgaggaaacctagctggttctttcgtagcatggaaggtgcattgagtcccactctgactgtctttttctgcttgtctgcttcctcgagcagtcgcggtcttttgctctccatttcgttcggcggatgttctccctcctgaggggaagttctgtcccgggagtaagaggaagtaccgcttctttacaagcacgacttggcacggaagaacttcccgctgcgcctgcgcctgtgcgtatgaggtcgacccggacgagattcttcgtcgccttggcccaaatcccgaatgctctgaggtgccctgacataactctcgttagaatcgcgtgatctgaaacaagagttccgctgcttctctcgagttttcccctactcagacagctgcttttattcatttctattcctgtttagagattcttttccgacccctcttacacacgtcataatagctgtatgcatacatttctcttatttactaagaagtgaaattggcccagcactttgggaggccgaggtgggcgtattacgaggtcaggagttcgagaccagcctggccaatatggtgaaaccctgtctctactaaaaatacaaaaatgagccgggcatggtggcgcgcgcctgtagtcccagctactcgggaggctaaagcagaagaatcgcttgaacgcaggaggcgaaggttgcagtgagccgagatagccccactgcacttcagcctgggcgacaaagggagacaccgtctcaaaaaaaaaaaatttgaaagtggagggttattaggtagacatatatagcttaagtagatattgacaaaccaattacactcttgtcaaaatatggcttaagtagatattgacaaaccaattacactcttgtcaaaagtgtatatatatccttgccaattcttgttggtcagtttacattttagatataaataatttataattgtttttgtcttcctgttgaaagattgccattattattataaaatattcctttttaacttttatttattgattgactttattttatttttgtgagatggagtcgcgctctgtcgcccaggctggactgcagtggcgtgatctcgattcactgcaagctccgcctcccgggttcacgccattctcctgcctcagcctcctgagtagctgagactacaggcgcctgccaccatgcctggctaattttttgtatttttagtagggatggagtttcaccatgttagccaggatggtcttgatatcctgaccttgtgatccacctgccttggcctcccaaagtgctgggattacaggcatgagccactgcgcccgaccaacttttatttattttattttattttattttattttattttactttattttattttttgagacggagtctcgctcgtcacccaggctggagtgcaatggctctatctcagctcgctgcaagctccacctcccgggttcaggccattctcctgcctcagcctcccaagtagctgggactacaggctccgccaccatgcccggctaatttttttgtatttttggtagagatggggtttcaccatcttagccagaatggtctcgatctcctgatctggtgatacacccgcctcagcctcccaaagtgctgggattacaggcttgagccaccgcgcctggcccaactttaatttttttaaatctgtgttctctgatattaaagtatccttatccttaaacccttcttgtctaatatttatatatgcaaccaagatttctggttgatagtgtttgctgtaccttttctcaccttttactttcaacttaaatttgttctattatgtaaatgggttcatataaacaatacattgctggtaagtttttatccagtataataatttttacctttgaatgtgagtgtctaggcaatttaatgttttaactaacccctttaaaaattcttgaacagtcttagatttacagggaaattacaaagatagtatagagccttcccacatactctgcacccagtttccatattattaacattttacgctagaatgataaatacattgcactaataaaccaatattgatactttattaactgaagtccatattttattcatatttccttagtttttatccagtggcctgttcctgttcaaggatcccatccatgatataatattaattatgttcccttgtgcttctcttggccatgaccttttcttagatttt

SEQ ID NO: 587358 - DNA, 4001 bp, Homo sapiens
ccaccaagggccccatctctctttcatggggttaaagccctttttgtggctgagtggaagggaacaggaaaatagcagaacagggttagggatgaagagccctgatttgagctgagagccctgcagagccatgcagtctgtgcatctggcttgagcccacatttacctgctttcatgcagggccaagctgttgccatgggaaacagaaacagccagacttccacatcaaccctgcccatgctagctagcagacacctctgcaaggtacatacacctcaatcgttttccctgcatgggatctcagtgtcagtgggagcattgagagccccagcatggagggcacagggctcacagcccccacccacagagctctgtttggccacctttttgatgagtgaaggagaccggcattcctgagcactgtcttttgagcacagatcaactttcaaggtgcagatgaatgtgtccttgcttcagatacaaggtccagtcagaagctacaaaaaatggagccatgaaataataatgagaatctccacatgaatggcccaccctaggagctttctagactggaggggtattgaagctgcacatcacccatgtgtctccagagctggtaagcagaaacccacaggcttactgctattgaaagtgtgggaggaagaaatgtgaccttctctggaggaaaggccaggagacaatgaccttgggagcatcttattgctcccctctctccccatttccaaagctcctgcctcatctgatgtcctgcaattcccattaagtgacaccagttcattctgactctgcctgtgcagaagccaatggcttatgctcaacaagcccagatatagtctgcagacaccccaggggacaataaacccaaacggacaagcactctgttctttctgtactcctcaaccagccctgccggtcccctgcgggaacccagtctgaacccatcagcctccctcactggcttgatgtgaatctcattttaaaaggaatttgatcaaaggacagagcagaacaggaaaagagcgccaaacggagacctgtggtccaacctgcctctacccaagccaggttgcgtggccttggataggtcatgtcacctcctggacctcagctcctatgggctagctgagttctaaggtccccactagccccatgctctctgaaatgaaaggtgcagtgagcagcggagctggttcttggagctggcgttctgcagtcacttctgagacagaacatcaaagcccagcacctgggagtggaacaaaagaagaatggagggtttcttttccttttccttttttctccctttcttttttgtataagctcttgcaaacttacaatgtggttcagaatgtactgttctctcagactgccaaaatagcttgagcaggagctgcggccttcatttgaggtagagagaactcctcatgactttgttttcattgttcttgccttgggaaagccagcaaatgccttcctctgtgaaagcagccttcacacaagaaaggaaagattaatgaacgctactaggtaaacagaatagcatttacggaacaattcagcccattgctgcgtgtgccaggtgccgggagctgcatcgttggccaggcaggactgagccagcctagggctccccataaccaccaggaggattagctgaggggattcataaagtgaagggtggctcgcgtatacccaggctacacccataagaagatattcatgctgcagttttccctgagcagaggatattcagataccaacatgaaaagactttctgatacttccatacatagggagactgtcggggtatagggggccttaaagtatgctctggtcacaattgtttattccaatttactagtacttttttaaaagcaattttagaaataagattattctgaaagtttacttacaggtttctctcagattcttcttcgaatgcagaaatgcacttcccaagggctgtaggtcttgatatatagcaggaaaaagggaaccagaagtgtcgagagggtcacatcaccatgaatcaacctctttatttcccccataaagtgactgagccatttaatatcaacaaagagtaatgctgatacaaatgaatagcatatttctttctagcattttcctcagaatagatgttctagaaattaattatagaaaataatgaaatcagatattttcaaacacaagagagtgagttgtgaaagcttggacggcctctctccctcttttctcttttgccctcactcccatactccccacatccactcgagccattgggaaatgacaagcatccgccatacccacctctcatccacacttgaagaggcagatggttcgtaggagccgcctctgcactcatgaccccagacaggtcgaataattggtttcatgcctcccactcatacatgtgactttccatcttagaaatttagcttccaagtcaaaaggaccagcttgtgtagtttcggagagttaggaaagtctcaaaatctttctacaaaattattctttactttttgttggagacccctattatacctgcaaaaacctttatcttaaaaaaaaaaaaaggatcagaatagacccttgggctcaggctgggcacacagactgcatgtccctcatgagtcctttgtgtaaggggctgacttagtcctgaagatgaagagagctgttgaaatgagatgttttcatttgaacaggaaggatgggactgcaatgtgggtgtctgattgagtcatccagaagcagccatggtggccccaagggagggaagggtcagggagtgggcaggatcttgaggaaacggccccagactttggtgagtgggaagtcactggtgtttctggaagagccatttaggcaggggcctaggggtgggcaccactcttcagtgggctggagcgtgaactggagtgggaggaggggaggagcaagccaaccggctggactggatggggttcctttgtagtagtgctagggatggaaatggagagggagaaggcagcagtagagaggtagtggtttgagtttggggaaaactagatgaaatttagcatatcagcctcacaaagaagaataaagataagagagagatgttggtactccctgaggagggagggaggaaagctgagggcagttgcaactttcttggggaaggaggagatggagccttctgagaacgggggatggagacagaagttgctggatcatggagaacaaacctgggggcagctgcagaagaaagaactgggaagaggaaatggaggggctcccagctcccacaaccaaaaatggagtcagtgacatggttttgagagtccccagcaattcccaacttgggagtgaaagaaaaaggctgatttgacaatacctatacaaatttataagctactagaattagtcattccaagaatttatcttatatttgcatggtatgtgtgtgcagtgtgtatgtgtatgtgtacgtgtgtgtacaaatccaccatatgcctctctatgccagctggatagctagatacacagatcagcattgattgtaatagagaatatgtagaacaacccacatgtctatcaattgggaattggttacataagtgttcatatctccagtaaaatgacttattcccataatgtatccttcttccaactgaaatggtcttcccttcctctccttccttcgggaagccttcacaggatatctcatatcttcctgattactcccttagtagatgctaaggtattccccaccatatcagttttcattctcttttaccaccctgcagtggtagatcccaattaatgacctctctgtatgcatgacctttgccttgtaactttgtagttcccacccaatttgaatctgggcttaaccatgtggcccggtttggccaggaggtaggtagtaaacttgatacacgaaagaaagaaagaaaaagaaagaagaaagaaagaaagaagaaagaaagaaagaa

SEQ ID NO: 587359 - DNA, 4001 bp, Homo sapiens
accttatttctcattgcaattttccatttcctcagcttccttctcattatgaaaagagcattatctaacattgaacttgtcctgggcaactgagagtaggagagactcacaaatgccccctgccttcagttttacgcccaagggagagatcccaggtaatgcttgcgtcacaatcagcacacttctcagtggggcaggccactaggccaactaaaacgtggtcccgatatctctgcaaggaccccttgtatctcggagtggtgggagcagagaggtgagccggcagatgggagggcaagacttaacctcagatctgtaaaagtaacaagtcaacaataccttaatcttcactgtaagctactatctactgctatctactgcacataatatttatagtacatctgttcctctttagcttatgaaaaaagattacagagtatctacttaaatggaagaaaaatctacattttaatttatggcaccagaaacaatgtcagttttctttgtcaaaaatagtcagcagagggagctcaacactgctgctgttcgaaatggctttacttatgcacttgtctcatcccagccaccaacagccaccaacagcccccagcaatgaagactaccggagaagaagccaaacttcctgtccccacatgtttacaaaggagcttgtccactccacgcctggcaaaaaatgtcacagttctaagcttatacactattggtgggaatataaattagttcatctattgaaaatagtatggtgatttctcaaaggactaaacacaagtaccattggacccagcaatccatatagagctaccaatccaaacggaactaccattcgacccaggatctactcaaaggaaaccattgtattaaaaagacaactgcactcctatgactatcactgtactattcacaatagcaaagtatggaatcaacctaagtgttcatcaacggatgactggataaaggaaatgtggtgtatctatacgatggaatactacagagccatcaaaaagaaaggaaacatgtcttttgcaacaacatggatggaactggaggccattaccttacgcgataactcagaaataaaatcaaatgcacatgttctcacttttaagtgggagctaaaatgagtacacataaacataaagagggaaataacagacactggggactctaaaagcagcgagggtaggaggggtttgagggctgaaaaattacccatctgatacaatgttcactatttgggtggtaagtacactagaagccaacttcaccattacgcaatttatctatgcaacaaatctgcgcaagtactccttgcatctatataatgtgtgtgtgtgtgtgtcacagttcaagtccaggcgcggccccccttttgacagcgaccgtaaatccctttacacaccccaccctccagagacaggaagggcctggggtgcggccagcactggcgtgggggtctcgcaacatgcagcagagaatccagcgccaagccgtggggtacagcggcgccaagcaccgccgattatgcgggagaagggagccggccttccccaggaaaaagctgacgtcaccctcccctcacagccccccccgccctcccggccgggagaccccctctgcgcaggcgcatgtggggagggacggccagacaggaacaaaaaccttccaggcagcgactccgcgtcccttctcaaccctccccgcccccactccgtcgccccctccctcagtggacgccaggtctgggcttcaggtaccttcggcccgaatgcccaggatgagacaccttctgagtcgccaccattggcgaccaggaacaggttccacccctacggaaagctgagaaaaggcttttctcaagcagcaaacccacctcttttgagtcttctccgccatggtacggccccaattggaacgtagatcgacaccaccgcctgggtagagcgataattccacatgcgattggagagcctggcagggttgggggaggggcggagccggggtggggcggggacccggaagcttgcgactcttgtttgcgtcgcgtctgggcgcacaggactgtacttttggtagcggtgcggggccgcccgcggactttagccctgcatagagatgggtagaccctaatttggaacagccattgactgggcacaggccagcactttgggaggccgagaggccgaggcaggaggatcgcttgaggccaggagtgccagactgcgagactagcctgggtaacatagtgagaccctctcttcaaaaaaaaaaaaaaaaaaaaaaaaaaaaagcctgtcacggtggcctgcgcctgtaccccagctactcgagaggatcgcctgagcccagtgaagctgcagcgagctgtgaggatgccaccgcactccggcctgggctaaaaagctagatcgtgtctctgataaaagaataaaagctgtttattgcaatccagtccgcgtcattatgccctcattttacccactcgcgtaggcgtaattacaccctaaaggtatttctctgacctcgccgatgtccttttcagcctgtctttctctactcattagggctccttctggcccttttctcgctctatatgagtgcatccttcctataggttaagtgccctctacctgtttgctctctaatgaatgtctctggttctgccctctgtgccgatcttcacacctgacattcggttgactaattgacatctccgctcagagtcgtatcgaacctaaaacttacagaacatgactttcgattaacactgccgtcctccctgcaacctgctgcttttttgatccacaccatttgcctagctgctcaagccagacactcaagagtcaccctggcactcctcacccctacatctgtaatagatctgcaagttctgcttgtcctacctcgggtctcatgcttacacttttgtctaccggaccatctctctaatctcagccgatgtgtctctcccagttgttcactcattctgtacttggcctctgaaatcacacctcctcatctcccacccccaaccctgatccaagtagttctcttgtagtcaaaatcatcctttaaaagacaaattgaggccaggcgcgtggctcaaaccggtaatcccagcactttggggggccgagatgggaggatcgcttgaggccaggagttggagaccagcctggtcaacacagcatgatcccgtctctatatattttttctataatgtatttttttaatggaaaaaaattaaaaataagagccaaattcagttatttccccttcctcttaaaatctaaaatccaaactgctttccataacctatctctgagctacatccagcccctgcctacttctctctttctctttctatgtgttcgatcacaccctcattctccaaaaaagcaaagctgactctccacccccaaccgcttccacttgcccccaccctaacaccttctgaccctttatgtctcggatgtcacatactcagtttccaaccagagaaacagaactagtagtagatggatatcaaaaggcttattgtaaggaattggcttacatgattgtggagccccagctaagcaagtccaaaatctgtacactaagctggaactctcatgcaaggggtgaggctgttgttcacaggaggaatttcttcagggaagcccatctcagctcttatggccttcaactgattgaatcaggcccacccagattagctaggataatctctcttccttaaagtgaactgatgatgggctttaatcacatccacaaaaatacctttacagcagcatctagattagtgtttgactaatgacttgggaatgtagcctaaccaagttgacacaaaaaactgaccatcacactcagggaaaccctccttgactgtcttagttctttctggctgctataacaaaatacagttggccctttgtatctgtgggtttgacatctgtgactggttgacagcaacccacgttgga

SEQ ID NO: 587360 - DNA, 4001 bp, Homo sapiens
ttcttttcttttctttttttttttttgagacaagtctcactctatcacccaggctggagtccagtggcacaatcttggctcactgtaacctccgcctcccgggtttgagcaattctcctgcctcagcctcccaggtagctgagactacaggcacaaaccccgccgcccagctaatttttgtatttttagtagagaaggggtttcaccattgctggccaggctaatctcaaactctgacctcaagtgatctgctcgccttggcctcccaaagtgctgggattacaggtgtgagccactgtgcccagccttacacattctttataaaacaaagtaaaacataagctagaacattaaagatattactggggggctgggcacagggtgtaacacgcctgtaatcccagcactttgggaggcccagtcagaaagattgcttgaacctaggagttcaagaccagcctagacaatataattaggcccccaactctaaggaaaaaaaaattattgggtaactatgcagaaataataatagatactgttttcaaaatacagaccaaattcttgaatattattgattggctaggtattagtgcagaagttctatataaaatgctgtaagaaattatgtaactggaaaaatctaaaatttggttttcatagcactcactataaggaccattatattatagtttgaagaggggagagtctttgtctattccaagtcataattttcacctaccagagctatatgcctcttccagctgctgtgaatcctcagagttgaaaggaatccatgtctccttagaatctattatcttacaataaaaccaatggggagaaactggttcatacaagctgccagcatccatgtctattagctcaaaggaactacatgagtttggtgacggagatggatctgactgggacaactgctcctgttgtgactgcactgatgacatttcgctctctaaagacaaaagaaaactatcaggaaaacgaacttaactgtgtaactgttcgcacacacacacgcacaaaactaatcattttacggagccatttctgcaacaacaacaacaacaaaatctacataatttaaaagagaaataacataaattagcaactggatgggtggaagctttaaataaaatgcttctattagatcaaccattgcacagagttctcaattctctcagtaaactgggtaattttactcagtccataagttataaaacaaacccagaatcacaggaccacatgctcgaaactagattgcaacaaaaacattttaccctaatttccaatctaaatgtagttaaaggcagaaaatttactccaagtcagctgggtcatgccctgtcctagtaacgccaaggttttgggctccaggcccctaccattacacaactaatggaatcttaaaatacaaaaaataaaactgttcgcttaggaaccaatcatttttgatggatccttgaagtcgcttaatgggtggtggtacaaattgggaaaagacgaaacctcgcctggggccacggtgcgcacacgcacgcccactcccatagccagaatctcagatgaaagctaacaagcgacctcaaaagcctcctcccgcagaggcggctctgaccagctgtttctacctctccaacactccttccactcggcaacgatcagcgccgcaggcaccagaaggacacttctaagctgcctcgtagggcggggggcaggagggcatctcgcgcgggcccggcgggacggcagacgccggctttcggctccattgtccttttccccacacagacttacctcagccaccctggcgcgcccctggcccccgcgaccctaggccctggcgccccgctccgggccctcggagctcgggctcaggtcgtccgcccgcagccccgcgacagcagcagggcagccagtgcagaccacagggttcacagggtgcccagggttcccccaggctcggggcttcccgggagccgaggttcccccgccccgcatcccggccccgcagcgctgcgccgcccacctgcacccagcctggcctccctcggtccagccgcccgcccgacgcggtctcacctggcggccccgccactcctcaggctctcctgccctccctgaggaggacactgcatggcccggccgcggcctttaccccagcccgggcggggcgcggcggagcagggcggaacctgcagccccgccgggctcgcgccgaacaccaggcgccacggcgctcccagtgggcgagtagcgggcccggatgccaggcgaaaaggtgaggcggcggggagcgcggcgcgcgaccgcgggtggggcgtgcagggccgcagggcacgggcggcaagtgtcgcgagaggtggggggagtcgcgcgagacgtggctcctgcgggcagggagctgcagcgccgggcggcgggctgctggctgctgaggtctaacagtgggggagagtttcgagtgtccgtggcggaaggggcttcgagatcagtttctagtatccgtgacggcaggggcttcaagatcagtttcgagtgtccgtggcggaagaggcttcaaggcggcccctcacgtacggggcgggaaagtcggaatgatcctcgggatacgctacagaccctactagtgcgccaggagcagcgcggtgatcaccggacgcagggactgcgcggccccgggattagcggagtagggcggagggcgcagccacagccgccccgctcctggcctctgcttctgggtgctgagaacgggtgtcactagcatttgccaggcaaaaaggctttggcccgtcctccgtgcatttattatgatttagaggttaccaaaaaggtatccctaaaaaatgtagaggtgtcgggcgtggtgtcagcgcctgggtctgagctactcaggaggctgaggctgaaggagcgccccagcccattggtgccagctgcatgagcccagatggcgccagtgcactccagcctgggtaacactgcgacactagtctctaaacaaacaataaaattaataatttttttttgttttgttttgtagaggcaaccttaacaggatttaaaagatgccagggaggttggagatgagatactgctgtccaaacaggaagacataactgaggtgaaaagttgaaaggggctggacgcagtggctcacgcttgtaatcccaacactttgggaggccaggagttcaagaccagcctggccaacatggtgaaacggcatctctactaaaaatataaaaattagccgggggtggtggctcgcgcctgtaattccagctgcttgggaggctgaggtgggaggatcacttgaacccgggaggcggaggttgcagtgagccaagatcgcagccactgcactccagcctgggcaacagagggagactccatctcaaaaaaagaaaaaaagagaaatttcccgcagtcatgaggtcgagtacaggccctgcccgactctccttagtatttcattttaataccttttggtatttaaaaagatattttcctatattctaactagattatagggcattttttttcagtttttgtgtttttgttttttgttttttgtttttgagacggagtctcactatgtcacccggctggagtgcagtagcacgatctcggctcactgcaacctccgcctcccagattcaagcgattctcctgcctcagcctccggaatagctgggattataggcatgcgccaccgcgcccagctaatttttgtatttttactagagacggggtttcaccatgttggccaggatggtctcgatctcttgacctcgtgatccacccgcctcggcctcccaaagtgctgggattacaggcgtgagccaccttgcccggcctatttcagttttgttatttcttcacaaacagaaaaagaaaacaattttttataacacatttattctctttgcaaattaacagccacacacaaatatccccaagttaacaccttcccttcaaattta

SEQ ID NO: 587361 - DNA, 4001 bp, Homo sapiens
gacaatataattaggcccccaactctaaggaaaaaaaaattattgggtaactatgcagaaataataatagatactgttttcaaaatacagaccaaattcttgaatattattgattggctaggtattagtgcagaagttctatataaaatgctgtaagaaattatgtaactggaaaaatctaaaatttggttttcatagcactcactataaggaccattatattatagtttgaagaggggagagtctttgtctattccaagtcataattttcacctaccagagctatatgcctcttccagctgctgtgaatcctcagagttgaaaggaatccatgtctccttagaatctattatcttacaataaaaccaatggggagaaactggttcatacaagctgccagcatccatgtctattagctcaaaggaactacatgagtttggtgacggagatggatctgactgggacaactgctcctgttgtgactgcactgatgacatttcgctctctaaagacaaaagaaaactatcaggaaaacgaacttaactgtgtaactgttcgcacacacacacgcacaaaactaatcattttacggagccatttctgcaacaacaacaacaacaaaatctacataatttaaaagagaaataacataaattagcaactggatgggtggaagctttaaataaaatgcttctattagatcaaccattgcacagagttctcaattctctcagtaaactgggtaattttactcagtccataagttataaaacaaacccagaatcacaggaccacatgctcgaaactagattgcaacaaaaacattttaccctaatttccaatctaaatgtagttaaaggcagaaaatttactccaagtcagctgggtcatgccctgtcctagtaacgccaaggttttgggctccaggcccctaccattacacaactaatggaatcttaaaatacaaaaaataaaactgttcgcttaggaaccaatcatttttgatggatccttgaagtcgcttaatgggtggtggtacaaattgggaaaagacgaaacctcgcctggggccacggtgcgcacacgcacgcccactcccatagccagaatctcagatgaaagctaacaagcgacctcaaaagcctcctcccgcagaggcggctctgaccagctgtttctacctctccaacactccttccactcggcaacgatcagcgccgcaggcaccagaaggacacttctaagctgcctcgtagggcggggggcaggagggcatctcgcgcgggcccggcgggacggcagacgccggctttcggctccattgtccttttccccacacagacttacctcagccaccctggcgcgcccctggcccccgcgaccctaggccctggcgccccgctccgggccctcggagctcgggctcaggtcgtccgcccgcagccccgcgacagcagcagggcagccagtgcagaccacagggttcacagggtgcccagggttcccccaggctcggggcttcccgggagccgaggttcccccgccccgcatcccggccccgcagcgctgcgccgcccacctgcacccagcctggcctccctcggtccagccgcccgcccgacgcggtctcacctggcggccccgccactcctcaggctctcctgccctccctgaggaggacactgcatggcccggccgcggcctttaccccagcccgggcggggcgcggcggagcagggcggaacctgcagccccgccgggctcgcgccgaacaccaggcgccacggcgctcccagtgggcgagtagcgggcccggatgccaggcgaaaaggtgaggcggcggggagcgcggcgcgcgaccgcgggtggggcgtgcagggccgcagggcacgggcggcaagtgtcgcgagaggtggggggagtcgcgcgagacgtggctcctgcgggcagggagctgcagcgccgggcggcgggctgctggctgctgaggtctaacagtgggggagagtttcgagtgtccgtggcggaaggggcttcgagatcagtttctagtatccgtgacggcaggggcttcaagatcagtttcgagtgtccgtggcggaagaggcttcaaggcggcccctcacgtacggggcgggaaagtcggaatgatcctcgggatacgctacagaccctactagtgcgccaggagcagcgcggtgatcaccggacgcagggactgcgcggccccgggattagcggagtagggcggagggcgcagccacagccgccccgctcctggcctctgcttctgggtgctgagaacgggtgtcactagcatttgccaggcaaaaaggctttggcccgtcctccgtgcatttattatgatttagaggttaccaaaaaggtatccctaaaaaatgtagaggtgtcgggcgtggtgtcagcgcctgggtctgagctactcaggaggctgaggctgaaggagcgccccagcccattggtgccagctgcatgagcccagatggcgccagtgcactccagcctgggtaacactgcgacactagtctctaaacaaacaataaaattaataatttttttttgttttgttttgtagaggcaaccttaacaggatttaaaagatgccagggaggttggagatgagatactgctgtccaaacaggaagacataactgaggtgaaaagttgaaaggggctggacgcagtggctcacgcttgtaatcccaacactttgggaggccaggagttcaagaccagcctggccaacatggtgaaacggcatctctactaaaaatataaaaattagccgggggtggtggctcgcgcctgtaattccagctgcttgggaggctgaggtgggaggatcacttgaacccgggaggcggaggttgcagtgagccaagatcgcagccactgcactccagcctgggcaacagagggagactccatctcaaaaaaagaaaaaaagagaaatttcccgcagtcatgaggtcgagtacaggccctgcccgactctccttagtatttcattttaataccttttggtatttaaaaagatattttcctatattctaactagattatagggcattttttttcagtttttgtgtttttgttttttgttttttgtttttgagacggagtctcactatgtcacccggctggagtgcagtagcacgatctcggctcactgcaacctccgcctcccagattcaagcgattctcctgcctcagcctccggaatagctgggattataggcatgcgccaccgcgcccagctaatttttgtatttttactagagacggggtttcaccatgttggccaggatggtctcgatctcttgacctcgtgatccacccgcctcggcctcccaaagtgctgggattacaggcgtgagccaccttgcccggcctatttcagttttgttatttcttcacaaacagaaaaagaaaacaattttttataacacatttattctctttgcaaattaacagccacacacaaatatccccaagttaacaccttcccttcaaatttattacacttagaatagcttctgcaaggccgggcacagcggctcacgcctgttaatctcagcactttgggaggcccaggcaggccgatttagcaaggggtggagctaaaatcacgaacccacacagtgtgacttcagagcctgcacctaagtaacttgtctaaaatcagtcaggtaagtgacagaactggaacttgaatttaggttttctatcttcaaatcctgttgtagcctccataccagctgttctcaaatttggagggctgtctcaaaaaaaaagtggattgcaatgtgcagtttgaaaatatatcagtaaacttcacatattctgatactattaaaatccatttttctgtcttgcactttgttttatttttgttgttttgagtaaagtgaaagcaagtttattaagaaagtaaaggaataaaagaatggctactccataggcaaagcagcctatcttgc

SEQ ID NO: 587362 - DNA, 4001 bp, Homo sapiens
gcagcacaatttaacacagcacttcacaaacaggttttataacaaattaaacatttgccttggttcttggtaacaaaaatattcaaattaggggttttaattataacaacttgtatttgcccacaaaaacatgatgttccctggaacaacctcccacatcacagatgtaaagacttttcttctcccaggaattcaaacttgaggctacatgtgctaggaaggggacaaaccacactaacaggtacctctcttgcctcccaaccctgaacctcaaaacttccatatttttcttcagcaaaggaatttcaaaattgtcagattacaattaatttttaaatgagttcattttctccttctcaaactgtattgtctaatggtgtcagaagagcttggataaggtctgtatgaccttattgctacaatcctaatgatgtgtgttaaaaaatgaaatctctgaagacatcacagagctgttgtagatttcaaatgagaaatgtctctgaaaagtatcagaaaatatgggcttcctttataatgatctataacccagttttcacagggagagaaaaaaaatcagcaaaaccctaaccctgaacaaatctcactttttaaaagaaagataccttacttgagggaaccaccatactaattctttgtattcctatttggaactactgctgcccatattttttgaaaaacaacaccatggctgtctattctatcaaatcaaaagaagttttttcacagttgacatattaatttttctacctggctaaagaaaatgtgctttttagtttacttataacaattttgtaatttagatgtggggagggcttgtcttggatattattgcttctttttgtttttgtttctctttcttcttcctagctgttttcacttcctagctatttccactatgggtgcaatggagatggtgacaggagtgtgggccagagagagggggaagccagtgtgagacggacctctcccagctatacatctgggaaggggagtctataaacagctggggttttgtttttgtttcatttttatgataatttgtttgtattagtgtttaattccataactaacacatagatggactttcctcacaacaaaggacgtcaaaggtcagtgctcgctcggcctgatcccctctcactccttaaggggtggacgggcgccgtatccttccctacctctttctacctatttacacacaagttggaaacttgcagaactgtgaaaacttcgaaaatcacgtctcttccctattcccctacacacatcagggcttcatctgacagtggaatacgacccgggccccggtgctcactcccggcgttgcccttcgctccgggacctggtggtcctctctctctgcgccccaaaacgccctgtcctagctccctgagccccagggacgccgggtcctctctttgtgccccaagacttcctgccctttctcttgcgccccgagacgtcctgtcctctctctcgctccccgggttgctctgtgctctcttagcgctccagaacgccctgtcctctctctttgagccccgggacaccctgtcctcgctccccgaggccccgggacgccctgtcctctctctctctgcgcctcgggatgccctgtcctcgctccccgaacccccgggacgccctgtcctctctctttgcgccccaggatgccttgtcctcgctccccgagcccccgtgacgccctgtcctctctctttgcgcgtcgagacgccctgtcctcgctccccgcgcccccggccgccttaccctccgaggagcgaggccacagggcagccgggaccccagagtaaagaaaaccctggccggtagcttcatgttgagtctccagaactcgggccggaaggcggcgcaggcggttgggcgcagggggcgggacaaaaagaacaaagttctcggggctggaaacgctgcctaggccgccgggggatgggacggggactgggacccaggcggcgtggacgcccagcggccctgaccttcagagtccggccgagggcgccgcctagctgggcctagctgatgctctttcctgctctctgggccaggagtgctttgtatggcagagaatggaggttctttgcgtccttgagcgggtgtacgaaaccccgcgccctgcaagggtttgcagattgcagctgcgcaccccatacactgcctatcaagggcgaaactctttttcagtcgtatgtgtttatcccttaagtgcgtgtttaagtgcagagtgcgcgtggcgccaagtcacatattatcagaataataatatgttggatgtaaaacacggcctcactttccctaagaccaagaggctgaaaaacactaagggcagcttccggcgttttgacttttcgcaggacacaccgccccctgtcgccggatgcagcgtgactgcgaccgcccagccttggcttttttctcgaagttaaacacacgttaaaggcaaacacagattcagtatatcattctccatcttagtgtaatatacctgttgacacaaggcattagctcagatcacatttctttcctcattcgtaaaatgagaatattcatagctaattcagaattttagataaaagaagatgggtgtgaggccccaggctgaggctgatggtagatgatattgagtgtttactatttgcctggcatgttccaaatgctgataaagaaacatttatatcttcagaggaatgtacacttacatgtagacatatagcttataaggtatataaactctgaaaaactttgtaattttgagttggtctggtgataatttccaggccttctgcctgtaactggttacagaaataaaaactttcttcatccccagttcatcgacatctcattattggcagcaagaaatagcagcctgaccctcagtttggtccaggaacaaaactaccacagattgggtggcttaaatggaaatttgttttctcacaattctggaggccacaagtcagcagagttggtttcttgtggagccactgtgggaccatcttctccctgtgtctttacatgatcctcctgtgtacctttccatatctaaattgcctcttcttatgaggacaccagtcgtgttggattaaggcccaccctcaatgacctaatttaactggaattacctccctaaagactctatctccaaatatagccacattctgacatactgggggttaagagttcaatgtatatatttggctgggagaagagggaagtacacaattcagcccagaacacttgccctcttaaataacttttagaccagcttaggaggcattttctgtcctcccaaaaaaaccttgagaatatatcaataataaaacttttcctaagctcttgatatatgtatggcactgttattcttgacttccaaaccaaattgtaagtgggattcatcttgtttctaaaaagaagttgcaacattagtgatacggtttggatttgtgtccctacccaaatctcatgttgaattgtaatctccagtgttggaattggggcctggtaggaggtgattggatcacggggacagatttcttcctttggtgctattctcctgatagagttctcaggagatctggttgtttaaaagtgtgtggcacctcccaccctctctcttcctcctgctccagctgtgtaagacagcctgcttccccttcatcttccaccatgattgtaagtttcctgaggcctctcaagtcatgcttcctatatagcctgcagaactgtgagtcaattaaacttcgtttctttataaattactcagtatgaggtatttctttatagcattgtgagaatggagtaacacaataagtaacttaaaacaattaatcatttattatctcacagttcccaggagttaggagtctaggcacagcttagctggatccttggctctgggtctcagaagactgcaatcaaggtgtcaactaggctgtttttatctggaggctcagctggag

SEQ ID NO: 587363 - DNA, 4001 bp, Homo sapiens
gccccatcacacacacacctgaacatatcctcaggcttggctgcagtttttaaaagctcttctgtagatagagtaaaatgttctctttacaactaagtctacttgtttagatccagaaataactagtctgtctcttcatatctgaaacttagtgaatttcacagacgtttcttggaatcaagtctttggagaaataaagtttctcatgtttatttggctctctgttcaatttctagatgagaaaatcaatgcccagagattctaagtgaagccacctcagtgacatagactgctgagacccaactctggaacctctctcccgtccttccctctagacttagcagctctgcatgcctgcctctctcacctggatgctttggagccaagctttcgtcccatgcaagggaaacaaccacttctgggatgtccgctgcaatctgctccggggctgcagcaacctcatcagctcttgcctggagtggctcagcctgggcctgcagggccaccaggagaatggcagcaaggatggcgagggtcctcatggctggggtcacctggaggagggagagcaggagcagctgtgtggggagggaggagccagcctggatttatagctctactgggagaaggctcggagacaagaaaccttcctcaatctcagtgagaggaggtgtgcattttataagagaggcccattggtctcaaggttgctcgaatgctcctgttctcccagtttcatgctagtatacatctgtacctttaatgtctgtgctaggttggagctaataatgacaagaaagaccctgctatgttactcgtgggttcacctgcttaaatattatgattcactttttaacattccaaaaagaatagaaattgcactttgattcaacaggctcagggaacaaatgcttcttattttctgaagatgggtcctgctgttctctggaggtctagattctggtgtcctatatgagttccaatggaatagcgagtaattcacttcaggattcaggtgacttaccatcctcatgaagaggtttttgaggttatggggtgagtagtctcctgtaggaatcagggtggagaggacaatgattttatcaggctaaaggtgaaatcagctcagtgacacagagtggtttaagtaaaaaaaagaaagtttattatttccacctctacttagacttgagtaacaattaacaattgtatatttatagtgtacactacctcatgattttatatatgtatgtatttaaatctttatctcacaccatgtagaaacatcaactcagaatgaattgaaaacctaaatgtaacaactgaaaccataaactactagaagtgtatagaaggataaagcttttgacattgatgtaggtaatgatttcttggctatgacaccaaaggcacaggcaataaaagggaaaatagacaagtgtggcttcatttaacgctaaagcatctgcacagcaaaggaaacaatcaaccgagtgaaaagataacccagaaaatgagagaaaatatttgcaaaacctacatggccgaaggggcaaatatctgaatacataaggaattccaacaactcaatagcaaaaatcaaacaacctgattgaaaaacagaccaaggacctaaataggtttctctcaaaagaatgttccaaagacctgtgatagtctctactggacatgtcaaccaggacatgtgacatgtgtgtttagaaggaaactgcttgagtttctctattaagttagctggaagccatcgtccccagcagtcaccagaggtccggacagacgttcctagcagggattcgcccgctggttccctctggggtggccccacagtcagaggtcagattggaggcatagcttcaataatgaaaactcagtgtaaagtttaagttttgtagtacttacagatcctctagctaggcagggtgaccagagagggcagacagcagtcctctgtcccaggtcttctatagcaaggagcagccgtgcacaagtggacttcccctatttaaaggtcttttgggatgaggtgtcctaatttccggggttactttctgttgggtccattaaataattgtggtggcaaggacagttgagaaatttggtgggaaggtgaggttaaagtagaactccacagaggaacctctcatctaccttggtcagccctggccaggcccaggcagcaaccaactatggattctcaatggctcctaacacagttgaccctgtgatgcattggctgtggctaagctgaactacctgcaccaagggaatatttaaggcctctgggacagcctggctgcgtatcacagtatacgccctgcaaagagattgggataggaatgccacctgcacacagaggaggatttggaatgtgtttctaaagcagtgtcccgaggacctggggtctaaccataaaaactaatgaaagccatttggctgagctgggatgttggagaacacccaggtgagactgagtgctacctgggcttctgttgctatgtggaacagacatttttgggttctcctgagtactggatgtacacgcggcatgtggttccccagaggtgactatcacctgtttgcttggccaatgaacagtttaagcttaaacaattgtctaggatcatctgggccaagaactggtctgaggcattagccatcagggtgggagtggcctttccagatggccacccaagaaaggaggtgggagtctgggcattcactttactgctggtgttgcacagcctctcaggccttgtgggccttcagagaagcattcagcaaaagcttgagtggtgctttctgggaggcataggagtttccatccttcactggtacacatcggagaacaggtgtatccctgagcccatgatcatgtctggatgctttctgtgaatgcaatgctccaactcttcaggctgcagtctgggtgtgtgctgcggcgtcatgagcccatttggattgaagcctgtgcatccagagaactacctcctcatccttaaaacacgatctgtggttgtgagggctgctggtgtttaagcattggtgccatgggacccattcaatatctaagggttgagttgcccgccttggacacaggtcaggttgtatctggggtgcagcccctgtaacagggcttacagggaattccccagttttccagtctggggtacaaattctgactagggctgtcctgttccagcagccctctaggctgccaggcctgggttaaacagctaccccacaagccatttgtacataagataccaagcaaggccaatcatagagaacactgacatcttgtcactcagggctttcttcccagtgcttctatattgacactgatgatggggttggctggcacccacttttccttggagcctttctcccccatggccacgtttggtgatggcacttccatatggtctttgcctgacgtagttggtgtctctagtttgaaggcttcttctcctcgttactgcctctgactgcaccctcggtgggttctggagcaataatccctacttcctgccaggagaagtaagtgggaaatattagctaacctttaaaaccggtaaaaaagggagcttttgccagaagctgcatgtgaaatggagaggtgtggtctaacaaaagcctcgtggtcctgctgggtgccagtgggcctggggggttatcctcagaagatcgtagtttactatccatccacagtccattgttcagtatatgtttgatgttgagatggtggatgtcctgtgatgatatggggaggtctcattattggagaacatgtaaatgatgttatctgtaagggaaaaaagaagctaactcttctgtgatcaccaagataggcaccaaagtgcgtctagcccaattgtgatgaggcagtggtggccatgggattgagagttaaaaaagtgacggcccttggaaggaccttggtgccttgggtgtccatagcacatccagagacattaataacc

SEQ ID NO: 587364 - DNA, 4001 bp, Homo sapiens
cattcctgccccatcacacacacacctgaacatatcctcaggcttggctgcagtttttaaaagctcttctgtagatagagtaaaatgttctctttacaactaagtctacttgtttagatccagaaataactagtctgtctcttcatatctgaaacttagtgaatttcacagacgtttcttggaatcaagtctttggagaaataaagtttctcatgtttatttggctctctgttcaatttctagatgagaaaatcaatgcccagagattctaagtgaagccacctcagtgacatagactgctgagacccaactctggaacctctctcccgtccttccctctagacttagcagctctgcatgcctgcctctctcacctggatgctttggagccaagctttcgtcccatgcaagggaaacaaccacttctgggatgtccgctgcaatctgctccggggctgcagcaacctcatcagctcttgcctggagtggctcagcctgggcctgcagggccaccaggagaatggcagcaaggatggcgagggtcctcatggctggggtcacctggaggagggagagcaggagcagctgtgtggggagggaggagccagcctggatttatagctctactgggagaaggctcggagacaagaaaccttcctcaatctcagtgagaggaggtgtgcattttataagagaggcccattggtctcaaggttgctcgaatgctcctgttctcccagtttcatgctagtatacatctgtacctttaatgtctgtgctaggttggagctaataatgacaagaaagaccctgctatgttactcgtgggttcacctgcttaaatattatgattcactttttaacattccaaaaagaatagaaattgcactttgattcaacaggctcagggaacaaatgcttcttattttctgaagatgggtcctgctgttctctggaggtctagattctggtgtcctatatgagttccaatggaatagcgagtaattcacttcaggattcaggtgacttaccatcctcatgaagaggtttttgaggttatggggtgagtagtctcctgtaggaatcagggtggagaggacaatgattttatcaggctaaaggtgaaatcagctcagtgacacagagtggtttaagtaaaaaaaagaaagtttattatttccacctctacttagacttgagtaacaattaacaattgtatatttatagtgtacactacctcatgattttatatatgtatgtatttaaatctttatctcacaccatgtagaaacatcaactcagaatgaattgaaaacctaaatgtaacaactgaaaccataaactactagaagtgtatagaaggataaagcttttgacattgatgtaggtaatgatttcttggctatgacaccaaaggcacaggcaataaaagggaaaatagacaagtgtggcttcatttaacgctaaagcatctgcacagcaaaggaaacaatcaaccgagtgaaaagataacccagaaaatgagagaaaatatttgcaaaacctacatggccgaaggggcaaatatctgaatacataaggaattccaacaactcaatagcaaaaatcaaacaacctgattgaaaaacagaccaaggacctaaataggtttctctcaaaagaatgttccaaagacctgtgatagtctctactggacatgtcaaccaggacatgtgtgtttagaaggaaactgcttgagtttctctattaagttagctggaagccatcgtccccagcagtcaccagaggtccggacagacgttcctagcagggattcgcccgctggttccctctggggtggccccacagtcagaggtcagattggaggcatagcttcaataatgaaaactcagtgtaaagtttaagttttgtagtacttacagatcctctagctaggcagggtgaccagagagggcagacagcagtcctctgtcccaggtcttctatagcaaggagcagccgtgcacaagtggacttcccctatttaaaggtcttttgggatgaggtgtcctaatttccggggttactttctgttgggtccattaaataattgtggtggcaaggacagttgagaaatttggtgggaaggtgaggttaaagtagaactccacagaggaacctctcatctaccttggtcagccctggccaggcccaggcagcaaccaactatggattctcaatggctcctaacacagttgaccctgtgatgcattggctgtggctaagctgaactacctgcaccaagggaatatttaaagcctctgggacagcctggctgcgtatcatagtatacaccctgcaaagagattgggataggaatgccacctacacacagaggaggatttggaatgtgtttctaaagcagtgtcccgaggacctggggtctaaccataaaaagcaatgaaagccatttggctgagctgggatgttggagaacacccaggtgagaatgagtgctacctgggcttctgttgctatgtggaacagacatttttgggttctcctgagtactggatgtacacgcggcatgtggttccccagaggtgactatcacctgtttgcttggccaatgaacagtttaagcttaaacaattgtctaggatcatctgggccaagaactggtctgaggcattagccatcagggtgggagtggcctttccagatggccacccaagaaaggaggtgggagtctgggcattcactttactgctggtgttgcacagcctctcaggccttgtgggccttcagagaagcattcagcaaaagcttgagtggtgctttctgggaggcataggagtttccatccttcactggtacacatcggagaacaggtgtatccctgagcccatgatcatgtctggatgctttctgtgaatgcaatgctccaactcttcaggctgcagtctgggtgtgtgctgcggcgtcatgagcccatttggattgaagcctgtgcatccagagaactacctcctcatccttaaaacacgatctgtggttgtgagggctgctggtgtttaagcattggtgccatgggacccattcaatatctaagggttgagttgcccgccttggacacaggtcaggttgtatctggggtgcagcccctgtaacagggcttacagggaattccccagttttccagtctggggtacaaattctgactagggctgtcctgttccagcagccctctaggctgccaggcctgggttaaacagctaccccacaagccatttgtacataagataccaagcaaggccaatcatagagaacactgacatcttgtcactcagggctttcttcccagtgcttctatattgacactgatgatggggttggctggcacccacttttccttggagcctttctcccccatggccacgtttggtgatggcacttccatatggtctttgcctgacgtagttggtgtctctagtttgaaggcttcttctcctcgttactgcctctgactgcaccctcggtgggttctggagcaataatccctacttcctgccaggagaagtaagtgggaaatattagctaacctttaaaaccggtaaaaaagggagcttttgccagaagctgcatgtgaaatggagaggtgtggtctaacaaaagcctcgtggtcctgctgggtgccagtgggcctggggggttatcctcagaagatcgtagtttactatccatccacagtccattgttcagtatatgtttgatgttgagatggtggatgtcctgtgatgatatggggaggtctcattattggagaacatgtaaatgatgttatctgtaagggaaaaaagaagctaactcttctgtgatcaccaagataggcaccaaagtgcgtctagcccaattgtgatgaggcagtggtggccatgggattgagagttaaaaaagtgacggcccttggaaggaccttggtgccttgggtgtccatagcacatccagagacattaataacc

SEQ ID NO: 587365 - DNA, 4001 bp, Homo sapiens; identical to SEQ ID NO: 587363

SEQ ID NO: 587366 - DNA, 4001 bp, Homo sapiens; identical to SEQ ID NO: 587364

SEQ ID NO: 587367 - DNA, 4001 bp, Homo sapiens
tctcatttttgcattcctgccccatcacacacacacctgaacataccctcaggcttggctgcagtttttaaaagctcttctgtagagtaaaatgttctctttacaactaagtctacttgtttagatccagaaataactagtctgtctcttcatatcttaaacttagtgaatttcacagatgtttcttggaatcaagtctttggagaaataaagtttctcaggtttatttggctctctgttcaatttctagatgagaaaatcaatgcccagagattctaagtgaagccacctcagtgacatagactgctgagacccaactctggaacctctctcccgtccttccctctagacttagcagctctgcatgcctgcctctctcacctggatgctttggagccaagctttcgtcccatgcaagggaaacaaccacttctgggatgtccgctgcaatctgctccggggctgcagcaacctcatcagctcttgcctggagtggctcagcctgggcctgcagggccaccaggagaatggcagcaaggatggcgagggtcctcatggctggggtcacctggaggagggagagcaggagcagctgtgtggggagggaggagccagcctggatttatagctctactgggagaaggctcggagacaagaaaccttcctcaatctcagtgagaggaggtgtgcattttacaagagaggcccattggtctcaaggttgctcgaatgctcctgttctcccagtttcatgctagtatacatctgtacctttaatgtctgtgctaggttggagctaataatgacaagaaagaccctgctatgttactcgtgggttcacctgcttaaatattatgatttactttttaacattccaaaaagaatagaaattgcactttgattcaacaggctcagggaacaaatgcttcttattttctgaagatgggtcctgctgttctctggaggtctagattctggtgtcctatatgagttccaatggaatagcgagtaattcacttcaggattcaggtgacttaccatcctcatgaagaggtttttgaggttatggggtgagtagtctcctgtaggaatcagggtggagaggacaatgattttatcaggctaaaggtgaaatcagctcagtgacacagagtggtttaagtaaaaaaaagaaagtttattatttccacctctacttagacttgagtaacaattaacaattgtatatttatagtgtacactacctcatgattttatatatgtatgtatttaaatctttatctcacaccatgtagaaacatcaactcagaatgaattgaaaacctaaatgtaacaactgaaaccataaactactagaagtgtatagaaggataaagcttttgacattgatgtaggtaatgatttcttggctatgacaccaaaggcacaggcaataaaagggaaaatagacaagtgtggcttcatttaacgctaaagcatctgcacagcaaaggaaacaatcaaccgagtgaaaagataacccagaaaatgagagaaaatatttgcaaaacctacatggcagaaggggcaaatatctgaatacataaggaattccaacaactcaatagcaaaaatcaaacaacctgattgaaagacagaccaaggacctaaataggtttctctcaaaagaatgttccaaagacctgtgatagtctctactggacatgtcaaccaggacatgtgtgtttagaaggaaactgcttgagtttctctattaagttagctggaagccatcgtccccagcagtcaccagaggtccggacagacgttcctagcagggattcacccgctgggtccctctggggcggccccacagtcagaggtcagattggaggcatagcttcaatgatgaaaactcagtgtaaagtttaagttttgtagtacttacagatcctctagctaggcagggtgaccagagagggcagacagcagtcctctgtcccaggtcttctatagcaaggagcagccgtgcacaagtggacttcccctatttaaaggtcttttgggatgaggtgtcctaatttccggggttactttctgttgggtccattaaataattgtggtggcaaggacagttgagaaatttggtgggaaggtgaggttaaagtagaactccacagaggaacctctcatctaccttggtcagccctggccaggcccaggcagcaaccaactatggattctcaatggctcctaacacagttgaccctgtgatgcattggctgtggctaagctgaactacctgcaccaagggaatatttaaagcctctgggacaacctggctgcgtatcatagtatacgccctgcaaagagactaggataggaatgccacctgcacacagaggaggatttggaatgtgtttctaaagcagtgtcccgaggacctgaggtctaaccataaaaactaatgaaagccatttggctgagctgggatgttggagaacacccaggtgagactgagtgctacctgggcttctgttgctatgtggaacagacatttttgggttctcctgagtactggatgtacacgcggcatgtggttccccagaggtgactatcacctgtttgcttggccaatgaacagtttaaggttaaacaattgtctaggatcatctgggccaggaactggtctgaggcattagccatcagggtgggagtggcctttccagatggccacccaagaagggaagtgggagtctgggcattcactttactgctggtgttggacagcctctcagcccttgtgggtcttcagagaagcatttagcaaaagcttgagtggtgctttctgggaggcataggagtttccatccttaactggtacccatcggagaacaggcgtatcccttagcccatgatcctgtctggatgctttatgtgaatgcaaggctccaactcttcaggctgctgtctgggtgtgtgctgcggcattgttagcccatttggattgaagcctatgcatccagagaactacctcctcatccttaaaacacgatctgtggttgtgagggctgctggtgtttaagcattggtgccatgggacccattcaatatctaagggttgagttgcccaccttggacacaggtcaggttgtatttggggtacagcccctctaacagggcttacagggaattccccagttttccagtctggggtacaaattctgactagggctgtcttgttccagcagccctctaggctgccaggcctgggttaaacagctaccccacaagccatttgtacataagataccaagcaaggccaatcatagagaacactgacatcttgtcactcagggctttcttcccagtgcttctatattgacactgatgatggggttggctggcacccacttttccttggagcctttctcccccatggccacgtttggtgatggcacttccatatggtctttgcctgacgtagttggtgtctctagtttgaaggcttcttctcctcgttactgcctctgactgcaccctcggtgggttctggagcaataatccttacttcctgccaggaggagtaagtgggaaatattagctaacctttaaaaccggtaaaaaagggagcttttgccagaagctgcatgtgaaatggagaggtgtggtgtagcaaaagcctcgtggtcctgctgggtgccagtgggcctggggggttatcctcagaagatcgtagtttactatccatccacagtccattgttcagtacatgtttgatgttgagatggtggatgtcttgtgatgatatggggaggtctcattattggagaacatgtaaatgatgttatctgtaagggaaaaaagaagctaactcttctgtgatcaccaagataggcaccaaagtgggtctagcccaattgtgatgaggcagtggtggccatggggttgagagttaaaaaagtgacggcccttggaaggaccttggtgccttgggtgtccatagcacatccagagacatt

SEQ ID NO: 587368 - DNA, 4001 bp, Homo sapiens
gctctgatttgtgtgcttttgccccatcagacacacacctgaacatactcttaagcccatctccagtttttaaaatttcctttgttggcagaatgaaatattttccctataatatctacttgtttagatccagaaagaactggtcaatctgtctctccgtatcttaaccctagcgaattttatagacataccttggaatcaagtctttggagaaagaagactacttacatttgtttgtctctctattcagtttggagataagaaaatcgaggcccagagatggtaagtaaagccacctaagtgacatccaccattgagatgtgattccagagcccatctcccatccgtctctctagactcggtagcttttttatgctggcctctctcacctgaaacctgaagagcagagcttttatcccatgcaaaggaaatagatatgtcctggtcttctggcccacgctgctcctggcctggagcctcatcacctcttgcctggagtgggcctgcccggacctggagggctaccaagagaatagcagcgaggagggcgataatcctcatggctggggtgacctggaggagggagagcaggagcagctgtgtggggagggagaagccagcttggatttatagctttgctgggagaaggcacagagataagaaacctttggccttctgagtgagaggaggtgtgcattttgttagagaggatgccgactcctattggccttgacatccctggaatgctcctctgctctcccagctttcttcacaggaagctctatgtttagtgtctgtgctaggttgaagttgatggtgatgatgaggaccctggcattttttcctgttttcaggaaatacctaatatttcctggttaaatctttaatattctaaaaagaatggaaacagtgctttcattcaataatttaagagagcaaatgcctcttatttcctgataatgggccctactattctcttcaggtctaaacactggtgccagacctgtattccggtggagtagagagtaactcattgcaggcttctaggtcattataccctcatgaaggggcgactgaggtaatggggtgagtagtctcctgtaggggccagagtgaagaggacaatgaccttatcagggtacaggtgaaatgagctcagtgagagagataaagagttgtgtaaggttcatgagttgctaggtgcatacacgtggtcctttctctcacagcatgtaaaaaatcagctcaacatggattgaagactcaacatagacttgaaaagacctgaaaccatacaactacgagaagcacatacaaagataaagctttggacattgacgtgagtaatgatttcttggctatgacaccaaaggcacaggcaataaacaaatgggaaaatagacaagcggggctgcattgaacgctaaagcatcttcatagcaaaggaaacaatcaactgagggaaacggcaacccagaaaatgagagaaaatgtttgcaaagcctacgtggtagaaggggtaaatatctgaatacataaggaagtcaaacaactcaatagcaaaaaacaaacaacctgattgaaaaacagacctaggacctgcagaggcttctctcacaataaaataatgttttaagaagctgtgatcgtctttattggacatgtcaagtaggacacgtgtgtttggaaggaaactttttgagtttctctattgacttagctagtagccattacccccagcagccgccagacacccagatagaagttcacagcaggggcttcacccgctgggtccctctggggtggccccacagtgagaggtcagactggggacacagcttcaatattgaaacctcaatgtgaaagtttaagttttgtgttacttacagatcctcaagctaggcagggcgagcagagagggcagacagcagtcctgtgttccaggtcttatgtagcaagagcagccatgcacacagaggagaggacttccttatttaagggtcttttggtatcaggtgtcctaatttttcagggttactttctattgggtactttaaataactgttaacaagggcagttgagaaatttggcagaaagctggagttcaagcaggagtccacggaggtaccgacccctcgtctactttggtcagccctggccaggcccaggcagcaatcaactatggattcctcatgactcctaagacaattgaccccatgatacctatgctggtggctgaggctgaactacctggaccgagggaatatttaaagccaccaggagagcctggcctgcatattgttgtatacaccttgcgaggagactaggatcaaaatgccacccacacacagatgaggatttggaatgtggtctgaactgacctccccaggccctggggtctaaccataaaaacaaatccaagccattcagacaagtaaggttggagaatacctggatgagactgaataccgcctgggcttgtgttgctggatagggcaggttgcaggctcccgagtaaaggatgtgcatatagcatgtggttccctagaggggacagtcacctttttgcttggccttagatagttcaagcctaaatgactgtctaggtcatccaggccaaggactcatcaaatgattgcgtgacacctaatgtctgtcagaagtcccttaggatggtggccaaagctgcagcgagattggtgttagcttgcatcaccttgtgttgtgagctcaaataccctgttcccaaaccaatcccgtaggcttacgagtctccctacacccagagttaggaagatggtcactgggtgggggggatgcataagctttcccttgtgtggtccctcctgggttatttgaaggggagtcccagggagactagtgcacattttaaaatgtaccactctccaccatcctcctccttgtagtgaggtaaacgggatgaggtttctggaaatgagaaaagaatgcagttgttcctgagggaatgaatacctatagtgaggttgctgaacccagtatgcagtccaggcagcccctgccgccatgggagggccgtgcacagcgctggtccagcaggctgggtgctcagggcctcccctgcagctctgcgtgaaggcagcaggcactgggctatggaggactgggggcagcggcgctctcagtcttaaggagggaagaggcatctcaagcctcgctaggggtggtcgctgttccagagcagtgaagtcggctgcccctatgaggaagcagtgagttcctgatctgttgcaggcccagcaatttcacctttggaggaagtgggcactggactcattccagcagaggaagaaattagggctatttggggaactgggccccagatgatggttttaggttctagggcattagtaggtgcctgaagggcccagtggatatggatgtagaggcaaaatgagaaggggtgtgtgtgcacgtggggaaggtctggtggttgtggggatgtccagtgtcctgcagaagtgaaacctggaccagcctcctgcacacagaacacactccaatccataggcattttcctagtaacataggagagagctgttattggcagagctggttagatttgggtgtgatattataacagacaggtcttccaagtccatattttttggcataacttgtagggcagcctcctgatctgatccaagccttgtggtttccttgcagtaggcggtttaactaatgggttacactgaagacaaatggggatcccagcaaaataccattctaaggggtcatctgcagggtcctcaggaaagcatgagctaagaaagcacgggtccaggtactggacgtgagccaactccatgtcccgggggtggtgagatccataccttgcggcaggaaggagagtaaggtgagtctggtttggggatgaccccacagtcaagatgagattccttggtgtctctggttctggtgaggccactgtttcccaggacaaacccttggatcagagcact

SEQ ID NO: 587369 - DNA, 4001 bp, Homo sapiens
tttgagtatcattaggaatgcattgaatttttaagtttcaaactattccaattaacacttatatcctgtcaggaatggtggctcaagcatgtaatcctagcactttggggggctgaggagagcagatcacttaagctcaggggttcgagaccaacctgggcaatatggtgaaaccctgtctctacaaaaaaatacaaaccattagtagggtgtggtggcacatgcctgtagtcccagctactcaagaggctgaggtgggaggatcatttgagcacaggaggtcaaggctgcagtgagccgagattgcaccgctgtactccagcttgggtggctaagttagacactgtctcaaacaacaacaataaaaaacccaattatattcatttttgttattttgttattgctctatgatgctcaaattgtgcatcattggaatgcaaagaccagttaacttaatgtagatcagaattctcaatacaaaggaaccatacaaaccaccatataacaaagcaaaagaaaaaaaaggaaaaagaaaagaaaattaaaaaggtcaaacacactaagtttaatgcttgaactttattttggagagagaaatttagaaagacacaaggtacacagagtaaaatgtttttcttttttcaggaccttgaactgaatcttgcactgctttggtttctatctaggaagctcagcgacagcagagtctgtagaggcggccactgatttcacacaccccggagagggactcacgggtagcacaacggccggttcggcaatagcaggtggctcttgcctgagaacctgtggaaagaagagagggtcaggcacagcgagggaggtgggaaaaaggacaagcacagccagactaactgagatagtctaaataagagacactgtatcagtcatgttaggatggagaaaattcatgtctttgtcgtaagtgacaagaaatcttactagctatgtgttagtcatgcaagatcatagtttttttccccatgtgagtctatccaggatgtatttattacctgctccctggtccaacaatatacctctcaacctcagggttacctactcttcattctgcttcatccacacgcctaatcttgacctccatgtgtgatttccaggtcctaacaaggctccctaaagcacctgaatcagtttctgaaatgccgcattgtgcatgctaatgtcatggaccaaatactttggtgctcaaggagtctttgaagactttccaaattcaaattcttcattctctgtctctcctttttttttttttttttttttttttaacattttacatatttacttgttttaattgacaaacaataattgtgtatatgtatgagacacaatatgatgttttgatctaaggatgtattgtagaaagatttaatcaagcctattagcctacatcaaaacacacctataggttcctctctaggttctaaaagcttttccaatggacaaagtaaaacactctctatataactaagtctgcccatttagatctacaaagaactagtcagtgtagctctttctatcttaaaagtagcaaatttcacagaaatatcttggaactgaaagtcttagaaaaaagaaaatcttttagatttatttggttctcactgattaatttatagatgagaaaatcaaggtccaggaagattaagtaaagtcactcaagtgaggtagacctttccacacttgactccagatcctttctccaatcctttttttctagattttgcagatgtgcaagattgatgtctcctacctgaggttctaagagcagagagtccatttcctgcaaaggagatagcaaggtcctggttgtcttccccagactgcttctgggttgtagcctcatcagctctttcctggagtgactcagcctgggcctgcagggccaccaggagaatggcagcaaggatggcgatggtcctcatggctggggtcacctgcaggagggagagcaggagtggatatgtggggagtgaggagtcagcctggatttatagctctgctgggagaagacctgagacagaagctgcagtgagaggaggtgggcatgtgattgggaggggaaggactgcctttgttctcaagatccctttgatgctcctctttctcccagctttcatcaaagcgtgagtctgtatgcttaatgcctcttcttgatccaaggtgttaatgatgataagggtattactatcctgttctgtttcccatctgcttgagtatttacttttatatattcaaaaaagaaaaacaacagcgctttcattcaagaagtttggggatcaaatgcctcttgttttctgaagatggtccctggtactctctggatgactctctgggggcagacctgggactcagtggagtagagagttaattcattgcaggattcagggatattactaacctcatgtaggaggcttttgagatctcgaggtgagtagtctcccgctggtgccagtatggagaggtcaatgaccttatcaggctataggggaaatgagttcagtaaaatagtaggccaagtttatcagattaaaataaaaattcggatttagttcaaggagttggtgtgatctgaatgcatcacataaaatgtgtagcgggtacttctctccactttggggaatatcaaagtaatttaggtgcgtacagcccctttctgagattttttttttagttttagaaaattgtaaatcatgcacaaggaacaacattcaaaaggtagaagtcatgagctctcatttctacccccaggccttcagttctgacccagcaaaccatcactattaacagttacacatagtattctgcacttcgcttttttcacctgtaacattggcactttgtatatcaaaatacatggaatgctattataattttaatagccttatactatcccagggtttgtatatgccatcacttattttttgtactgataaaatattataaaattattacaatttggttatttttaaacttttgcagtaataagtaaagttacagtgattatcttgtatatatgttctcttacctatatggataaacttatagaaatagaattgctgtgtcaaagaatgcatcttaagccagcatggtggtacatgcctatatttctagctatttgagaggctgaggtgggaggatcactggagaccaggagttcgataccagcctaaaaacatagtgagacccctttctcttaaaaaaaaaaaaagagactatatcttacacatttttaagatattactacatatttccataatatcaccatatttgatccaaatcctttggggctcagtgggcccttggagagtctctatatttgaattcctcatttaatttttttcaaatttatttatttattcattgaaaaataattttctgtatatttgtagggtatgatgtgacgtttggattgatatccacatgggagaaacacataagctaattaagatagccatcacctcaccaacttaattttttaaggagaattacaaattgattcctttagcagtttgaaagatacaatacatcactattaactgtggtcaccgtgcagtgccatagatcactaagactctccagcataactgaaactttgtactcttggctcaacatcttctcttttcctatctcacccacctgcagcttctgatgaccacctttgtactctagttccataaaactgacattttaacattccatgtgtaagtgatatcatatagtatttgtcttcctgtgtctggtttatttcgtttagcacattgtcctttggttccatccatgttgtcatgaatgaagaatttccttcttttttttttttttttttttttttgagacggagtcttgctgtcgcccaggctggagtgcagtggtgcgatcccggctcactgcaacctccgcctcccaggttcacgcctttctcctgcctcagcctcctgagtagctgggagtacagtcgcccgccacca

SEQ ID NO: 587370 - DNA, 4001 bp, Homo sapiens
tcctctcagcccaaggcattctagtgttaacctcaaacactggttcaggccatgatgggacgtggggatcaggaatacctcatgatatcctcctcccattggaattcaggcacagctggccagcattaacattaaaacagagtgcctaaggccacgtgcggtggctcatgcctgtaatcccagcactttgggaggccgaggtgggcggatcacttgaggtcaggagttcgagaccagcctggtcaacatagtgaaaccctgtctctactaaaaatacaaaaattacttggcgtggtggtggatacctgtaatcccagctacttgggaggctgaggcaggagaatcacttgaacccaggaggtagaggtttcagtgagccaagattgtgccactgcactgcagcctgggcaacagagcgagactccatctcagaaagcaaaaaacaaaaaaacaaaaaacccaaatcctctcttctctcaacatcctctctaccacttctctggtctacatagaaaactctttcgaagagctagtgttctgagatacgacttgggtttttgtttttgcatctgaagaatcctgaattatcaaacaccagaaaagcacaaacacaaaagaacttgctgaaaggactttatttgagatgaggaaacaaagttgatggcaatgtataggacacacgacagtttccttctaggtcataaagtaaattatgaatatatttctctctgttctcatccctcagaggcagcagaatctgtggttaatacccatgacagtgcaggtcccataggaatattctgttgaataacaggaccttctgcaatggcaagtgaaagcccttgttgagcctggggacagagagagagagcatcagaaattgagcaccagggtcagcagcgggcagtaaagagaatcttcaggaagttgcatgcttgctgacatgtaatgctggctgcattacagccaatagcatgatcacaccatcaataggaataaatacgcagagcagtgttggtcacacacaggattagagagccattctgatatgctgtacttatctgctccttccctgtcacacacacatctgaatgcacccatatgactgtctccagtttgcaacggttcctataaaagtcagattaaaaaacattcctttagcagctggatgtggtggcttacgcctgtaatcccagcactttgggaggccaaggtgggtttatcacaaggtcaggagttcaagactagcctggccaagatggtgaaaccccgtctctactgaaaaaaaaaaaaatacaaaatttagccaggcttggtgtctggtgcctgtaatcctagtgacttgggaggctgagggagagaattgcgtgaacccaggaggcagaggttgcagtgatctgagatagtgccactgcactccagcctgggtgacagagcgagactccatcaaacaaaacaaaacaaaacaaagcaaaacaaaacattcctttaaaattaggctctcttccttgaagtagagactcctcaatacatttctacatggcaaaaaattagaaaatttcatagacttatcatagaattaaaaaatctttagagaaaagtcatgccttgaatatcactgattcttccttttcagtacaaacataaagtaattgaggcctggggaggtgatcacctaagagaaagagccagctgttggatctaattctagaagtgcttggttttcctctctacactcctagctctgcaatgctggtgtctcttacccaaagctctaagacttgagcttgcatcctctgcaaaggagacggcaaagtcctggtcatttgccccacgctgctcctgggcatcagcctcataagcttttgcctgcagtggatcatcctcagcttggagtggctcagccttggcctggagggccacgaggagaacagcagtgaggatggtgagggttctcatggctagggtcgctggaggagagagagcaggagcagatgtgtggggagtgaggagccagcctggatttataggtctgctgggagaaggctcagggacagatgttgcggtgagacggggagtgcatgtgattggggagcagaagagctacccttgccctccatgtccctttgatgctcctttgttctccaagcttcattgtagtgtgaggctgtttattgagtgtctgttctggtcccagctgatagtgatgataagaacagtgttacattgtcctgttttccatctgctggaatatttacttgttaatattcaaaaaagaaaagaacagtgctttcaatgaataatttcaggaatcaaatgcctcttattttctgaaggtggggctggccactctctggaggtctagaccttgaggccagagctggatcccgctagagtagagagttaattcattgcaggattcagggggcatttctgccctcatgaaggaggctttgagattatggggtgaataggctcttgtggggcacagtgtggagaagataatgaccttatcagcctataagggaaaagaactcagtgggatactaggtaaagagttagtaaaactaaagccaaaagatttatttcaagaaacccatgtgatctgaatgtatcaactaaaatatgtactaggtatttctctccactttgagaaacatcgaaacaattgacatgcccacaatccccctctgaaattttattttatttttaattttagaaaatgttgaattgcccacaaggaccattcaaagggtaaaaggagtaatgagcctccatccttgccccagccctgcagctctgctccaggaaatctccacttaaaaattaaacattggtttgtgctttgttttttctccctaatgctgtaatttgaatactttgtagctcaaaacatatagaactctaccattattttcatagtctcttgtttctggtcttctattcaggtattttatccattttgagttaagttttgtatatgccaaaagagaagggtccagttttattgttttgcatatggaaatagtattcccaccaccatttattgaagagactctcctgtccctattgtgtcttcttcatgccattgtcaaaagttacttgaccatatgtgtttcgatgtgtttctggactctcaattttatttcactggtatgtgtctggttttatgccaataccatattgttttgattaccgtagctttgtaatataatttaaaaccaggaattgtgatgtcttcaactttgtttttttttctcagaattgttttgtctatttgggttctttcaccatttcatacaaattttaggatttttttttttatttctgtaaagaatgccatggggattttgataggaattgtgctgaatcggtatattgttttgtttgggatagacattttaacaatcttaattcttccaattttcagcccaggatatctttccatttatttttacattctttaatttctttcactatttttttttttttcattttcagtgtgtagatccttcacctccttgtttcttcctaggtgttttattttttgatgctattgtacatggaattgttttcttgatttttgtttcagttttgttagggaatctatgggcatttaaaaatgcatttgttctgtatttatttgaattttgccttcatttacccagcaggagatgaccatttaactaacatctaaatttcgaattaaactttccctctccaacccaaactgtaattgtccattgtgacttatagctgtctatgcctctttccccagtagttcatgggacaggcaataattactctatcacctggaaatcctaccctggagctgttactcagataccctgatctagctaacaggacaagatacttctgtaaataagtgatctaatttgtcttgacttaaaggagcattttggaattgtatgctctatctttggaaactaagaagtgttcccagcctattttaattgaaatagaagataatgcagaccaat

SEQ ID NO: 587371 - DNA, 4001 bp, Homo sapiens
tatgttaacaaagtgcctttcaaacccttttgagtttggactgaaccaccatcagaaagaaatttctcactgctactcagtaaaaacatatgcacacaccccaaactgaaatatgggtgtaattaaatagcatctacttttactacatggcatgaagtaatattttctattcctttaaaaaaacatgggctgggcgtggtggctcatggctgtaatcccagcactttgggaggcggaggcaggcggaccatgaggtcaggagttaaagaccagcatgaccagcatggtgaaaccccgtctgtactaaaaaatacaaaaattagccaggcttggtggcatgcacctgtaatcccagctaactcaggaggctgaggcaggagaattgcttgaacccaggaggtggaggttgcagtgagctgagattgtgccattgcactccagcctgggtgacagagcaagactccatctcaaaaaaacaaaacaaaacaaaacaaaaaaacacggtaggctgagtggagtggctcatgcctataatcccagaactttgggagtctgaactaggagggttgcttgtgcccaggagtttgagaccagcctggtcaacacagtaagaccttatctctacgaaaaaataaaaataaaaaaattagccaggtgtggtggtgcatgcctgtagtcacagtttcttgggaggctgaggtgggaggatggcctgagctcaggaggcagaggctgcagtgaggcgagatcacaccactgcactttagcctgggtgacagagtgagaccctgtctcaaaaaaaaagcaaagcaaaaacaaaaaccaaaaaccaaaaaccaaaaaaaaaaacaaaaaaacaaaatccattgtagcaactggcagcatgaaaagttctgcatttagaatgcttttgtactcagctttcagatggaaaaactgaggcataattggaataaattaagcctatctgctggatacagtgatggcctagagaaacttacaataggatcttacagagactttctgaactggagtgcttgctttcaggatcatccttcccagcccctcattctgcagatgaataaaccaaggcttagcaccatgtgactcgtgtgaacaaggatagggctgggataaaacatgttcccgattcctcctgcacgtcccaccatcatgtcagggtcatggctgctttggcccagagaagctgacatacacctggctcacaggaagccccctcctattgactggggagactgctaacctggagaatgtggatgcatttctcaggagagggagaggaccgcctgcctgcacaggaggtgagtccaaggcaccggctgagctggcctgatgggtggggcggcagcacctcacctgtaccagggcaccccaggaggctgcacccagtgacgtgggctgaggatggggccggcccctctctctgcataggaagctggcctctcagtgtgaggagtcgtcttgcaggggaagcagcaatctcatccacataggatactgtctacatgtccaggacaaggatgcaggcagctgcctgtgacaagcgccatgaccctgccaggctcactccttggcggctcacagaccctgaaggcttggcagggcttgcctgctgccttctgccaactgcaggccactcaaccacgggatgctttcctgctgcttgttcctcgtcccttgggacacggaggcagccatccgagactcacatcagccccattgtccccagccctggggatgggaaactcttgcaggtaccagagcttacctgaggccatctcagacaaaagtaagcagagagtaaacagcagaaggtaggaagttctcatggcgactggcaggcaacacccaggatttcaggaactggggagacgctggctcctttggaggctgagctgacagaggcttccagaggctggagcgtcactgtatttataagactggtggattgcacaacctcgtcgacggaactgaagggaggtgccacagtcaagggtgaacttctaatcgctaacccctggtgtcatttgccctgagcagtcagcagtcacatggcacattgtctccatctggctgccgctggatttagctttcagcctggagccctggtgccagctcctcctgtttggttttctaggttaggcagttctgatggggtttctggaacaggcagttcacactggagtccctccttctggatcacatggaggagagccacagggaagctctgagcagggggccgctcggctctaagctggtgttggcctctttagtttgattgtcttcctgcaagacaaactcaaacttcaccctcttcccttgcagaaggagagctggttgtaatgaagtttcttcctctggccaaggctaccttctcatctctccccttatgcagaacactctcctcgatggaccaacttttctcttttcccactagacgtgttcctgggacgtttccaaagggcactcctcagaaagtgagcccccagtgtggcccttggagggtgagggtctgggccagcctgggcccaccctgcagagctacaactgccagattggggtgctgttagcgactctccaagtatccctcaggttttccttgattctaaagatttaagaaacattttatttattactgattttcattgtaattctgtgagcagctttcctgatgtctcagtggcttatttgcaagcagcagacgctggctctcgctgaccaaggaagggaagagtttattcggaggatatcagggttggtggggggtggtggcattgctggagaacccagcttgaggctcagtttccaggaatgacatccaccctacactgtcacggtggtccaatgagaaccccatactgcagccacatggcatgagacacccagagtggagtgaccctcagccactctaccgctggcagaatgccattctgcacccaaacatgaacctgccgtatactcccacttcaaccctgccagagaaagacagagagagatccagaaagatggacaaacaaaaacagagacagaggaagagacagagacatgcagagagacagtagagagacacagagaaacagagagatagaaacagacagagagagatggaaatagagagagagagagagatagagagaaatagattcagagagacagaaagaaggagacagaaagatgcagtgggatcctgtagctagctcattgaggcagttcacaaagggtgtttgggagaaaacttggaagaggctgagccatgcctgacctaggagcagtgagattgtggaaagagaaaagaaagaaccgaaacacagctttccttgctggtgctgggtaagacatggctcagcctcttccaagttcctcccaaacaccgtctgtgaactgcctcaatgagctagctacagtattctatcggatctgtttctgtccctttccttctgtcttattgaagccacactatgattctttgaccaggcaatataatcctcatgttagagaagaaaaacactggggttcagagaattgaaacaaattgcccaaggtcaccctgctggtaaatggaaaactggtgtaatggcctggaaagcctcattccctagcctctgtgctgaccgcctcctggggaggcttccaggttattacaccaggtgtgggttcaataagattgtgaaagaaaaatatctcaggcaccttcaagctgggaactgcttattgcgaatctgcctctttttctattcaagtcatctttttgctcccagagatacatgcgtatttcgattaacttttttggaaagacttataataaattcaaaagaatgcaaccggtcagggcgcagtggctcacgtctgtaatcctaacactctgggaggccgaggcgggcagatcgcctgaggttaggagttcgagaccagcctggccaacatggtgaagccccgtccttactaaaaatacaaaaattagctgggtgtggtggcacaca

SEQ ID NO: 587372 - DNA, 4001 bp, Homo sapiens
gaaatcacctgtgtttttaaggtggagataaaatgtgagacggtccctgaaggacaggttaaagtttagagatgaagttggaggagtgaggcagacatgaggtcaaccagagcagaggcatgggtgagagaaagcaaagtgaatatctgaggaagagccagtttccttatttctctgaagacaaagtttttggaaggaattgggatagcccctgagggatgcatgaaaaccttagagatagatttggtggagagatgccatttggggtagagggactgaaaaggcccaaggcttggatgacatgaaagcaaagggcatattccaagagagtgaagagtccaacttcactggggcataacgttcacaaagtaggaatagaacctgataacccttggataataaggttgggctcccttatagatttctccagagattctactttctttgaacgaaaggtgagtccttaagattttctgagttgtctgtttggaaacaagtaccaaaataatcagatttaaaaaaaaaaatcaagctcctaattttttttgaaaaaaaaatgtaatttgattttacttttataaactttaagaaggcatttccacactttacaacactctcgtcatgtttcagggtttttatttctttcttcggcagcattttcggccacgcgtcgagcacttgccgatctgttcctcctttggaaggcagctgagcacagcacaccggccgcctctgactctgcaataatatttctgtaatgtgtttatgattcctccatgacctgcaatgacaaaacagcacacacggaaaggttttaggaaggcttttggtacacgtacaaggcttgtggaattcctcaaataactcatcccttgcttttcttgtattcttttgtttctttttcctttttctataaaatcaggaggaagatgaaggtatgactacacaacccatagacaatgtttctaaggctgcagctcagctgtggacccacagtggcaccggggaagtggcgtgaccctgtgactgccgcaggaacagtgggggtgctgaggctgtggtgtcctcagaggtagccccaacactccacctccaaccattgcacttagtagaacaggagcctgtgcttctattctcagagtaaatcaatctttcctgctacattaaacttttatgtctgattcatgtctcatcagctggtataataatcttcccttgaagagttggggaaagagatagctttggggagctatttagtttcttaatgattcttttctttttttttttttttgaggtgtactctcaccctgtcacccagtctggaggacagtggcgtgatctcggcttactgcaacctccgcctgccaggtttaagcaattctctgcctcagcctcccgagtagctgggattacaggtgcccgccactgtgcccagataatttttgtatttttagtagagatggggtttcaccatcttggccaggctggtcttgaactcctgacctcgtgatccgcccacctcggcctcccaaagtgttgagattacaggcatgagccaccgcacctggcctcttaatgattcttgtctgaaaaaaaagtggtgatgcctagttcccatacaacaaacctgcttggtccaaagcactctgaaggatggagaaatactgactctgaattatatattctcaattagatcaatccttagatttcccagcccatcttacctggaacaggcaccaaaaacaggaagagcaaagcaaacagaagataatggatcctcatagctgctaggcttcaccccacgctgagactggatgaaaaggtgtgcttggtcactttataaaggttccagccacagctgcaattcttgtcatattacagtgatgacattatgacatgttttctgatgcatcattccaatgcctctcaccatgcagaacacacccactcactcagttaattaggaacccaatggtaaggcagagctccctatggatttgtggctgtccgggtgctctctggactccaggggcttgtctgggtgtgggtcagattgggttgtgggtacagatagggctggcatgagcaagtatgccccctttggggaatagtctcagggcatgtggctgggggctgacttgtccgtactttgctgctttggagctttttttctcttcctaaaatgctgggagagtctaagaccctcctggggaccaaataaatccagccctggacatattcaatatctggcaataggactggctttttggtagtgaggtaagggaggaaaatgggctacattcaaggttagctgaccacctggcccttggcctatgatggggtgctataatttgagtgaaacatgtctcattctttcattttttttttttttttttgagagacagagtctcacttttttgtgcaggctggagtgcagtggcatgattacagctcacaacagcttgagctgtcaggctcaagaggtcctcccacttcagccccctgagtagctgggaccacaaacgcatacctccacacatggctaaattttaaattttctgtagaaaataaaatggggtctcactatgctgcccagactggtttcgagcccagatgtgaactcctgggctcaagcaatcctcctgcttcagcctcctaaattgctgggattactggtatgagccactgtgtgcggcccatgtccgattcttcatcattgtctaaaacctaccaaatttatgagtaaagaaggtgtttaattttacttcatcagagaaagaggatgctgggatgatagatttaatagactggcatctcctcctagtcaatgactgtccctgtgcaaaagaggggcttcagaatagacatttaagacctcaagttactcttggctcaggagcattcaaggcagtccaggggccagatgatttcccctgcatatagattcaacgtttagagggaaaaatgctaaaaaagaaaaaaaaaacagctattaaacttaaatgttcaggaatccaatggatgggttgtatttggttgactatcaattgggaactaagtaagtcaatgacaattcaattgggagctgaagtcaccgtgatgtctcctagctgctgcttcgtgtgaatgcaattataacggatccactaaggatcaagggtgtgttagttctgggagtgtgtgttcagaatttgggtgcaccacacctgtcagattcagtaagaaaactctgaacacatactataggaagggacaagtatcatgtcttcagcataggtgagggtgaagtggatgagataccaagagggaccagtcttggttctttctctccagaagctccatgtagggccaggtagatgggcagacagtcaaatgataaatttaggatgaattataatgggagtcataggaagatttcaagcacagggctgcagaaacgtagaagaaagataactcatcataactcaaagataactctttgagccaagagtggagctcaatcagcagatttaagactttagataggtagatgctactttttaaaatctaactttcctctttagttcatgatttgagacaaagcaattggagatatttataaatgggggaaggaggtgagtgtgggtgggatgggtgctgacttcacagtcttactatgtcagacataacgatggcattgggcgttgtagagggttagcaccagctctcagcctggggtgaggacagtcagacgctggagatgacttgcttttccacatggagaatagacttccacaggtgaacccctggtctaacctgttccttcatagactgggaggcatttttatggcaacaccactatttcataaaagttccttggtgaggaaaaatgccactttttcttgtcaactagtttgggagctgggaattggagattgggctgtgacaatcagccttttcaagtttggacatactccagacacacaaaatccgttttgagggggacttacctgttttaagaa

SEQ ID NO: 587373 - DNA, 4001 bp, Homo sapiens
ggaaatcacctgtgtttttaaggtggagataaaatgtgagacggtccctgaaggacaggttaaagtttagagatgaagttggaggagtgaggcagacatgaggtcaaccagagcagaggcatgggtgagagaaagcaaagtgaatatctgaggaagagccagtttccttatttctctgaagacaaagtttttggaaggaattgggatagcccctgagggatgcatgaaaaccttagagatagatttggtggacagatgccatttggggtagagggactgaaaaggcccaaggcttggatgacatgaaagcaaagggcatattccaagagagtgaagagtccaacttcactggggcataacgttcacaaagtaggaatagaacctgataacccttggataataaggttgggctcccttatagatttctccagagattctactttctttgaacgaaaggtgagtccttaagattttctgagttgtctgtttggaaacaagtaccaaaataatcagatttaaaaaaaaaaatcaagctcctaattttttttgaaaaaaaaatgtaatttgattttacttttataaactttaagaaggcatttccacactttacaacactctcgtcatgtttcagggtttttatttctttcttcggcagcattttcggccacgcgtcgagcacttgccgatctgttcctcctttggaaggcagctgagcacagcacaccggccgcctctgactctgcaataatatttctgtaatgtgtttatgattcctccatgacctgcaatgacaaaacagcacacacggaaaggttttaggaaggcttttggtacacgtacaaggcttgtggaattcctcaaataactcatcccttgcttttcttgtattcttttgtttctttttcctttttctataaaatcaggaggaagatgaaggtatgactacacaacccatagacaatgtttctaaggctgcagctcagctgtggacccacagtggcaccggggaagtggcgtgaccctgtgactgccgcaggaacagtgggggtgctgaggctgtggtgtcctcagaggtagccccaacactccacctccaaccattgcacttagtagaacaggagcctgtgcttctattctcagagtaaatcaatctttcctgctacattaaacttttatgtctgattcatgtctcatcagctggtataataatcttcccttgaagagttggggaaagagatagctttggggagctatttagtttcttaatgattcttttctttttttttttttttgaggtgtactctcaccctgtcacccagtctggaggacagtggcgtgatctcggcttactgcaacctccgcctgccaggtttaagcaattctctgcctcagcctcccgagtagctgggattacaggtgcccgccactgtgcccagataatttttgtatttttagtagagatggggtttcaccatcttggccaggctggtcttgaactcctgacctcgtgatccgcccacctcggcctcccaaagtgttgagattacaggcatgagccaccgcacctggcctcttaatgattcttgtctgaaaaaaaagtggtgatgcctagttcccatacaacaaacctgcttggtccaaagcactctgaaggatggagaaatactgactctgaattatatattctcaattagatcaatccttagatttcccagcccatcttacctggaacaggcaccaaaaacaggaagagcaaagcaaacagaagataatggatcctcatagctgctaggcttcaccccacgctgagactggatgaaaaggtgtgcttggtcactttataaaggttccagccacagctgcaattcttgtcatattacagtgatgacattatgacatgttttctgatgcatcattccaatgcctctcaccatgcagaacacacccactcactcagttaattaggaacccaatggtaaggcagagctccctatggatttgtggctgtccgggtgctctctggactccaggggcttgtctgggtgtgggtcagattgggttgtgggtacagatagggctggcatgagcaagtatgccccctttggggaatagtctcagggcatgtggctgggggctgacttgtccgtactttgctgctttggagctttttttctcttcctaaaatgctgggagagtctaagaccctcctggggaccaaataaatccagccctggacatattcaatatctggcaataggactggctttttggtagtgaggtaagggaggaaaatgggctacattcaaggttagctgaccacctggcccttggcctatgatggggtgctataatttgagtgaaacatgtctcattctttcattttttttttttttttttgagagacagagtctcacttttttgtgcaggctggagtgcagtggcatgattacagctcacaacagcttgagctgtcaggctcaagaggtcctcccacttcagccccctgagtagctgggaccacaaacgcatgcctccacacatggctaaattttaaattttctgtagaaaataaaatggggtctcactatgctgcccagactggtttcgagcccagatgtgaactcctgggctcaagcaatcctcctgcttcagcctcctaaattgctgggattactggtatgagccactgtgtgcggcccatgtccgattcttcatcattgtctaaaacctaccaaatttatgagtaaagaaggtgtttaattttacttcatcagagaaagaggatgctgggatgatagatttaatagactggcatctcctcctagtcaatgactgtccctgtgcaaaagaggggcttcagaatagacatttaagacctcaagttactcttggctcaggagcattcaaggcagtccaggggccagatgatttcccctgcatatagattcaacgtttagagggaaaaatgctaaaaaagaaaaaaaaaacagctattaaacttaaatgttcaggaatccaatggatgggttgtatttggttgactatcaattgggaactaagtaagtcaatgacaattcaattgggagctgaagtcaccgtgatgtctcctagctgctgcttcgtgtgaatgcaattataacggatccactaaggatcaagggtgtgttagttctgggagtgtgtgttcagaatttgggtgcaccacacctgtcagattcagtaagaaaactctgaacacatactataggaagggacaagtatcatgtcttcagcataggtgagggtgaagtggatgagataccaagagggaccagtcttggttctttctctccagaagctccatgtagggccaggtagatgggcagacagtcaaatgataaatttaggatgaattctaatgggagtcataggaagatttcaagcacagggctgcagaaacgtagaagaaagataactcatcataactcaaagataactctttgagccaagagtggagctcaatcagcagatttaagactttagataggtagatgctactttttaaaatctaactttcctctttagttcatgatttgagacaaagcaattggagatatttataaatgggggaaggaggtgagtgtgggtgggatgggtgctgacttcacagtcttactatgtcagacataacgatggcattgggcgttgtagagggttagcaccagctctcagcctggggtgaggacagtcagacgctggagatgacttgcttttccacatggagaatagacttccacaggtgaacccctggtctaacctgttccttcatagactgggaggcatttttatggcaacaccactatttcataaaagttccttggtgaggaaaaatgccactttttcttgtcaactagtttgggagctgggaattggagattgggctgtgacaatcagccttttcaagtttggacatactccagacacacaaaatccgttttgagggggacttacctgttttaaga

SEQ ID NO: 587374 - DNA, 4001 bp, Homo sapiens; identical to SEQ ID NO: 587372

SEQ ID NO: 587375 - DNA, 4001 bp, Homo sapiens; identical to SEQ ID NO: 587373

SEQ ID NO: 587376 - DNA, 4001 bp, Homo sapiens
ctgacctcaagtgatctgcagacctcagcctcccaaaatgctgagattacaggtgtgagccactacacctggctgatttacattggtttggtccagaaaggtgggacaattcaaagtgggggtggcggggggcctgtgggggtgcagtgggagtgtgtggcaggtggccttccaggctataggtaaatttaaacattttctggttgacaattgattgagtttgtctaaagacctgggatcaatagacaggaatgtttgggttgcgacaagaggttgtattgtggaggccaaagttgtatcatgcagttgatgcttttagctagcaggcttcagagagaacaggctgtaaaatgtttcttatcacacttaaagtctgtgttgatgttcatgatggaaagtgtaatgaggcatgtccaacccccacttcctttcatggcctgaagcagtctttcagattaaattttaagagccctggctgaggagggagtccatttagatggttggggagggggcttagaattttatttttggttgacagcacccatccccagtccctgtgggtatctgaggggctgacagtgtgtgacagccaaacttacccaaagcaggggtggcaggagaagaggcaggcagcgcatgtcattcaccctcacccacttctgccacttccctccctaatcctcttcctgctaatggtctttctcagaattcaactgcagaggacagtctgacccagccctcagcagccaagtgtggataatggcagccagctctgcggtgcattcttcgggatctggagggatccctgacccaggctttccatcccaagttctttgtcttgggatcaaaggttgaagaaaacctgttctttgataaattgctatcatattttaacagacctggaacatgctcatagcagaatttcacagaagtgtctttgggaaatgacacgggaagaaagaaaaaggaagagttaacctaaacaggtaccctctgaaaaaaaatcattaacccatctgaatcacagtggaggcacagcctggaagggtaaaaagatgggtgctgggtgtctgtcaaagccccataaaattgactgagcagcttggaagagaagatccgatggcttctacgagtcaaaacaattggtttcgtcccagcactgctagacttgttaagcaactctaaaaatcttattttctctcactgtactatagagaatgctgctcagcttgtaaaagaagggaattagattaggtgctcactcatatccattgcaaatatattaagaaatacatgcttctggggacatagattaacgtaggagtcagaagattgctgacatctcagtctaaaatttcctgagcagagttcaaaggcacctgctatttgtgttgtcagtaaattacgttcttgcctactgaaatcactgcatcccctttaatcctaatcatctgacttgatatgaaaagttgcaaaatttaggaggatgagtaggcgccctttctgtgcagagtaaagctgttcagaaggaggaggatgggagaaggcatcttattctacaaaatcaacaatgaataattgctgctgccctgcaatggaacaagcatggctagtgagtcctcactgctgaggattccatgaggaattgttaccgtgtgtggccagggtgccaaggacatctaggactcctgatccctacgtttcttttttcctccttgagctagtaagcctcatggctgtaaggtgcatacaaggattgccacatactgcattttactaatggacccaatgaaagcaaagagaaaaaaggctgagattgaagaaggttactccatccttcaggatttattttctaaatcaaatgtttttcttctccccctgtcatccccagcaactgtgtatatttccagctgagagtccctttttacctggaagatcttgatagagtagaagagaaatggctaatagcagcacaagtctctgcataatgctggggctgctggcgagaagcagacgcaagtcggagggaatcaccccaggcaggagcagggcaggtgtatttatgggcagaggctgctcttgattactgaggcttatcaaaatgcagcgttccttggtgaagactcaccaaggcacagtgtgggggaggtgttggggctacagaaatgccagctgggcagtgttgagggtggggagacagtattaccataggtaaagtccaagtcacttcacttgcttccccgaatcgtttctgaagcaagaactggattagatgatctctaagataccttccagccttgacattcctcaattctggtgagaggactttctcttccatttcagtacatttcagtcaggagattcttgttgaaaactgtgatgtggctaatggaattgaagtccatagcccccaagacctctctgaagtaaacattgaaacaaacatacaacgtcaaggagaagaatggcatggagcgtggggaggtcataaatgcgtgaaaagtcccagcacatttctgtgatagaaaaagtataggatgaggatgacaagtgacaacaaggaatacttgatggcgggcattgtccaagggtgggattgtaaccacagagcatcaggctcacttagggcttaggtgaaaaggaggacaagaatgagaagagaggttaaaaggagacaattcatgggaatgctgtatttctaacaatggcttcaaataaaacataaccttccagagagcatacgcctggccctcaaccaggggtatatgctccctggatttaaccccaaccccacccgaggcaaaacatatagagcatatgctcctggcatttgcccttagggaaaacaccagataattttattttaagaaaaaaaaaaatacttcatttctctaaaatgaaatattttagagaaagtaaaaacgtccaatcttggaagttgacattctcgaataagctccccttattctagaacacagattagacaaagcctgacagacatacgttgcttgcacatcctaagcaaaatctagcagtcagtgtgtcttccccagagttctcacttaggggagaatgtgatggaaaaccaggtctcctttcacagtaacggaatagaatagaacatcagaaatcataaactatgccagtttgggtgctccatgaagcatttatcaacaggaattagaaaggaaataaatttattgggaaatgcctgtgaaagataaaggggggccaggcgcagtggctcacacctgtaaatctcagcacttggggaggctgagcgagggaggaggatcatgtgagctcaggggtttgagtccatcatggacggcatagagagaccccgactctacacaaaaagaaaattagccagggatggtggtgtgtccctgtagtcccagctacttgggaggctgaggcaggggggtctcttgagcccggaagttcgaggttgcagtaagctatgatggcactactgcactccagtgtagtaggcaatacagcaaaaccttgtctctgaaaaaaataaaataaaataaaaattcaaaacaaaaagatgatggggagagggagcaagattgagtagggaaagtcttcagaacatgacgtcaattaacacctgtgaaaaggtttggagtcgggggagcctcagactacagtgcagaaaatttcagcattgccagtggggaaccccagggcaaagactgtcctacaccagcagacatggcccagctctagtccacattgtgctcattcactgcctggaagcagccagggcaagagtggtagccatgggaatcctgccgcaggttacaaacgtgcagcacgtagaggccgtcggatactctcctcacagcagacacacagcaagcacaaatgtgcaggatccatgggaccctcctagcctgccacatgtcaggctttagtaatttttgatgatgagcttcaagggaaaaacatcagccaatattcaaggtcatctatgtgaccaggattctgaa

SEQ ID NO: 587377 - DNA, 4001 bp, Homo sapiens
ctgacctcaagtgatctgcagacctcagcctcccaaaatgctgagattacaggtgtgagccgctacacctggctgatttacattggtttggtccagaaaggtgggactattcaaagtgggggtggcggggggcctgtgggggtgcagtgggagtgtgtggcaggtggccttccaggctataggtaaatttaaacattttctggttgacaattgattgagtttgtctaaagacctgggatcaatagacaggaatgtttgggttgcgacaagaggttgtattgtggaggccaaagttgtatcatgcagttgatgcttttagctagcaggcttcagagagaacaggctgtaaaatgtttcttatcacacttaaagtctgtgttgatgttcatgatggaaagtgtaatgaggcatgtccaacccccacttcctttcatggcctgaagcagtctttcagattaaattttaagagccctggctgaggagggagtccatttagatggttggggagggggcttagaattttatttttggttgacagcacccatccccagtccctgtgggtatctgaggggctgacagtgtgtgacagccaaacttacccaaagcaggggtggcaggagaagaggcaggcagcgcatgtcattcaccctcacccacttctgccacttccctccctaatcctcttcctgctaatggtctttctcagaattcaactgcagaggacagtctgacccagccctctgcagccaagtgtggataatggcagccagctctgcggtgcattcttcgggatctggagggatccctgacccaggctttccatcccaagttctttgtcttgggatcaaaggttgaagaaaacctgttctttgataaattgctatcatattttaacagacctggaacatgcccatagcagaatttcacagaagtgtctttgggaaatgacacgggaagaaagaaaaaggaagagttaacctaaacaggtaccctctgaaaaaaaatcattaacccatctgaatcacagtggaggcacagcccggaagggcaaaaagatgggtgctgggtgtctgtcaaagccccataaaattgactgagcagcttggaagagaagatccgatggcttctacgagtcaaaacaattggtttcgtcccagcactgctagacttgttaagcaactctaaaaatcttattttctctcactgtaccatagagaatgctgctcagcttgtaaaagaagggaattagattaggtgctctctcatatccattgcaaatatattaagaaatacatgcttctggggacatagattaacgtaggagtcagaagattgctgacatctcagtctaaaatttcctgagcagagttcaaaggcacctgctatttgtgttgtcagtaaattacgttcttgcctactgaaatcactgcatcccctttaaccctaatcatctgacttgatatgaaaagttgcaaaatttaggaggatgagtaggcgcccttttctgtgcagagtaaagctgttcagaaggaggaggatgggggaaggcatcttattctacaaaatcaacaatgaataattgctgttgccctgcaatggaacaagcatggctagtgagtcctcattgctgaggattccatgaggaattgttaccgtgtgtggccagggtgccaaggacatctaggactcctgatccctacgtttcttttttcctccttgagctagtaagcctcgtggctgtaaggtgcatacaaggactgccacatactgcattttactaatggacccaatgaaagcaaagagaaaaaaggctgagattgaagaaggttactccatccttcaggatttattttctaaatcaaatgtttttcttctccccctgtcatccccagcaactgtgtatatttccagctgagagtccctttttacctggaagatcttgatagagtagaagagaaatggctaatagcagcacaagtctctgcataatgctggggctgctggcgagaagcagacgcaagtcggagggaatcaccccaggcaggagcagggcaggtgtatttatgggcagaggctgctcttgattactgaggcttatcaaaatgcagcgttccttggtgaacactcaccaaggcacagtgtgggggaggtgttggggctacagaaatgccagctgggcagtgttgagggtggggagagagtattaccataggtaaagtccaagtcacttcacttgcttccctgaatcgtttctgaagcaagaactggattagatgatctctaagataccttccagccttgacattcctcaattctggtgagaggactttctcttccatttcagtacatttcagtcaggagattcttgttgaaaattgtgatgtggctaatggaattgaagtccatagcccccaagacctctctgaagtaaacattgaaacaaacatacaatgtcaaggagaagaatggcatggagcgtggggaggtcataaatgcgtgaaaggtcccaggacatttctgtgatagaaagagtgtaggatgaggatgacaagtgacaacaaggaatacttgatggcgggcattgtccaagggtgggattgtaaccacagagcatcaggctcacttagggcttaggtgaaaaggaggacaagaatgagaagagaggttaaaaggagacaattcatgagaatgctgtatttctaacaatggcttcaaataaaacataaccttccagagagcatacgcctggccctcaacccggggtgtatgctccctggatttaaccccaaccccacccgaggcaaaacatatagagcatatgctcctggcatttgcccttagggaaaacaccagataattttattttaagaaaaaaaaaatacttcatttctctaaaatgaagtactttagagaaagtaaaaacgtccaatcttgaaagttgacattctcgaataagctccccttattctagaacacagattagacaaagcctgacagacatacgttgcttgcacatcctaagcaaaatctagcagtcagtgtgtcttccccagagttctcacttaggggagaatgtgatggaaaaccaggtctcctttcacagtaacgaaatagaatagaacatcagaaatcataaactatgccagtttgggtgctccatgaagcatttatcaacaggaattagaaaggaaataaatttattgggaaatgcctgtgaaagataaaggggagccaggcgcagtggctcacacctgtaaatctcagcacttggggaggctgagcgagggaggaggatcatgtgagctcaggggtttgagtccatcatggacggcatagagagaccccgactctacacaaaaagaaaattagccagggatggtggtgtgtccctgtagtcccagctacttgggaggctgaggcaggggggtctcttgagcccggaagttcgaggttgcagtaagctatgatggcactactgcactccagtgtagtaggcaatacagcaaaaccttgtctctgaaaaaaataaaataaaataaaaattcaaaacaaaaagatgaaggggagagggagcaagattgagtagggaaagtcttcagaacatgatgtcaattaacacctgtgaaaaggtttggagtcgggggagcctcagactacagtgcagaaaatttcagcattgccagtggggaaccccagggcaaagactgtcctacaccagcagacatggcccagctctagtccacattgtgctcattcactgcctggaagcagccagggcaagagtggtagccatgggaatcctgccgcaggttacaaacgtgcagcacgtagaggccgtcggatactctcctcacagcagacacacagcaagcacaaatgtgcaggatccatgggaccctcctagcctgccacatgtcaggctttagtaatttttgatgatgagcttcaagggaaaaacatcagccaatattcaaggtcatctatgtgaccaggattctgaa

SEQ ID NO: 587378 - DNA, 4001 bp, Homo sapiens; identical to SEQ ID NO: 587376

SEQ ID NO: 587379 - DNA, 4001 bp, Homo sapiens; identical to SEQ ID NO: 587377

SEQ ID NO: 587380 - DNA, 4001 bp, Homo sapiens
atgagaatgattctgagactcactcactgtgtgatttggataagccacataacttctcttgaacttctttgaatatccaggtctgcttctaaggccagaagtgtgctggtctggtttgtcagatcctctgtctgcagcagagaaagttcagcctgcaatttccatcgggcttctcattctccaagcactccttcctgcattttccccgaccaagcttgcacgactcacagacagcaaactcacctgtgccaagaaagagctgctgagggagctttccaggaaatgtctagaaatggggaacatgtcaaagaccaccaaaaaaaaagggacagttcgtacgtatgattacaaagaatattttcaagaatcagcccagatttttcaaaaatagtttctgctttttgcagtagggagttggggagagttaatttttatgcaacagatcatcgcaattcctactctccaagtgtttataatctggcagggatcaaaagtaaaccacagacagacaaagagacatacatattacagaactataaaaatacatacctgatatgactgtgaagtttactagacaaaaaatgggaggggtatattgtggttttttaaagatccttgaagatcaactctagtttgggcctagtagccggcaggttaaggtccatattctcatttgtccagtggccattctagaagcacctgactacattttttaaatcagtttagggatcaaatggaatattatatgtaaatattttcattataataatacctaccacataggactgttttgaggattacatgacaaagtccatgtaaagtttttagcaggatgcctggtacagagcaaacactcaaggactagtagcaaccttcatatttctcactttgaaattctgtctaaaaccatttcaactttgtctacaatatttcttttagttttgtttacaatgtcctttctttctgtataagatgacttcaaagaaaaagaaaagatctgggggctattcgttatgaatagcttttctgcaatggtgctgagttttcactgaggcaacctcactctttaatttgagcttccttcaactaacctcatgcatttgtgacatatattattaccagacttagcagcagagcttgcaagagatgggcaggcgtgttcacagagcagtgctaattggctggtacaagaataaatctaagaacttggtttagtgagcaccaacagctaatgggaaaagccactgagtccaaatctctatggccaaattacagtccagtcacaaagatatttttctgtgaaatcaaaaatatccaaatattatacttggaacaagagaaagagaaggagataagttagtgaactgatttttcagacaattctatttctgccactatctctgtcccctctttgcctccagacatcagagagacctaacagcgccagagctcctaagagaaaaaataattatatacaagagatttaacttacctgatggaaatggttgggaaaaatcaagtcctgcctggcaccctaaattcaaaacaaaatacattttgaaaattaaaatcaacacaggaattaacactgtataaaacactcccaacttcacatgtgacatagcataacaggagacagtagatcacagagttgcaatctttattctgtttctcaaggccagcattccaggtaaccagcaaaaacaaattacaaaaaaaaaaaaatacactatatgctgtttgctcttagtaaatgtcactgtaggtctaagaaattcccatgacaggtgccatgagagcttgaccattaaggtcaaacatggaagaatcaacaggctttataatctgcccaatcaaaatcccatccatttttacttacctgatggcagttgaaccaaaatgaagaacatagcaaatagaaaataaaatgtcttcctgatcagggccatcttttagggaagactcttcggaatagagattgggatttccttgagaagacccaaatgagaggctcatttttatttaaaagtaatggggagatgctcttgatccgtgaagtgaatcaataaaacacaattatatgctccatttcccaggataaagggatgatatcatggataataacccttggcatccagaaagccttttattttggggagtctaactggtgtagtggaaagaacaccaggctagaggttgaaagagcaggggccatgtgagtttccaccatactaatgcaggggccagaagatagtgacccctttcatctcttccagcttctgttttctgggagaaaataagaacccacttgcaaattctgcctgcctctaaaggtgttgtaagaatctagtatgattataatgcaaaagtgttttgaatatgtggaatgcttggaaggaggcctggtaccatgtaagaactcaataaatgtggactctcacttttctagctttcatttttattctctacaagtatcacagggagaaaaggaggggtagcaatcattttgtcaagttagctctgagtcccctttcctgtaagatatcacctcacgcaccaaagccataattactgcatattttaaattcattaaggacatgaatattggcccagatgggtggcttatgtctattatcgtagcttttgggagcctaaggcaggtagattgcttgagcccaggtgtctagggcaaggcatgatggttaccagccccttgctgcgccaacagtgccatggtacaggtgagcagcatggcaggaccaagcacgaaaagcgtgcagcatacagcaagattcacattttttaacaaatatatgcttaggtcaagccctttgccaagtttacaaagctcaaaaagactgaatctggaattcagattccacctcactacggttcctcagctcttaactgaagcattgagatattgtataattactcccattttacatatgagtaaaccaaagctgttcaggaacacagccaggattagaaacgaaactactggactccagatttttttattttttctgtgtctgccctactctgtcctcccttcatccccactttccttcttcaaaactttccagaatcagaaatatgatgagctgtagactgagtgacacccactgaggttgggtgggctctgtgcagcagagcatggaaatcctctcgtttctgctaagcctcactgatcaagatgttacttggtctggagaaatgtataaatgtgggtgtttgcggctctttcctcatggacacggtgctgatctctcaagacccacccagtcatgaggactttcctctttctctttgccgtgctcttctttctgaccccaggtaaaatgggcatctttacagggaaggtgatcggaggtggtgtcccacagacagggtccccttcagtgaatgcctgggcgtgatcaacccatctactacaagaggtgatatcccccaacgcctcttctgtaattcctttgcattttacattgttatctaggaggggctgtcacaggtttgaaagaataaaagaaggccaggaaagatgccttttggcatcccatctcatgctcactaacaaaaacaaaaattgagaaaaaattaaaaacaaggatagcagtctatgaaccttttaaaatgtagttatggtagagattgagacaggtaaggagaagggacaggtaaggatctgagcttagagacacctatgcactcatgccagtcatggcaacaggtaaagcagcgtaacttggactgccatttcttgatcacatatcatcaagccaagtactgtgatgagagcttcacataaaatgcatctagtcttccagtgccagcgcctttacggaaaactctgtcttacccctaatttaatggaagttagagaaaatctttttgggtttgaaggtccattttacaaattttattacagatgcagaaattgtgcctcagatgggctcagtgcttctcagagtcttatagataaccaaaacaaagccagggta

SEQ ID NO: 587381 - DNA, 4001 bp, Homo sapiens
tgagaatgattctgagactcactcactgtgtgatttggataagccacataacttctcttgaacttctttgaatatccaggtctgcttctaaggccagaagtgtgctggtctggtttgtcagatcctctgtctgcagcagagaaagttcagcctgcaatttccatcgggcttctcattctccaagcactccttcctgcattttccccgaccaagcttgcacgactcacagacagcaaactcacctgtgccaagaaagagctgctgagggagctttccaggaaatgtctagaaatggggaacatgtcaaagaccaccaaaaaaaaagggacagttcgtacgtatgattacaaagaatattttcaagaatcagcccagatttttcaaaaatagtttctgctttttgcagtagggagttggggagagttaatttttatgcaacagatcatcgcaattcctactctccaagtgtttataatctggcagggatcaaaagtaaaccacagacagacaaagagacatacatattacagaactataaaaatacatacctgatatgactgtgaagtttactagacaaaaaatgggaggggtatattgtggttttttaaagatccttgaagatcaactctagtttgggcctagtagccggcaggttaaggtccatattctcatttgtccagtggccattctagaagcacctgactacattttttaaatcagtttagggatcaaatggaatattatatgtaaatattttcattataataatacctaccacataggactgttttgaggattacatgacaaagtccatgtaaagtttttagcaggatgcctggtacagagcaaacactcaaggactagtagcaaccttcatatttctcactttgaaattctgtctaaaaccatttcaactttgtctacaatatttcttttagttttgtttacaatgtcctttctttctgtataagatgacttcaaagaaaaagaaaagatctgggggctattcgttatgaatagcttttctgcaatggtgctgagttttcactgaggcaacctcactctttaatttgagcttccttcaactaacctcatgcatttgtgacatatattattaccagacttagcagcagagcttgcaagagatgggcaggcgtgttcacagagcagtgctaattggctggtacaagaataaatctaagaacttggtttagtgagcaccaacagctaatgggaaaagccactgagtccaaatctctatggccaaattacagtccagtcacaaagatatttttctgtgaaatcaaaaatatccaaatattatacttggaacaagagaaagagaaggagataagttagtgaactgatttttcagacaattctatttctgccactatctctgtcccctctttgcctccagacatcagagagagctaacagcgccagagctcctaagagaaaaaataattatatacaagagatttaacttacctgatggaaatggttgggaaaaatcaagtcctgcctggcaccctaaattcaaaacaaaatacattttgaaaattaaaatcaacacaggaattaacactgtataaaacactcccaacttcacatgtgacatagcataacaggagacagtagatcacagagttgcaatctttattctgtttctcaaggccagcattccaggtaaccagcaaaaacaaattacaaaaaaaaaaaaatacactatatgctgtttgctcttagtaaatgtcactgtaggtctaagaaattcccatgacaggtgccatgagagcttgaccattaaggtcaaacatggaagaatcaacaggctttataatctgcccaatcaaaatcccatccatttttacttacctgatggcagttgaaccaaaatgaagaacatagcaaatagaaaataaaatgtcttcctgatcagggccatcttttagggaagactcttcggaatagagattgggatttccttgagaagacccaaatgagaggctcatttttatttaaaagtaatggggagatgctcttgatccgtgaagtgaatcaataaaacacaattatatgctccatttcccaggataaagggatgatatcatggataataacccttggcatccagaaagccttttattttggggagtctaactggtgtagtggaaagaacaccaggctagaggttgaaagagcaggggccatgtgagtttccaccatactaatgcaggggccagaagatagtgacccctttcatctcttccagcttctgttttctgggagaaaataagaacccacttgcaaattctgcctgcctctaaaggtgttgtaagaatctagtatgattataatgcaaaagtgttttgaatatgtggaatgcttggaaggaggcctggtaccatgtaagaactcaataaatgtggactctcacttttctagctttcatttttattctctacaagtatcacagggagaaaaggaggggtagcaatcattttgtcaagttagctctgagtcccctttcctgtaagatatcacctcacgcaccaaagccataattactgcatattttaaattcattaaggacatgaatattggcccagatgggtggcttatgtctattatcgtagcttttgggagcctaaggcaggtagattgcttgagcccaggtgtctagggcaaggcatgatggttaccagctccttgctgcgccaacagtgccatggtacaggtgagcagcatggcaggaccaagcacgaaaagcgtgcagcatacagcaagattcacattttttaacaaatatatgcttaggtcaagccctttgccaagtttacaaagctcaaaaagactgaatctggaattcagattccacctcactacggttcctcagctcttaactgaagcattgagatattgtataattactcccattttacatatgagtaaaccaaagctgttcaggaacacagccaggattagaaaccaaactactggactccagatttttttattttttctgtgtctgccctactctgtcctcccttcatccccactttccttcttcaaaactttccagaatcagaaatatgatgagctgtagactgagtgacacccactgaggttgggtgggctctgtgcagcagagcatggaaatcctctcgtttctgctaagcctcactgatcaagatgttacttggtctggagaaatgtataaatgtgggtgtttgcggctctttcctcatggacacggtgctgatctctcaagacccacccagtcatgaggactttcctctttctctttgccgtgctcttctttctgaccccaggtaaaatgggcatctttacagggaaggtgatcggaggtggtgtcccacagacagggtccccttcagtgaatgcctgggcgtgatcaacccatctactacaagaggtgatattccccaacgcctcttctgtaattcctttgcattttacattgttatctaggaggggctgtcacaggtttgaaagaataaaagaaggccaggaaagatgccttttggcatcccatctcatgctcactaacaaaaacaaaaattgagaaaaaattaaaaacaaggatagcagtctatgaaccttttaaaatgtagttatggtagagattgagacaggtaaggagaagggacaggtaaggatctgagcttagagacacctatgcactcatgccagtcatggcaacaggtaaagcagcgtaacttggactgccatttcttgatcacatatcatcaagccaagtactgtgatgagagcttcacataaaatgcatctagtcttccagtgccagcgcctttacggaaaactctgtcttacccctaatttaatggaagttagagaaaatctttttgggtttgaaggtccattttacaaattttattacagatgcagaaattgtgcctcagatgggctcagtgcttctcagagtcttatagataaccaaaacaaagccagggtag

SEQ ID NO: 587382 - DNA, 4001 bp, Homo sapiens; identical to SEQ ID NO: 587380

SEQ ID NO: 587383 - DNA, 4001 bp, Homo sapiens; identical to SEQ ID NO: 587381

SEQ ID NO: 587384 - DNA, 4001 bp, Homo sapiens
tatatacttgtgtattatactagtatatacactatactatatactagagtattatactagtatgtatactatgctatatactagagtattatactagtatgtatactatgctatatactagagtattatactagtatatatactatattacatactagtatataatactactagtaataatatactagtataatatagtatctggccaggtgcagtgtctcacacctataatcccagcactttgggaggctgaggagggtggatcacgaggtcaggagttcgagaccaggctgaccaacacggtgaaaccccgtctctactaaaaatacaaaaaattagccaggcaaggtggcacatgcctgtaatcccagctactcaggaggctgaggcaggagaatcgcatgaaccccggtggcagaggttgcagtgagctgagattgtgaaactgcactccagcccggggaacagagtgagactctatctcaaaaaaaaaaaaaaatatgtatatatatatatataaaatatatactagtacaatactatatagtatataatactagtacaataccatactgtaacatcagtaaataattatagtatatactatgctatactataatactaaactaaaccaaaaagattttctctaatactattgtattatagtattatactctagtatatctaataggtaattattagattatctaataattatataacaagcattatgtaattatagataagtatctgtaattacataataattatagtaactaattatacttttataattatagtattatctaacagataattttatagaatataacatcttttttttgacttattatataataagtatgagtgatctgaaaaagatacctctggccagtttcgaacgtgcatatcaaaaccagtggcctgaatacggcataggtcactgtgggtcctagatcctcatgttttgacacagaatctactctcacaggcttgtcacaaaacagaccagagctatgagcagctgatgtgaaaagttgagcatcatacctgggatcgtatatcactggtatctggcacaaattgggagttactgtgggctctgagaatccctttcttcagctctctggaggctcacatgagcctggtcttaagccttaattttgaagaggatacaattggagccactggagattcccaggagcaggagaaaatgaagagagttttgatatgggaagggtgtctttaatgcctcttactgtggcaagacagttgggctcctaccctggctttgttttggttatctataagactctgagaagcactgagcccatctgaggcacaatttctgcatctgtaataaaatttgtaaaatggaccttcaaacccaaaaagattttctctaacttccattaaattaggggtaagacagagttttccgtaaaggcgctggcactggaagactagatgcattttatgtgaagctctcatcacagtacttggcttgatgatatgtgatcaagaaatggcagtccaagttacgctgctttacctgttgccatgactggcatgagtgcataggtgtctctaagctcagatccttacctgtcccttctccttacctgtctcaatctctaccataactacattttaaaaggttcatagactgctatccttgtttttaattttttctcaatttttgtttttgttagtgagcatgagatgggatgccaaaaggcatctttcctggccttcttttattctttcaaacctgtgacagcccctcctagataacaatgtaaaatgcaaaggaattacagaagaggcgttgggggatatcacctcttgtagtagatgggttgatcacgcccaggcattcactgaaggggaccctgtctgtgggacaccacctccgatcaccttccctgtaaagatgcccattttacctggggtcagaaagaagagcacggcaaagagaaagaggaaagtcctcatgactgggtgggtcttgagagatcagcaccgtgtccatgaggaaagagccgcaaacacccacatttatacatttctccagaccaagtaacatcttgatcagtgaggcttagcagaaacgagaggatttccatgctctgctgcacagagcccacccaacctcagtgggtgtcactcagtctacagctcatcatatttctgattctggaaagttttgaagaaggaaagtggggatgaagggaggacagagtagggcagacacagaaaaaataaaaaaatctggagtccagtagtttcgtttctaatcctggctgtgttcctgaacagctttggtttactcatatgtaaaatgggagtaattatacaatatctcaatgcttcagttaagagctgaggaaccgtagtgaggtggaatctgaattccagattcagtctttttgagctttgtaaacttggcaaagggcttgacctaagcatatatttgttaaaaaatgtgaatcttgctgtatgctgcacgcttttcgtgcttggtcctgccatgctgctcacctgtaccatggcactgttggcgcagcaaggggctggtaaccatcatgccttgccctagacacctgggctcaagcaatctacctgccttaggctcccaaaagctacgataatagacataagccacccatctgggccaatattcatgtccttaatgaatttaaaatatgcagtaattatggctttggtgcgtgaggtgatatcttacaggaaaggggactcagagctaacttgacaaaatgattgctacccctccttttctccctgtgatacttgtagagaataaaaatgaaagctagaaaagtgagagtccacatttattgagttcttacatggtaccaggcctccttccaagcattccacatattcaaaacacttttgcattataatcatactagattcttacaacacctttagaggcaggcagaatttgcaagtgggttcttattttctcccagaaaacagaagctggaagagatgaaaggggtcactatcttctggcccctgcattagtatggtggaaactcacatggcccctgctctttcaacctctagcctggtgttctttccactacaccagttagactccccaaaataaaaggctttctggatgccaagggttattatccatgatatcatccctttatcctgggaaatggagcatataattgtgttttattgattcacttcacggatcaagagcatctccccattacttttaaataaaaatgagcctctcatttgggtcttctcaaggaaatcccaatctctattccgaagagtcttccctaaaagatggccctgatcaggaagacattttattttctatttgctatgttcttcattttggttcaactgccatcaggtaagtaaaaatggatgggattttgattgggcagattataaagcctgttgattcttccatgtttgaccttaatggtcaagctctcatggcacctgtcatgggaatttcttagacctacagtgacatttactaagagcaaacagcatatagtgtatttttttttttttgtaatttgtttttgctggttacctggaatgctggccttgagaaacagaataaagattgcaactctgtgatctactgtctcctgttatgctatgtcacatgtgaagttgggagtgttttatacagtgttaattcctgtgttgattttaattttcaaaatgtattttgttttgaatttagggtgccaggcaggacttgatttttcccaaccatttccatcaggtaagttaaatctcttgtatataattattttttctcttaggagctctggcgctgttaggtctctctgatgtctggaggcaaagaggggacagagatagtggcagaaatagaattgtctgaaaaatcagttcactaacttatctccttctctttctcttgttccaagtataatatttggatatttttgatttcacagaaaaatatctttgtg

SEQ ID NO: 587385 - DNA, 4001 bp, Homo sapiens
actatatacttgtgtattatactagtatatacactatactatatactagagtattatactagtatgtatactatgctatatactagagtattatactagtatgtatactatactatatactagagtattatactagtatatatactatattacatactagtatataatactactagtaataatatactagtataatatagtatctggccaggtgcagtgtctcacacctataatcccagcactttgggaggctgaggagggtggatcacgaggtcaggagttcgagaccaggctgaccaacacggtgaaaccccgtctctactaaaaatacaaaaaattagccaggcaaggtggcacatgcctgtaatcccagctactcaggaggctgaggcaggagaatcgcatgaaccccggtggcagaggttgcagtgagctgagattgtgaaactgcactccagcccggggaacagagtgagactctatctcaaaaaaaaaaaaaaaatatgtatatatatatatataatatatactagtacaatactatatagtatataatactagtacaataccatactgtaacatcagtaaataattatagtatatactatgctatactataatactatactaaaccaaaaagattttctctaatactattgtattatagtattatactctagtatatctaataggtaattattagattatctaataattatataacaagcattatgtaattatagataagtatctgtaattacataataattatagtaactaattatacttttataattatagtattatctaacagataattttatagtatataacatcttttttttgacttattatataataagtatgagtgatctgaaaaagatacctctggccagtttcgaacgtgcatatcaaaaccagtggcctgaatacggcataggtcactgtgggtcctagatcctcatgttttgacacagaatctactctcacaggcttgtcacaaaacagaccagagctatgagcagctgatgtgaaaagttgagcatcatacctgggatcgtatatcactggtatctggcagaaattgggagttactgtgggctctgagaatccctttcttcagctctctggaggctcacatgagcctggtcttaagccttaattttgaagaggatacaattggagccactggagattcccaggagcaggagaaaatgaagagagttttgatatgggaagggtgtctttaatgcctcttactgtggcaagacagttgggctcctaccctggctttgttttggttatctataagactctgagaagcactgagcccatctgaggcacaatttctgcatctgtaataaaatttgtaaaatggaccttcaaacccaaaaagattttctctaacttccattaaattaggggtaagacagagttttccgtaaaggcgctggcactggaagactagatgcattttatgtgaagctctcatcacagtacttggcttgatgatatgtgatcaagaaatggcagtccaagttacgctgctttacctgttgccatgactggcatgagtgcataggtgtctctaagctcagatccttacctgtcccttctccttacctgtctcaatctctaccataactacattttaaaaggttcatagactgctatccttgtttttaattttttctcaatttttgtttttgttagtgagcatgagatgggatgccaaaaggcatctttcctggccttcttttattctttcaaacctgtgacagcccctcctagataacaatgtaaaatgcaaaggaattacagaagaggcgttggggaatatcacctcttgtagtagatgggttgatcacgcccaggcattcactgaaggggaccctgtctgtgggacaccacctccgatcaccttccctgtaaagatgcccattttacctggggtcagaaagaagagcacggcaaagagaaagaggaaagtcctcatgactgggtgggtcttgagagatcagcaccgtgtccatgaggaaagagccgcaaacacccacatttatacatttctccagaccaagtaacatcttgatcagtgaggcttagcagaaacgagaggatttccatgctctgctgcacagagcccacccaacctcagtgggtgtcactcagtctacagctcatcatatttctgattctggaaagttttgaagaaggaaagtggggatgaagggaggacagagtagggcagacacagaaaaaataaaaaaatctggagtccagtagtttggtttctaatcctggctgtgttcctgaacagctttggtttactcatatgtaaaatgggagtaattatacaatatctcaatgcttcagttaagagctgaggaaccgtagtgaggtggaatctgaattccagattcagtctttttgagctttgtaaacttggcaaagggcttgacctaagcatatatttgttaaaaaatgtgaatcttgctgtatgctgcacgcttttcgtgcttggtcctgccatgctgctcacctgtaccatggcactgttggcgcagcaaggagctggtaaccatcatgccttgccctagacacctgggctcaagcaatctacctgccttaggctcccaaaagctacgataatagacataagccacccatctgggccaatattcatgtccttaatgaatttaaaatatgcagtaattatggctttggtgcgtgaggtgatatcttacaggaaaggggactcagagctaacttgacaaaatgattgctacccctccttttctccctgtgatacttgtagagaataaaaatgaaagctagaaaagtgagagtccacatttattgagttcttacatggtaccaggcctccttccaagcattccacatattcaaaacacttttgcattataatcatactagattcttacaacacctttagaggcaggcagaatttgcaagtgggttcttattttctcccagaaaacagaagctggaagagatgaaaggggtcactatcttctggcccctgcattagtatggtggaaactcacatggcccctgctctttcaacctctagcctggtgttctttccactacaccagttagactccccaaaataaaaggctttctggatgccaagggttattatccatgatatcatccctttatcctgggaaatggagcatataattgtgttttattgattcacttcacggatcaagagcatctccccattacttttaaataaaaatgagcctctcatttgggtcttctcaaggaaatcccaatctctattccgaagagtcttccctaaaagatggccctgatcaggaagacattttattttctatttgctatgttcttcattttggttcaactgccatcaggtaagtaaaaatggatgggattttgattgggcagattataaagcctgttgattcttccatgtttgaccttaatggtcaagctctcatggcacctgtcatgggaatttcttagacctacagtgacatttactaagagcaaacagcatatagtgtatttttttttttttgtaatttgtttttgctggttacctggaatgctggccttgagaaacagaataaagattgcaactctgtgatctactgtctcctgttatgctatgtcacatgtgaagttgggagtgttttatacagtgttaattcctgtgttgattttaattttcaaaatgtattttgttttgaatttagggtgccaggcaggacttgatttttcccaaccatttccatcaggtaagttaaatctcttgtatataattattttttctcttaggagctctggcgctgttagctctctctgatgtctggaggcaaagaggggacagagatagtggcagaaatagaattgtctgaaaaatcagttcactaacttatctccttctctttctcttgttccaagtataatatttggatatttttgatttcacagaaaaatatctttgt

SEQ ID NO: 587386 - DNA, 4001 bp, Homo sapiens; identical to SEQ ID NO: 587384

SEQ ID NO: 587387 - DNA, 4001 bp, Homo sapiens; identical to SEQ ID NO: 587385

SEQ ID NO: 587388 - DNA, 4001 bp, Homo sapiens
ctaactctgagattctatgtgattatggtgatggtggtggttctaatttgtgcccaaactatgcttattattgtaattcaaatacatctgagatgagttttgtggacagggagctattaggcatccacatctatagactgatctgaataaattggagtactgattaaagtggatggagaagacaattttaaatgagtttatctattctggagcattgtctgacatctgcaaaaagatgctgagggcagaaaatcgggaactgattttacaactgagactttcatggagtcactgaaactttcatggggacattgttccctggctctgttctttagttctagtcttgcctatttccaaatgtgcaaaacaaatactacttcccaggaagcctttctgcatttcctagttagaaccaagtttccacatctatgacttctctttataatttgcatcttttatggcacttgtgaaaactgtttcatattaaagttatttgtgaattttcctgtctcattgatatacttacttatacatgttaaatgtattgaaagcttatttaccactacaagcaacctattttcgaacaacatagaaggaatagactaataacttcaagcaaattaaggtcaatgtccatgctttatatttttacctcttcgttttacctacctttatcatagtggacagaacaatttcttacaagtggttagcacacattcaatatctattggttttctaggactactgaggacagaatgtgtaataaaggaatgtagaaattcaggagccatgaaggaacagacagggggcttcatgatgcatggagaacctctaataggaaaagcttcacaacagaaggaacgaaggatagttgaggaggtatggacataaacatttcttaggaacagagtcgtggttgtatgaagcaaagagaatctcaaagacgcaaagacttaagagaatagtaagcaagatgttagtttagtggttttaatggcataatttccaaccagtgtgtgaaagccaaaaagtctaaaataatgtatggataagagatttggaccgacgactcagacatgaaaaaaaattagctgtctaagaatctagtaacataactttagtttaatttagactacaaaggctgtacttccctaacttaacaaatatgtttggcatttccttggataatcttttctttcttttttttttttttttttcattttaaagaaatcactttagaatatgctggccaggcgcggtggctcatgcctgtaatcccagggctctgggaggccgaggagggcggatcacgaagtcaggacatcaagaccatcctggctaacacggtgaaaccccgtctctactaaaaatacaaaaaaattagccaggcgtggtggcgggtgcgtgtagtcccagctactcgggaggctgaggcaggagaatggcatgaacctgggaggcagagcttgcagtgagccaagatcgcaccactgcactccagcctgggcgacagcgcgagactccgtctcaaaaaaaaaaaaaaaaaaaaaaaaaaagaatatgctgaacctgcgttgcagattacaaaggaggaaagagatctaaaagtacaaagatgtctgaattccttggcagagctgttagggaagttgactagaaactattatggatggagatggtcccggtcaatgtggtcccattgttttgtgtcggagctcaggaaaagattttcagtgactggtttgccttggaaccttcaactttgtaaaagttgagctttcatctcaaaagacagatcctgagcagactgtcatctctacttctagaagaatttccctcttaccttggaaaatttgagcaagaagaatgagagcagccaaaataaagacaaatattttcatggctccaggcatcagtggagagctgatgaaggaagtgcagtagctggaatcaagctcttttatcaaggggcattgattaaaatatgttctactgccctgaagggactggaagtcatcctcggtttgtaatgttcattgggaacatactattttccatgctccactgactaatgtgtgggctgatggatcagattttaactaaaccacatttgtgggagacaaacgcagagaaccctgcctttctgcctggaatattctattctgtgtctctgcttagacttctctcatttttccttcaagtcttatctcaagtattaccatgtctataagatatatagccaccacgcttttcctagtacatgattttacataaaacctattcttaaaataataattaaaacaaacacacaaaaacctttaattttaaattcaggagtacgtgtgcaggttttttttttttttttttttttttgacagggtctcgctgtattgcatggagtgctgttgcttaaggagaaaagggttaatccattgaaaatacataaaaaccattaacatgtttttatattatttgatttaattaaagggagaaatagacacttctatattcatagtagaaaatttttacaccactctctcagcaactgatagaacacagggaaaaattagcaaagtcatgcatgatctgaacaataccaccattccactgactgcattgatatttatagaacacatcataagacaactgcaaaatacacatttttttcaagtacatatgatacattcataaaaatgaaccatatgctaggccataaaacaaatattgatgtgtttaagcacatttaaatacttcagagtgtatttctcaccacaaggggattaaattggcaatctataaaataagctatttaggatattttcaaatatgtggagataaagcaacatcattctagattgtgtttgtatcaaagaataaataatgagaataattggaaagcatttctgtatatcgaattttgtggagcacaacaaaacaatgacttcgaaagaaatttgtatccaaatacttattgtagaaaagaagaaatgtttaaatctatgacttaaaattatgctctaagaaccttagaaaagggaacaatgtaagcccaagtatgcagaataagtgaaaaagaagttatcactacagatccaagaaacattaaactaatataaaaatgttgtcaacaggtatatgccaaaacatttcacaacttacataaaataaaagaattctctcaaaaatttaacttaccaaaattggcacaagaattagcagaaaatataagtatttctgtatgtcttaaagaaagtaagtgtgttattaaatgaagaatggcttctgcttaagatgtagaaatacgtaaagaaaatcatcccacatgaaacaagtacacagcaaaacacacggcagactgcaaatattcagtttcttgaactcattggaaagctaaggtcacaaatcagccacctacctagaaatataagaaaagacaggaacctccaaaaaataaagaccatgagtgcttgcttacctgaagcagattacccccagaatatgatttaaaagatttcaggtaaagtctgtagagaattgctaagagcaagcataaactagagaaacaatataaatgtctggggtcacagacaaaagagaagttcacagcaacttctaatgtcttctccatagactcagcaggtgcttacaaaaaagattagagtatttcatgatgtaagtcggctgaggggaacagtagccactgtgagaaagaacgaaagcttgcaagaatctttctcttttatggaaaagaaagtcttaatttcttaattaagaaactgagggaagaacaacagttgtttgtacggcactggtgaatgaacaatctaaaaaaatgcaaaacaaaatattaaagctaggagaacgaggagaagggagcacattaaaaaagaaaaataaagaacatcctctacctttgtcaacagagaaggcatacatgcctcctgcctgtagaaagatgacagaataactgcagcaaacttctcatcaaaaaatatgcaagc

SEQ ID NO: 587389 - DNA, 4001 bp, Homo sapiens
cacttctaactctgagattctatgtgattatggtgatggtggtggttctaatttgtgcccaaactatgcttattattgtaattcaaatacatctgagatgagttttgtggacagggagctattaggcatccacatctatagactgatctgaataaattggagtactgattaaagtggatggagaagacaattttaaatgagtttatctattctggagcattgtctgacatctgcaaaaagatgctgagggcagaaaatcgggaactgattttacaactgacactttcatggagtcactgaaactttcatggggacattgttccctggctctgttctttagttctagtcttgcctatttccaaatgtgcaaaacaaatactacttcccaggaagcctttctgcatttcctagttagaaccaagtttccacatctatgacttctctttataatttgcatcttttatggcacttgtgaaaactgtttcatattaaagttatttgtgaattttcctgtctcattgatacttacttatacatgttaaatgtattgaaagcttatttaccactacaagcaacctattttcgaacaacacagaaggaatagactaataacttcaagcaaattaaggtcaatgtccatgctttatatttttacctcttcgttttacctacctttatcatagtggacagaacaatttcttacaagtggttagcacacattcaatatctattggttttctaggactactgaggacagaatgtgtaataaaggaatgtagaaattcaggagccatgaaggaacagacagggggcttcatgatgcatggagaacctctaataggaaaagcttcacaacagaaggaacgaaggatagttgaggaggtatggacataaacatttcttaggaacagagtcgtggttgtatgaagcaaagagaatctcaaagacgcaaagacttaagagaatagtaagcaagatgttagtttagtggttttaatggcataatttccaaccagtgtgtgaaagccaaaaagtctaaaataatgtatggataagagatttggaccgacgactcagacatgaaaaaaaattagctgtctaagaatctagtaacataactttagtttaatttagactacaaaggctgtacttccctaacttaacaaatatgtttggcatttccttggataatcttttctttctttttttttttttttttcattttaaagaaatcactttagaatatgctggccaggcgcggtggctcatgcctgtaatcccagggctctgggaggccgaggagggcggatcacgaagtcaggacatcaagaccatcctggctaacacagtgaaaccccgtctctactaaaaatacaaaaaaattacccaggcgtggtggcgggtgcgtgtagtcccagctactcgggaggctgaggcaggagaatggcatgaacctgggaggcagagcttgcagtgagccgagatcgcaccactgcactccagcctgggcgacagcgcgagactccgtctcaaaaaaaaaaaaaaaaaaaaaaaagaatatgctgaacctgcgttgcagattacaaaggaggaaagagatctaaaagtacaaagatgtctgaattccttggcagagctgttagggaagttgactagaaactattatggatggagatggtcccggtcaatgtggtcccattgttttgtgtcggagctcaggaaaagattttcagtgactggtttgccttggaaccttcaactttgtaaaagttgagctttcatctcaaaagacagatcctgagcagactgtcatctctacttctagaagaatttccctcttaccttggaaaatttgagcaagaagaatgagagcagccaaaataaagacaaatattttcatggctccaggcatcagtggagagctgatgaaggaagtgcagtagctggaatcaagctcttttatcaaggggcattgattaaaatatgttctactgccctgaagggactggaagtcatcctcggtttgtaatgttcattgggaacatactattttccatgctccactgattaatgtgtgggctgatggatcagattttaactaaaccacatttgtgggagacaaacgcagagaaccctgcctttctgcctggaatattctattctgtgtctctgcttagacttctctcatttttccttcaagtcttatctcaagtattaccatgtctataagatatatagccaccacgcttttcctagtacatgattttacataaaacctattcttaaaataataattaaaacaaacacacaaaaacctttaattttaaattcaggagtacgtgtgcaggttttttttttttttttttttgacagggtctcgctgtattgcatggagtgctgttgcttaaggagaaaagggttaatccattgaaaatacataaaaaccattaacatgtttttatattatttgatttaattaaagggagaaatagacacttctatattcatagtagaaaatttttacaccactctctcagcaactgatagaacacagggaaaaattagcaaagtcatgcatgatctgaacaataccaccattccactgactgcattgatatttatagaacacatcataagacaactgcaaaatacacatttttttcaagtacatatgatacattcataaaaatgaaccatatgctaggccataaaacaaatattgatgtgtttaagcacatttaaatacttcagagtgtatttctcaccacaaggggattaaattggcaatctataaaataagctatttaggatattttcaaatatgtggagataaagcaacatcattctagattgtgtttgtatcaaagaataaataatgagaataattggaaagcatttctgtatatcgaattttgtggagcacaacaaaacaatgacttcgaaagaaatttgtatccaaatacttattgtagaaaagaagaaatgtttaaatctatgacttaaaattatgctctaagaaccttagaaaagggaacaatgtaagcccaagtatgcagaataagtgaaaaagaagttatcactacagatccaagaaacattaaactaatataaaaatgttgtcaacaggtatatgccaaaacatttcacaacttacataaaataaaagaattctctcaaaaatttaacttaccaaaattggcacaagaattagcagaaaatataagtatttctgtatgtcttaaagaaagtaagtgtgttattaaatgaagaatggcttctgcttaagatgtagaaatacgtaaagaaaatcatcccacatgaaacaagtacacagcaaaacacacggcagactgcaaatattcagtttctttaactcattggaaagctaaggtcacaaatcagccacctacctagaaatataagaaaagacaggaacctccaaaaaataaagaccatgagtgcttgcttacctgaagcagattacccccagaatatgatttaaaagatttcaggtaaagtctgtagagaattgctaagagcaagcataaactagagaaacaatataaatgtctggggtcacagacaaaagagaagttcacagcaacttctaatgtcttctccatagactcagcaggtgcttacaaaaaagattagagtatttcatgatgtaagtcggctgaggggaacagtagccactgtgagaaagaacaaaagcttgcaagaatctttctcttttatggaaaagaaagtcttaatttcttaattaagaaactgagggaagaacaacagttgtttgtacggcactggtgaatgaacaatctaaaaaaatgcaaaacaaaatattaaagctaggagaacgaggagaagggagcacattaaaaaagaaaaacaaagaacatcctctacctttgtcaacagagaaggcatacatgcctcctgcctgtagaaagatgacagaataactgcagcaaacttctcatcaaaaaatatgcaagccagga

SEQ ID NO: 587390 - DNA, 4001 bp, Homo sapiens; identical to SEQ ID NO: 587388

SEQ ID NO: 587391 - DNA, 4001 bp, Homo sapiens; identical to SEQ ID NO: 587389

SEQ ID NO: 587392 - DNA, 4001 bp, Homo sapiens
taactcatgacgaattaaatatttaaatgtaagacctcaaactataagactcctagaagaaaatctaagaaacaccattgtagatattggccttggggaataatttatgactaagtactcaaaagcaattgcaacaaaaacaaaagttgacaagtagagccgaattaaactaaagagcttctgcagagaaaaagaaactattaacagggtaaacagaaaacaacagaatgggagaaaatatctgctaactatgcatctgacaaaaatttaatatccggaatctacagggaatttaaatcaacaagcaaaaaataaataaagtggggaaaagacatgaaaaacatgaacagactcttctcaaaaaaagataatagaagcagccagcaaacatgaaaagtagctcaacaccactaatcactagagcaatgcaaatcaaaaccacaatgagaactatcttacaccagtgagaatggctattattaaaaagttaaaaaaataacagaaacgcagatgaggctgtggagaaaaggagtgcttatacactgttggtgggaatgtaacagtctgaagatttctcaaagaacttaaaacagagctaccattccacccagcaattcctactgggtatatcgtccaaaagaaaacaaataattctacccaaaacatacctgcactcctatgttcatcccagaactactcacaatagtaaagacaaagaatcaacccaggtgctcatcaatggtggactggataaagaaaatgtggtacatatagaccatggaatactatgaagccataaaaaggaacaaaatcatatactttgtagcaacatggatgagctggaggactgcaaattaatgcagaaatagaaaaccaaatactgcatgttctcacttgtaagtgggagctaaacactggatactcatggacataaagatgggacatgggagactactagagtggggagggaggaaaacaaggattaaaaaactatttggtactatgctcactacatgagtgatgggattaccatcatgccccaaacctcacatcacaaaatataccaacataacaaacatgcacatgtaccccctgaatctacaatataagttgaaattatttaaaaaataatctcagagataaagggaggaagagatctttgctcattgaccacacactttattttgggggctatgaacatcccactattaacagtggagataataattttatcatatcttatcaggatctggatgaaacaccctgaagatgtttgattctatattcccttttcagtttgattctacatttcgatatttaaacttctgaatcgtggaccctaaggatgcaactatgagtcttgaagggttttctgtactatttgtcttatgcttaaaattttgccattaaagcttcatgccactgtttattcttttcccaattcccttgttcccaaatttctattggtcttttataatttgatgcaaaattttcttgttgaactctgtcttatttgcctaactgctacccttcacaaatattcctcaccaatagactcaacatcacttccatccactaccgagttggaatcaagaactatcatcttcactctcctttttggagagtgaagccttgatgatagctgtttgctttatttactaacctttaaatcacatatcagagcttctatacccctaactctatttcggccccattttctaattatcgagctcttgaacccccattttctgttgaaagaactccttgtcctgcttctcaattgtggcctcattagtaccaaagaagagaaacatggtggatttctgaattcctaaggctgtgaattggggtctgagttcggatggccacagcataattatctcagtagacctcttccggtctaggcgtcccaatagacttctacaatcattcaccatcttaccttttggtattaaagtcacaaagaggaggagaacagaaataagggaatggagtttcatggttgagtgcccaatagagaggtgagtgatcagggctggtggaacacaggggttttatttaattctgggggcctgaggttcctcttgctcagtgaagcttaacagaaaggacataaaacagcttccgttggaatacttccaaactcgaaggtctctaaattttgtgacaaattaacctaattgtaggaaaccagatggctaaccctttccttttcctatggctctcaatttcaccagaggtgaattaatacctgtagttaattttcttttttgaatggggctaagaagtaaagccatgtgggtacagaacatccttactgcaaaagtcctagggcttgtaaggaaacatttccataatacactgtttttttttgttttgttttgttttgtttttgtttttgttgttgttgtttttttgcaagagggacaagagtattctctaaggtccatttatgaaaagctatgtttttcttatttttttttttttaactaagttagtccttaaaagaaaggctgtcacttgtgtgaggtgttcttttttttttttttgagacggagtctcgctctgtcgcccaggttgcaggctggagtgccgtggcgcgatctcggctcactcaagctccacctcccaggttcacgccattctcctacctcagcctccccagtagctggaactacaggcgcccaccaccacgcccggctaattttttgtatttttagtagagacggggtttcaccgtgttagccaggatggtctccatctcctgacctcgtgatccgcccacctcggcctcccaaagtgctgggattacaaggcgtgagccgctgcgcccggccctgaggtgttcttaatcacatccgaaaggtggatacatttaattcacattgaaaacaaatattttttcatcgttattgatcctttgtataattatctcatacaacaagacaagtaagatcaggagagttgaaagataaaagacagagtaaagtgcgcagctcctctcaaaagactctgagcctacagcttaaagagattcccctaacctttcaccctaacccaccacatagcaacaaaatattgaaagcttaagagcatgctttaatcaagaatcaattgaccaacatccaacttacccaaaacaaatttaccttctgttcaattccttattggcatatttccttgaattgatatttttttaaatttgtaaactttcatatatggtgtcagtcttttctgaaaaattatatatgcatatatatataacttttatatagcttttatttgactacttttgatcattttcatgttagttgatgtatttatgagcatttgctaatttatttcctcattaataatttatgccttaataattttaggtttgaataaatgttccaaaagactaatattcaaaagattttttgaaaagtagaacaaagccagacaatttagactaccttgtttcaagacaaagctacaataacgaagacactgtgatactgaaataagaagagacatatagttcaacagaacataatagagagtcaaggatacgaccatcatatgaatggtctgcatatgggtaagaccatatatatttatccatgcttaatgattttgacaaaggtgctaagtaaagtcctttttttttttatgccctcattcttgtatatgtaactcattcaagtgtttcgtgtgcaggtttgttacatggataaattgtgtgtcctgggggtttagtatacagataattttcccaggtattcagcgtattactcaacaggtagattttcaatcctcaccctcctcccaccctccaccccaggtaggccttagtgtctgttgttcccttctttgtgtccatctgtattcagtgtttagcttccactttttttgtttgtttgtttgagacacagtcttgctctgttgcccaggctggagggcagtggcatgatctctgctcactgcaacctccacctccggggtccaagcgattctcctgc

SEQ ID NO: 587393 - DNA, 4001 bp, Homo sapiens
ttaactcatgacgaattaaatatttaaatgtaagacctcaaactataagactcctagaagaaaatctaagaaacaccattgtagatattggccttggggaataatttatgactaagtactcaaaagcaattgcaacaaaaacaaaagttgacaagtagagccgaattaaactaaagagcttctgcagagaaaaagaaactattaacagggtaaacagaaaacaacagaatgggagaaaatatctgctaactatgcatctgacaaaaatttaatatccggaatctacagggaatttaaatcaacaagcaaaaaataaataaagtggggaaaagacatgaaaaacatgaacagactcttctcaaaaaaagataatagaagcagccagcaaacatgaaaagtagctcaacaccactaatcactagagcaatgcaaatcaaaaccacaatgagaactatcttacaccagtgagaatggctattattaaaaagttaaaaaataacagaaacgcagatgaggctgtggagaaaaggagtgcttatacactgttggtgggaatgtaacagtctgaagatttctcaaagaacttaaaacagagctaccattccacccagcaattcctactgggtatatcgtccaaaagaaaacaaataattctacccaaaacatacctgcactcctatgttcatcccagaactactcacaatagtaaagacaaagaatcaacccaggtgctcatcaatggtggactggataaagaaaatgtggtacatatagaccatggaatactatgaagccataaaaaggaacaaaatcatatactttgtagcaacatggatgagctggaggactgcaaattaatgcagaaatagaaaaccaaatactgcatgttctcacttgtaagtgggagctaaacactggatactcatggacataaagatgggacatgggagactactagagtggggagggaggaaaacaaggattgaaaaactatttggtactatgctcactacatgagtgatgggattaccatcatgccccaaacctcacatcacaaaatataccaacataacaaacgtgcacatgtaccccctgaatctacaatataagttgaaattatttaaaaaataatctcagagataaagggaggaagagatctttgctcattgaccacacactttattttgggggctatgaacatcccactattaacagtggagataataattttatcatatcttatcaggatctggatgaaacaccctgaagatgtttgattctatattcccttttcagtttgattctacatttcgatatttaaacttctgaatcgtggaccctaaggatgcaactatgagtcttgaagggttttctgtactatttgtcttatgcttaaaattttgccattaaagcttcatgccactgtttattcttttcccaattcccttgttcccaaatttctattggtcttttataatttgatgcaaaattttcttgttgaactctgtcttatttgcctaactgctacccttcacaaatattcctcaccaatagactcaacatcacttccatccactaccgagttggaatcaagaactatcatcttcactctcctttttggagagtgaagccttgatgatagctgtttgctttatttactaacctttaaatcacatatcagagcttctatacccctaactctatttcggccccattttctaattatcgagctcttgaacccccattttctgttgaaagaactccttgtcctgcttctcaattgtggcctcattagtaccaaagaagagaaacatggtggatttctgaattcctaaggctgtgaattggggtctgagttcggatggccacagcataattatctcagtagacctcttccggtctaggcgtcccaatagacttctacaatcattcaccatcttaccttttggtattaaagtcacaaagaggaggagaacagaaataagggaatggagtttcatggttgagtgcccaatagagaggtgagtgatcagggctggtggaacacaggggttttatttaattctgggggcctgaggttcctcttgctcagtgaagcttaacagaaaggacataaaacagcttccgttggaatacttccaaactcgaaggtctctaaattttgtgacaaattaacctaattataggaaaccagatggctaaccctttccttttcctatggctctcaatttcaccagaggttaattaatacctgtagttaattttcttttttgaatggggctaagaagtaaagccatgtgggtacagaacatccttactgcaaaagtcctagggcttgtaaggaaacatttccataatacactgtttttttttgttttgttttgtttttgtttttgttgtagttgtttttttgcaagagggacaagagtattgtctaaggtgcatttatgaaaagctatgtttttcttatttattattatttttttaactaagttagtccttaaaagaaaggctgtcacttgtgtgaggtgttctttttttttttttttgagacggagtctcgctctgtcgcccaggttgcaggctggagtgccgtggcgcgatctcggctcactcaagctccgcctcccaggttcacgccattctcctacctcagcctccccagtagctggaactacaggcgcccaccaccacgcccggctaattttttgtgtttttagtagagacggggtttcaccatgttagccaggatggtctccatctcctgacctcgtgatccgcccacctcggcctcccaaagtgctgggattacaaggcgtgagccgctgcgcccggccctgaggtgttcttaatcacatccgaaaggtggatacatttaattcacattgaaaacaaatattttttcatcgttattgatcctttgtataattatctcatacaacaagacaagcaagatcaggagagttgaaagataaaagacagagtaaagtgcgcagctcctctcaaaagactctgagcctacagcttaaagagattcccctaacctttcaccctaacccaccacatagcaacaaaatattgaaagcttaagagcatgctttaatcaagaatcaattgaccaacatccaacttacccaaaacaaatttaccttctgttcaattccttattggcatatttccttgaattgatatttttttaaatttgtaaactttcatatatggtgtcagtcttttctgaaaaattatatatgcatatatatataacttttatatagcttttatttgactacttttgatcattttcatgttagttgatgtatttatgagcatttgctaatttatttcctcattaataatttatgccttaataattttaggtttgaataaatgttccaaaagactaatattcaaaagattttttgaaaagtagaacaaagccagagaatttagactaccttgtttcaagacaaagctacaataacgaagacactgtgatactgaaataagaagagacatatagttcaacagaacataatagagagtcaaggatacgaccatcatatgaatggtctgcatatgggtaagaccatatatatttatccatgcttaatgattttgacaaaggtgctaagtaaagtcctttttttttttatgccctcattcttgtatatgtaactcattcaagtgtttcgtgtgcaggtttgttacacggataaattgtgtgtcctgggggtttagtatacagataattttcccaggtattcagcgtattactcaacaggtagattttcaatcctcaccctcctcccaccctccaccccaggtaggccttagtgtctgttgttcccttctttgtgtccatgtgtattcagtgtttagcttccactttttttgtttgtttgtttgagacacagtcttgctctgttgcccaggctggagggcagtggcatgatctctgctcactgcaacctccacctccggggtccaagcgattctcctgc

SEQ ID NO: 587394 - DNA, 4001 bp, Homo sapiens
aaaattaattagtggtaggggctgaattgtgtcaccccaaaattcatatgctgaaaccctcacccctgatgtgactgtctttagagatagggccttcaggaagtaatataagttaaatgaggtcatgatggtggaaccctaatccaataagattgataggctaatccaataggattgatggtcttattagtgaaggtcacggcaaaaagatggccatctacaagcttgaaagcaagctctcatcagaaattgaatcagctagcaccttgatcttggatttctcatcttctggaactatgagaaaataaagtttgtctaagccacagtgtgcggaattttgttatcgcagcccaagctgactaaaacaagtaataatttggaagtttccctgaatttgtcaatgaatataacccaaacaatcaagctagctattcacatagtcattcattcattattttttaaataattacttactcattattattcataaaccaatttttataaatcctgtgaatcaaggactgttggggtacagatttgagtatgatatagaccttaacctcaatgaattttcattctagacaaaaagagaagaaatacaaaatatctctgagagaggaaaaaacatgacaagtgcaatgatgtatttgcaatgtggaacggtcttgtgagtttgaaggaggatgaaatcaattctgaagatttgagaagtcttattgaagctcaaggaatctgtagaaattttgagcaaacacataccctatctgagtcataatgccctggaggataattgtcctacatgaacaagaagggatcagtgttacttagtttgcaagacagaagccctagaggacaatctgtaacacttttgggaagatgaaatataatggtctataaaatgagacaagaactttcaatggaaatgacaagttatgagaatgcaaaaggaattgaagggaatattgtacactatatggggttctttgtctggaggccacaaatccattgccataaaccgtaatggaattggttgcatcagcagctttaagaggccttgatcccatgaattcttaaatttagcctggtgagtcacataatctgaagatgtgattcatttgcctggagaatacttcaggcaaacacttcagtccatctaggcagatgaaccaatctgactggactgattcagtaacactgagtgaaaagaattttccagatgagattgctaaagtcggaaaggatatggtgaagctagagcacagggccactcacactctctgtcatgtctccctggctgctatctcatctgatcaggcatttcttctatcacataaagctcagtgattctcttgaaactagccgttctaaatctgtttcctcatgtaactaatggattcacaaatagtaaattaactgtaggaaactgcagtatattagaaaattaacaaattgtgttgtcactattttctggttttgactattatacttagatacattcttgaattagagacaaaataacagcaggaagacaggatgggcattactaatgaaaatacaatgatagctctcatgagccaggtacttttcatattatgtatggacatattccatacatgatctgatttaatccttgtgagactcttcatttccatatttccatttttcaaatgaagaaactaaggctcattggtgcggatcagttcagccaaaaaaaaaaaggaaactaaggctcagagaagcttagacctttgtccaaagttatatagttaacaagttggacagccagattcaagcccaggtcttgctgacatcaaaactagttgatgcttttttctagcttgaaaattaaagggcccatgggtggtgtatgtttattgggttgtttagtggcattgttcttctatatgaagcacccctaccccccaaaatatgccagttttacctgccagcactggatcccaaaggaaaagaaagacaaacacaacaaggagaggcttcatggctgggaacttctgttaaggaggctagtggcagggtctgacatcggctgtcagggaacagagagaagaggttgagcacacagtcctatacaaacctctcagggctggggtatgcctcgcttcaggtagatatgctacactgaacacccctgaggcagccgtgttggcaatgctcatctgaggaaaaaaaatggacagccctttcttgtttgacagcttttcctattgacaaagacactgttctcccacccaggttttccaaaagtacatggaggcctgagaactatgtgctcttactcttttaaatgagtaaaattaaaatttgataggcttttgttccaataaaaatgtaattgctaattttagaaaattggtaaaatattaaacatgacaaggatggacaagttacagatgaactgctcttctcagagacaaactgtcattctaaagaaagtttcatttatgcctagtttgttgtttaatattttgttttacatagctataaacaatattcttataattaggtatcctgcttttgtaacttgatatatactatatatcagtgtcactataaacttcataaatagtatttttaagtgttgcacaatattttgtcaaggtcatttaaaataattgttactatttaaaaaaacattttttattgaagtataagtgacatacaataaacttcaaacagtaaagtgtacaatcggataagttttgccatatctatacgtttgtgagaccattgtcacattcaaaataatgaacatatccattccccctaacattttttcatgccttctgtaatattcccctcctgattctctttcacctctcagtctaaaggccacaacttttctgctgacactatagattactttgtattttcttggaatttcatgtgaatagaataatatattctatactctttcttgttgggtttcttttactcagcataattatttgagattcgtccttgctataatatgaattagttgttcattccttttcattgctgagcaccactgcatggctatacatctatgtgtttatccagtcacgtattgattgatgtttgattatttccagtttttggctattgaaaataaagctgctatggacattcatgtacaagtcatggtatggatatatgctttcatttttcttttgcaaatattcaggagtagaaaggctgggccacagctgtatgttgtcatcaagagatctcacacgcaatgacattcatagcctcaaaggaaagggatggagaaagatctagcaagcaaatggaaaagaaaaagaacagtggttgctattcttatttcagacaaaacagactaaaagcaacaatgatcaaaaaggacaaagaaaggcattacaaaatgataaagtgttcaattcaaaaagaagacttaacaatcctaaatatatatgcacccaatattggagcactgagatttataaaacaagttcttagagacctatgaagagacttagataaccacacaataataacgaaagacattgacaccccactgacagtgttaagcagatacttgaggcagaaaacaaataaagatattgaggacctaaactcaacacttgaccaaatggacttaacagacatctatggagcattccaccacacaccaacagaatacacattcttgtcatctgtacatggcacatactctaagatcaaccacatgcttggccataaagcaatccttaacaaattaaaaagaacgcatgccagtaacattctcagaccgcaatgcaataaaaatagaaatcaataccaagaagatctctcaaaactatacaagtacatggaaattaaacaatatgctccttaaagacttttgggtaaaggataaaattaaggcagaaatcaagaaattctttgaaactgggccaggtgcagtggctcacacctgtaacgctagcactttggaaggttaaggaaggtggatcacttgagtccaggagtttaaggcc

SEQ ID NO: 587395 - DNA, 4001 bp, Homo sapiens
ttggctctttaaaagaatgaataagtctgcttatttagactgctagctagactaaaaaaagaagatccaaaaaaacacaatcagaaacgagaaagaggatattaccactgaccccaaagaaatgcaaaaaaccctcagagactattaggagcatctgcatgcacacatgctacaaagcctagaagaaactgataaatgcctggaaaagtacaacctcccaaggttgaactggaaagaaattgaatgcctgagcaaaccaataatgagatctgaaatagaatcagtagtaaaaaacctaccaaacagaaaaagcccaaggcaggaacctatcatttctaccttaggttcctaccttggtctcaagtgagccccagctggaagttcatactaaaattgacacaaggggtgcctggtcatatcatgtccaatttcttagcaaccagccagtgagggcgtgggttcatgaaaagcaggtatgggagtataaaggtcataaacagtataaagaattactggctgaggctcccaaagaagccagcaatcactctgagaaaaaaagacctggaaacctcaacctcagagaggacatgctcagtgggatactggcattgcccatgcaaagaaagtgttgaatatgactcaaggagaaataataaagcaatatacttttatctatgttgataaacagctggaagaggctttaacccaagcaaaaataatgttgcttacaaagccaaagttaaaaaaccccaagaccattacagtgccaaattcttttccccagaacggactattactatcattctcccactattgataaggagctcgttcactgactaggtcaccaactaccagcaattcgtgattttacttaaatatcagaacaggacagcctctgagttttgctctaaaaggtaaagaagaatttcagcaactgtcagagatcgtctcttgttatctagacctcccctggctcagcgtctggttcactgtaggtgccacgagttgggagctgacctagttcatagactttagagataaagaggggagatgtgcgcatcatttgaaaacaagtatgtggcttaccagcacaccagctttttcttttcatccatatattcccctaaggccacatggtgctctgggattagaaaatggagaagtacaatatgctccacgctaggactagatggctctttcttctgcctcctgggtttggtatttctttagggtcatcatgctactcttctcatcttcctgatctgtggttgttctgcaactgccatactctcagctgcaattgaaatgtccctgtctgaccctgagccatacagattcaatatgcagcctttccaaatgacaatcctaataaacagaaatgtattctagccaacagtgggagatgcagaaggaagcagcttctgtatcctctgtgaagagatggtcctctttcccattacaaattttacagcacccattcctttttttttcatagcacttgtcacaattgttactatatcaattatttgtgtctctgattagactgtgaaatccgagtagattccatgactgtcttatttatcattttacaccagtattgggctgaaagtctagcaggccatcagtgccaaaggtatatttgttgaataaataaatgaactctagatattaggtttatactttaactttacaatatatagtagttattccttattcatggggctatgttccaagacccccagtagatgcttgaaacagtcgataatactgaactctatatatacagtgctttttttctatacatgcagacctatgataaagttaaatttataaatttggcacagtaagattttaataacaataactaataataaaacaattataacaatatgctatcataacaatactataaaagttatgtgaatgtgaactctgtctcccccaaaatatcttactgtgctatgctcactcttcttcttgtgctgatgtaagatgatataatgcctatgtgatgagaggaagtgaggaaaacgacataggcattgtgacatagcattaggctattgctaatcttctgaccatagctcagaagggggatcatctccttcgggtgatgctgggtcactgagccatggtgatgttagtggctggatctcagaagcatatgatttcaataactaatgggcaggtagtgtttacagtgtggatacactggacaaagggatgattcacattctgggtgtgtggagctgcgtagtgcaagattttgtgttactcagaacagcatgcaatttaaaacttatgaattgtttatttatggaattttgtgtttatttatttatttattttgagatggaggcttgctctgtcacccaggctggagtgcagtggcgtgatcttggctcactgcaacctctgcctcccaggttcaagtgattctcctgcctcagcctcctgagtagctgagattacaggcacctgccaccacacctggctgattttagtatttttagtagagacggggtttcaccatgttggccaggctggtctcgaacccctgccctcaggtgatccacccaccttggtctcccaaagcgctgggattacaggcatgagccactgcacccagcgtatttaatattttggactgtggttgactgtaagtaactagaactgtggctgggtggggaactactgcagatatattcctaacagctggtatttggagcacttttaggcatcaaggattgtagtatgtattttttttaatattgcctcacttaatcttacaaatgatctcttaactagacattttcacaattcacattttcaagatgttgaagcagagatttgagtaattcttctaaaatcacacatctgggactgataagtcttacagagattctagaacccaaattaattaaccactcttctatattgtctcctgggacaaaggggttctgaaatatagcaaaaattctactttgaatctagtctgggccagccaggaagaattagtagatgccagggcctggggagctagaacctatggtaaggaagtgacactgaaaaagctaaagaatctttctttctttctctctctctttctttttctttctttctttctctctctctttctttttctttctctttctttctttctttctttctttctttctttctttctttctttctttctttctttctttctctctctctctctctttcttttctttctttcttttctttcacagacgtcttgggacgcaaagggccaaggcatcagaaacacttggtaccagcttccacagcaacaatgagaggtaaccccagtgcttccactaccaacaggacattaccacttgcaggcagagaaacagacaagaaaaatagtggatgccacatattaggactcgtctgagacatgatgcaagactttttagaaagaatttgaggtgagatgaggctgggctctctgaagtagttcaagagaaatactattttgtggcccttattgggacttacttataacctaaggacctaggatgatgcttgagtagcaggaccaaccaatgtaccaaagaatgggcctcacccaaagagctttacaaattttattaaaaataagaatgagacagaactcagcagttgtacctagattagtgacagaagatcagatgagaatgaagatgttttagtaggttaacataataaacgctctccgagatacctcatcactgcttacctcttttggaacttaaaaataacttggagaagatatgatcaactatgaattgactaagtttcagtttctgtgaccaggcaaaataaggttcctaataggaattcagttaatttatagaaaaagaaaattatacttttgtaaatatgcctagtagactgacatatcccttacatgactaaaaccctattatgccaaaacatctctttattgaatctccccacattcccaacctactttctcttcttgcctctctagt

SEQ ID NO: 587396 - DNA, 4001 bp, Homo sapiens
aatgaattagacgcgatcaaagatactcaagacattttatagctggatgccccttttcagttgctcttaccttgttttccaggggccctattataagccattatatgaatccacaattagttacatgaattactgatcaactgtgtggagttaacaggacccagcatattcagcttgagactattggcttcagaaagaatattcagacatcgaagtcatcccaggagcctgcagaggtcccataccaggaggcatgcagggtctggaatagctacctgaggcagtttgtgattatcaaagtgtcagcataaagaaagaaggatcactgaagtggaattttagaagcctgcacttctacccctgtattccccaaaaacattctgcatgactttttgtcaagtgcttaatcacaaggtacttaagaagtacccattctcccatgggtactttgcacccatgggagaatgagtgtgaaatggtttgaaatacctgagacaaatatggaaatttattgctagtaatttttctacaccttaagaactgggagcctctggaaaccagagggtggaggaggggtaataggaaggcagtttaagagggtaagggtggccctgagttgcccctactgtatcacctgctcttgcatgctaagtcttatcagtttctccacccaggtgcccccatgagtccatggattgaacctttgtggtgtgaaaataatcaatgtggtatggtcaagggccgttagcaggcaaacttgcccaccatgtgctccctagacctcaggcacttttctggggacaaaggagtccagtagagacacactgcaaagtgtcggaggtcccaccatgcaggacatcagccatcatctcaacatggtcctcattcgtatctgtcttcgttttatttattttttttaatttttatttttgagatgaagtttcacgcttgttgcccaggctggagtgcaatggcaccatctcagctcactgcaatctccgcctcctgggttcaagtgatcctcttttctcagcttcccgagtagctgggacaggcatgcgccaccatgcccggctaattttgtatttttagtagagacgggttttcaccatgttggctagactgatctcgaactcctgacctcaggtgatccactcgactcagcctcccaaagtgcttagattgcaggcgtgagccaccgcgcccagcctcatatctgtcttttaaacacttcacacttggtccttgagtgatacgctttatatatgaaggtttgaggcaaagggtaggggctctctgctgaccccagaaaaccacaagcaaaacagttttgagaacctccactttagtgactgaagtagactcttctcattatcaccaagttgctggcttctgtccacagaatgtaaattctgacctctcaaactgatgtttcataggacctcatcatgctataagttagtgtaatacatcttaaccagctgtgtctgtggattctgctcagcataaaatttaccttggcttctaaatgagtgaaaaataacatgggtggctgactgtagaaggcaagttctaagagccctcaaagaacagtctccttctcatccccaagtcctcgctattctttgaaagtctcatctttttgctctgccctacttctgccagtaccaacagtccagccttcccctcaaacttcaccagctcctcaaaccaaaatccataaccagtttcttttctgaagagagctacctcctgttctgtgtcctttggatcttttctccattctctggaccagcccagcatgtccatctctgctcactttcctccctgttgcagcttcctttgtccaagtcctgcctttttctcactcttgtagaacctcacaccttttttccctttactattcctaattctacaaggtggggactccattttacctggtggaacatagaagagtaagttaaggaccacgagggccaagaggacgctccttgtggccataccaatcagcaaagaagcagctgtgactcatcggagagtcactctctccgcagctttgaagagacggggagctgcatggctagtgaaccttttggaacaagaacatctgcctgctccactgagcaatccaatcagcaaaatgtctgtttgaacatgacatcccttcattaaagcacacttcctgggtgccacatgcatgctagcaactgcatgaacactgtgtaggcagccctattctaggccctggtagggtgctgtgtaggtgtctgtgtatcttcattgtacatccactaaaatgcctatagtgtgcagagaaccataaggctgccttacatagttgacaaagagtttgttttttttttcaaccttacacacacacgaagtccaggtaggcatgattctctccattttaaaaacaaaaataaagagtctcaggtagaagaaatgactttctcaagctcacatagatcctaaatggtagcaacatgatttataagcaggcttccctgactcctatatacagaagtactaaagtatggccttgcccagttctggtatagctgtaatgtctttaggaaaataagagctcctcaaaaacagcatggaaaaagcaagtccccataacacccgcaacatgacccagggaaaaacactgagtctatggctccccattgagcatatgctgtgtgccgggtaatgggggggcatacaaagaatttatgacaaaagtcttgcttggagggactaaagtcgacagtgtttgacagtttttgaagtgttttaagtttttcagcaactttatctgatactgtatgaagaacacaaaacccagaatcagaaagtctttctggtctggactctgcatgcagtagcttgacaagcttttaataaagcacgtactttacctcactgaccatcagttttctcacttggaaagaaggttgtacacctggccaggtgcagttgctcatgcctataattctaacgttttgggaggctgaggaaggtggattgcttgagctcagcagctcaagaccagcctgggcaacatggcaaaaccccatctctacaaaaaatgcaaaaattagccaggcatgatagtgagcgcctgtactcctagctactcaggaggctgaggtgggagaatcacctgaacccaggagatcaaggctgcagtgagccatgattgcaccactgcactccagcctgggtgacacagtgagactctgtcttaaacaacaacaacaacaaaaaataggttgtactccatcattcccacctatcaggaaggcttgtcgcaaggccaaatgaagtaactcttaaggccagtcctttatagaacatatagaacatatatttaaggaactattagactcatgtaacagaagaagacatttaaaactatagatattggccaggtgtggtggcatgtgcctgtaatcgcagcactttgggaggccgagatgagaagatcgcttgaggccaggcattcaagatcatcatgggcaacatagtgagacccctttctctatttaaagaaataaaactagacatgttgcttctccagctagagagtgaaatagccaggactaggaacacatgcttccctctctctgtccctgttttattcacaagaatgcatcaaatgtatgccacttcaatggactcttgttttccaacttcaggatgtttgcgatgtggttgagattgcacatctgtgaaagactcataaagaactgcagagcagaaaatcagtaaatagagaaagaatagaggacctgagttttgaggagcacaaagagaaaagattaagcaagcacaaatgcattaagggactctcctgagacccactttccaacctgcagcattaggcacagcctgatttgcactctctcagctgccatggtcctgatcttctgttctccaagaaactccctctgtctccatctcaacccttcccactgtgccgtccagaaccacagttctactataaacatacc

SEQ ID NO: 587397 - DNA, 4001 bp, Homo sapiens
gatgatctctgatttttcttctttgctggaatttgggtgatcgatgttgaggctgggctctgagcagtcggctcacccctgcttagcgtttggtgcagaggttcagagtgtgcctgctaggcatgtttgtggagaagggagatccaaaactcagctgcccttctgttttcttagtagagaatgaggagggtctcaatgcagacccgaggcctctgcctccaggtgggaaccctggagtggatggtgaggacgtgctcttggacagtgctgccttcagacagctgcaggtttggaatgggtgtagggtccagtgtgtcaccgcactggtgaaagtagcatgttcggtgtgtgggattttagggtgaaaccgatcgggactcgtgaaagccactgagtacagagccatgaaagcaacttggcaaccagaagcatgatggctttaaaccacaggatgagcattgagggtcttgccattcggggggtctagttggattcttgcctcctcactggaaccacaatctagcttgattcccatgcttactaatggagaggtggtgcaactttacactcaagacactgcgtgcagactctgtggatttaaacctgggactaactcttgtcgtgtgaccttggaaaatattcttcatctgccaaatgggagaaattgtagattttattgtgtggagtaatttccctaatagatgtaaaccactcaagtgtgtgactggtgtgtggttagcttttgtttctatggccagaatatatcattgcttgggcctgtgaacttgtattaatcaatagaatttgaatttttattattattttttgagacggaatctcactctgttgtccaggctggagtgcagtgtcgtgatctcttttcaatgcaacctccgtctcccgggttcaagcaattctcctgcctcagcctcctgagtagctaggattacatgcacccaccacacccggaagatttttgtatttttagtagagatgaggtttcaccatgttggccaggctggtcacaaactcctgacctcaagtgatctgctcaccttagcctcccaaagtgttgggattacaggcgggcaggcgtgagccactgcgcctggcctgaatttgaatttgaaagaggaatgagtgattggagatgggagggtaggaaaaataacaggggatgcatttcatggcagtgctgcctttacaaaatgtttctggaattttgccagtaaattgtcagaatgtggtcctcatttctgcccatggctcacttacgagctctaagatcctgacacacagattaggagtgtagtactttgagccattcacatatccttttaatgaacccatggatctttggcttgcgggggttgaaaacgtgtcatatttttacagcaagacagaatattgtggcagaacgcaatccacctgtatcctggcggacacccgaagaaacatacggctttctggctagtgcaggtgcgaactttgactccatcattcccaaacataccttttcctgaagcggggagagaccacagaaaagaaaaatcaatcttaatgaggctgggagaaatcctaggcttgccatcacctcctggttgatggcttgttagttgtgatttacctcacctcttatcacaactcagcaaggcagataaagctcagggtagccagaggcattggaggggagataggaatctgggtggctgcacgatctgtgtgcacaatgacatccacccccgtccccggtgcactggcagatcttccagctgcagcaacagcagagcagggcaggagctggggtccgctcaccatgcccctaacatggtggcccatttgatattggtgtcctgttgctgggcttatagttagagggttttttaagcatctcaatctttgggaacacccacttttatgttcagactcacgcccactgtcttacctgaaggcagtaagatcaccaggaaaaagagtaatgcagaaagacagaggttcatggccgaagagggcacagagttggaactcccagtggtgtctgcctgggaggctcctttatagagctgggctgggctgcgatgggtggggctggaccctggcctcactcttcctggaggggcagactgaggagatcacagggttctgcagaattcgaggaagaaaaggccctggcctttcagtgctacctccttttctacaaaccgcgggaaaaccagagactcagctaaggctgtcacgtttcctgatagcagaataggagaaaagaccaggatccccatgcctaggcctgagcgctttccctctgccttcaaatgtactttgatataaacatggcagtgaaaatgtctgctctgtctctcctttcctctggagcaccactgaaagctcaggagcgcagagaaagggtgttatgaaacacaggctgaatttaagcctggaaagacagttccgacacacggagtctctcaaattgtcaaccagtggcctgaccaagagaaggtaggggctcagaactagtggagaagggacagcttccttgtctagcagctgacttatttacctggctgaaggcagatactgcaaaaaaaaaaaaaaaaaaaagtcctggaaaagttcactgatggactttgttctccaaatggctggtatgaaacgttggctaggatgaggggactctgaaggttctaggagagatttcttttttggagttgaggagttgaaactctcccttagaagagtcggttcagtgctgtgttcaaggttggatgcacagtgtccagagtggagccagacagggcttctctggagtgacagagactcagccctggagaagggcccttaggcctgtctctcttggggtgatgagggatgtctgagggtgaagatgacactaactttgattttgttctgacccttaaggcaggcttttacgcaggcagccaacaaccacagggctgtgtgtggtgtgtcagtggagcatggtattcctgggtacactctgctttgcaggcctagaccctcagatgcattatttagcatctcagcctcaagaactcctcaaaaagtgcattggaaggttatgcgtggttttttttcaggatgaaatgagatacagcttataaaatgctttgcacgcacactgccatacagtaggtactcaatattattattattattgttttttgagacagtcttgctcatcacccaggctggagtgcaatggcccaaactcggcttactgcaacctccatctcctgggttcgaacgattctcctgcctcagcctccgaagtagctgggactacaggtgcccaccaccacacctggctaatttttgtatttttagtagagatggggttttgccacgttggccaggctggtctggaactcctgacctcaggggatccacttgcctcagccttccaaagtgctgggattacaggcatgagccaccccacccagccaatacagtaagcacacatattcttaattttctggttcttgcttactaatctttccctactcccaggtcataaaactatttcctatattatctttcttttttctttattatttttctttctcatttagctctataaccacctgtgatgatttctgtgtatggtataaattaggggtcctatttagttttcttttcccctatggaaaaccaattgtttcaagaccaaaaattattgaaaagattgttgtttctctactgtctagctgtgccacctttgttttaaatcaggctccacatatgcgtgagtctgatgctgggaaccttaatctgttctattgttctatttgtctatacttgcactaatgccatgctgtcttactgctatagcttcataataagttaataaacttttaaataagatctatctatcatctatctatctatctatctatctatctatctatctatctatctatctatctatgagtctgtctccaacagagccaaatcttcccacttatcttttttgtgtgtgtgag

SEQ ID NO: 587398 - DNA, 4001 bp, Homo sapiens
aatttgtttataccttctagggcaaaagactggatgacatatggctccactcttaaggcaggtaacaggatcgcctataccaccaaaaacacctaacagggaaaaaacacacaaaaagagcaaacagcgtgtaagaactcaaaactcatgttggaaaaacacaaaccctgtgtcagtatcgccttgagtaaatccgcagcgggcttctttctcaagcctgggcttttccatcatgataatgagacgcgagtcagtcatttggatctaagtttctgacatggaaactggcactgctgtggtttgggggatgtttatttttgtagaacctgattgtgaaagaccctgatctctcctgagtgactggggcctccaggtggggtctggcaggagctcagcaacgatctcttgtgaattcagctccaccacaagaagataatatcaaagccaccatacctccattttaacacacacaagccagtaaacttttgctttttcaaatcatttagtctgttaagtatttgatctgagatgggataaaaaagatgcaacttactgaaattgtttaataggaaattaacaccaagtaacttacagttgaaaaccacaattaaccatagaaataaattttgtaatggcttgtttctaatatctaagtcctggtttcaacctcattcttctttttgtttccctccctccctccctccttccctccttccctccctccctccctccttccctccttccctccctccctccctccccctcccaccagcctgcctccctgcctccctgcctccccgccttccttcattatactgttctaggttttggaaaatatgaggtctctggtgcctctcagaaccccattgttctcacaaaacccaggactcataaataagattggtaaaatgaggatttcacaagatgatatctattagattaattgttttaggatttactctcaaattttctttttccctttctccatccttcccttccactctccctcttttatcctttcatggtttttattttattttcataatatcaaggagaaaatgaaggttaggcatccaggtttaaaagttggtttcaatgggctgtccctgtcctgtgaacctgcagtggcctagtggcagggactgttctcagggcctctgatcagaaaagtcctgggggcagagtgtctgctgcagtagttctcacagtataggctgggccttaagattatctggaattctctaggttgcagtatctactctttaaatataaaaatttagaaaatgacattctatactactttctttagataaaatcaaaatttctgccttttatttaaaaagtcacctaacaggtttcaaccatagtctcagcagttgtagcatggaaagcagtgaagagatgatatttacaaactactgggctccttcatattggcttagaagaacgagtgagttgtccattgggttctcaaactccttttctattgaaggaagcaatgcttggttcaattaaatagggcattcagtctactcagtctaaaagtgtgggtagaagaaaggaaagagaaagaaagaaagacatgctctagggagagaggaaaaagaaagacagaaaaaaagagagagagggaagaagagagagaagcaggagaaaaggatggaggggacacacagagagaggaaggagagagagggatgagggagagataggtggaggggaatgagaggagacagagaacttctacgccattcttccatttggccaaccctcctatttccctggcccatctcacctggaagaggcatcaggaatatgaagaggaacgagaagaggagatacaagaccctcatggctgatggctgggagcttcaccaggagctgagtctggggaggacatcaagccttccaccttataaaggtcctggtccctggtcaccaggtagagttcagaactggtattgggtgcaatgctcattacagaggttagaattcagccacttacctggtgagtcagagaatggtcctcaaagaacaatgcacactcaggagatcttatgcaaatctggactcaggaaaccccagaaaatcccttcctcctgctcttgggaccagaaaattcctcctatcttgcaccatttaaaacccagtgtgtgaatggagtgaggggctgggtctgtctcacgtgagaacaaactcaaactcaggacctataacctgccactcacctgctgcccactctgtgcgacgtcctgtttttcctgagtatctggggacagtctcaggccaaattgagagctctttccatctaattctatccattgctcggacattcagctcctggggatgatacagggctggctcaaacccagggaccctggaggggctcagggcctctggcagcaccgggagcatggtgggccccatcctcacaggagatctgagctggtgaaatttatgtgaaagttcccctgaaactccccatcttccccacgggagagagatgaggcagatggatgcccacttccttcctctgagaaggagaatgggaggatgggattgtgactacatgtgtcccctcagagttcacccaggcctgggccaggaggtggcctaccacccgcacttgagttccttccattcacaccgtcactcagggaatgtcagctccacaggacttcagggctttgggagccagggctttctctgctttccacagacgtcagcgtcactgcccttgggatttggtggagaagcaccgagtagggctgcaaggcctccacgtggtctccctgttggtgatgggaaacacttatgaaggagccccatgttttcagggctgtgtgaggtctctggtgtctctcaggaccctgtccttcttccgtaacccagagtagcaattggcggccccaggcaatggacagagccccatcccgggcactcaggagagggcctttcttgggaaaatgagtggcattcatcctggttcctccctctttcgatctaagggcagtttgagaaacaagcaggccccagtgtccatgtctgtgatgtctcaggggtgcagcagtgacagagacatggggacaatgaggctttcctcatgacctgcctgacctcttcatttaaaatgtcaggttctgaagaaccctgattcctggcaggccagaggtggatttaaaggaagctggtaacgatattgtgcagccaagatccttaatgacatttttataaaaggaaatttctgagcctagcatggtggcttacacctgtcatcccagcactttgggaggctgaggcaggtggatcacatgaggtcaggagtgtgagaccaatttgaccaacatggcaaaaccccatctccatgaaaaatacaaaaattagccaggcatgatggcttacgcctataattccaggtatttgggaggctgaggcacgggaatcgcttccgacagagcaagactcagtctcaaagaaaaaaaaaaaaaaagaaggttctggtggggtatgcaaagagagggctgggtcagatgctgtcagaactgctaaacaaatatgcatccaggactggagcttagtcaccagggagtcactctgattgtcagggctttgtttccttgtgtgctgagcaggctggaattgaggggcagactcattcattcctgacactaaaactatttcttcctggtgaagaaagcatacagagaaatggaatatgaaataaagcctttatgtgctctgcctaaattaatattttattttttttttgtatacttgctatgtcacctttagaaagtaagaggcagctctcacttgctgctgatgacctgcctcaccatgcacatgtcctgccaccaccccacagaaatgcttccattacccacagtctttcaccagatgagaccagtgtccaggctactggctcctcacctcacttgaagtgatggtaaagatgtaaaatttggtgctgatgtctgagccttaatgcttcaaagtgtaga

SEQ ID NO: 587399 - DNA, 4001 bp, Homo sapiens
accacaattactaggataaagattgcgtatctttggacaccatagtttaatttggtttacatgtcgcacgtctctgatgagggagccctttctgaatccgcatcagccacagcagcttcttggcctcctcatggctttttgcagcattttgttccagggagaccacaggtgccaatttgtttataccttctagggcaaaagactggatgacatatggctccactcttaaggcaggtaacaggatcgcctataccaccaaaaacacctaacagggaaaaaacacacaaaaagagcaaacagcgtgtaagaactcaaaactcatgttggaaaaacacaaaccctgtgtcagtatcgccttgagtaaatccgcagcgggcttctttctcaagcctgggcttttccatcatgataatgagacgcgagtcagtcatttggatctaagtttctgacatggaaactggcactgctgtggtttgggggatgtttatttttgtagaacctgattgtgaaagaccctgatctctcctgagtgactggggcctccaggtggggtctggtaggagctcagcaacgatctcttgtgaattcagctccaccacaagaagataatatcaaagccaccatacctccattttaacacacacaagccagtaaacttttgctttttcaaatcatttagtctgttaagtatttgatctgagatgggataaaaagatgcaacttactgaaattgtttaataggaaattaacaccaagtaacttacagttgaaaaccacaattaaccatagaaataaattttgtaatggcttgtttctaatatctaagtcctggtttcaacctcattcttctttttttatccctccctccctccctccctccctccctccctccttccctccctccctccccacctgcccgcctccctgcctccctgcctccctgcctccccgccttccttcattatactgttctaggttttggaaaacatgaggtctctggtgcctctcagaaccccattgttctcacaaaacccaggactcataaataagattggtaaaatgaggatttcacaagatgatatctattagattaattgttttaggatttactctcaaattttctttttccctttctccatccttcccttccactctccctcttttatcctttcatggtttttattttattttcataatatcaaggagaaaatgaaggttaggcatccaggtttaaaagttggtttcaatgggctgtccctgtcctgtgaacctgcagtggcctagtggcagggactgttctcagggcctctgatcagaaaagtcctgggggcagagtgtctgctgcagtagttctcacagtataggctgggccttaagattatctggaattctctaggttgcagtatctaccctttaaatataaaaatttagaaaatgacattctatactactttctttagataaaatcaaaatttctgccttttatttaaaaagtcacctaacaggtttcaaccatagtctcagcagttgtagcatggaaagcagtgaagagatgatatttacaagctactgggctccttcatattggcttagaagaacgagtgaggtgtccattgggttctcaaactccttttctattgaaggaagcaatgcttggttcaattaaatagggcattcagtctaaaagtgtgggtagaagaaaggaaagagaaagaaagaaagacatgctctagggagagaggaaaaagaaagacagaaaaaaagagagagagggaagaagagagagaagcaggagaaaaggatggaggggacacacagagagaggaaggagagagagggatgagggagagataggtggaggggaatgagaggagacagagaacttctacgccattcttccatttggccaaccctcctatttccctggcccatctcacctggaagaggcatcagaaatatgaagaggaacgagaagaggagatacaagaccctcatggctgatggctgggagcttcaccaggagctgagtctggggaggacatcaagccttccaccttataaaggtcctggtccctggtcaccaggtagagttcagaactggtattgggtgcaatgctcattacagaggttagaattcagccacttacctggtgagtcagagaatggtcctcaaagaacaatgcacactcaggagatcttatgcaaatctggactcaggaaaccccagaaaatcccttcctcctgctcttgggaccagaaaattcctcctatcttgcaccatttaaaacccagtgtgtgaatggagtgaggggctgggtctgtctcacgtgagaacaaactcaaactcaggacctataacctgccactcacctgctgcccactctgtgcgacgtcctgtttttcctgagtatctggggacagtctcaggccaaattgagagctctttccatctaattctatccattgctcggacattcagctcctggggatgatacagggctggctcaaacccagggaccctgggaggggctcagggcctctggcagcaccgggagcatggtgggccccatcctcacaggagatctgagctggtgaaatttatgtgaaagttcccctgaaactccccatcttccccacgggagagagatgaggcagatggatgcccacttccttcctctgagaaggagaatgggaggatgggattgtgactacatgtgtcccctcagagttcacccaggcctgggccaggaggtggcctaccacccgcacttgagttccttccattcacaccgtcactcagggaatgtcagctccacaggacttcagggctttgggagccagggctttctctgctttccacagacgtcagcgtcactgcccttgggatttggtggagaagcaccgagtggggctgcaaggcctccacgtggtctccctgttggtgatgggaaacacttatgaaggagccccatgttttcagggctgtgtgaggtctctggtgtctctcaggaccctgtccttcctccgtaacccagagtagcaattggcggccccaggcaatggacagagccccatcccgggcactcaggagagggcctttcttgggaaaatgagtggcattcatcctggttcctccctctttcgatctaagggcagtttgagaaacaagcaggccccagtgtccatgtctgtgatgtctcaggggtgcagcagtgacagagacatggggacaatgaggctttcctcatgacctgcctgacctcttcatttaaaatgtcaggttctgaagaaccctgattcctggcaggccagaggtggatttaaaggaagctggtaatgatattgtgcagccaagatccttaatgacatttttataaaaggaaatttctgagcctagcatggtggcttacacctgtcatcccagcagtttgggaggctgaggcaggtggatcacatgaggtcaggagtgtgagaccaatttgaccaacatggcaaaaccccatctccatgaaaaatacaaaaattagccaggcatgatggcttacgcctataattccaggtatttgggaggctgaggcacgggagtcgcttccgacagagcaagactcagtctcaaagaaaaaaaaaaaaaagaaggttctgatggggtatgcaaagagagggctgggtcagatgctgtcagaactgctaaacaaatatgcatccaggactggagcttagtcaccagggagtcactctgattgtcagggctttgtttccttgtgtgttgagcaggctggaattgaggggcagactcattcattcctgacactaaaactatttcttcctggtgaagaaagcatacagagaaatggaatatgaaataaagcctttatgtgctctacctaaattaataatttatttatttttttttgtatatttgctatgtcacctttagaaagtaagaggcagctctcacttgctgctgatgacctgcctcgccatgcacatgtcctgccagc

SEQ ID NO: 587400 - DNA, 4001 bp, Homo sapiens
ttggttaactataacattaatattgaccttaaaagtaggatggctccaagaaatggaatccatcccctaacgctccttattttcttagtccttcactacttttctctccaccctttgccaaacccctaacagaatcaaaagacagagtaaagaggacaaagttaagcatgcacagtagcagactgtccatactctcacttgacctgggaacatgaaaatgttgcagcgtgtttagttcaggaatgcaccactggccaggcgcagtggctcacgcctgtaatcccagcactttgaaaggctgaggcgggaggatcacttgagctcaggaattggagatgagtctgggcaacacagtgagacctcctctctattattaacataataataataataaagaaattgaaaaaaagaaagcaccactgcaaatattccagttgattcgccctgccctcaaaagacatgtgtcacaccaagcaactaacacccatgttgtaactgccccagaggaaagacgttcaacggctgaggagaccacagcggcaactaggtcacttcctattcgaagaaaaaggaggagatgccatctggcaaattcgaggtagggagacaaatcaatcgatgacgttgcgaggagacagaggtcaaacgggatctactgacatgacagggcgttgaagggaaggaaaagttgagggaaacgaggaaactatttccataggagaatgctttttcactgaagtcgaaactggcttggtactgacgcccagcaggggaaactccccggacactcacagacattcatctggttacttgcaggaacatctgcctttcctggtgacaccctctgccctgcagtcttcattttccctggatagcccagcgtcatttaaatactcagaagcctctctgcctttctatgctgttgtctgcaaagagatgaacggacctgtgcagacggctggccagtgacgccgggatctctaggtaacatgacccagtcacggtgtcacagacaggcggaccaggaggaaaccagagacacagatggattccagggaaagccagcgttacagaattaagaaaagctggggaagaaaaaggaaaacgagaatttccaaaactgccgctttcccagcagaagggagatgaagttgtcactttggctgcgagggtgcagagatggaggaagggttgggggtgggggtggtaccgcaagggagaaaaatagctataggcttcatcgcaaaggggttcatgcagaatacgcgaggccggcggctaactctaagattgctctctcgttattctgtgcctggtgcaaaacccactactcaggggacaacacatcccagcataaagaatgaaatcatttcagcagcgagggctgggcccgctagaccgtgaggctccggcggcttccgcccgttgtctggtgcaccccaccttcagaagcacctgcccaagatgggagcgactgaagagagaggccccagagactctccgaggggcggcacccccagattcccggccggcggaccaagttcgcagctctcaaaagacatgtctcacaccaagggccccgggcggggagaggagagaagaggggaggggagcagggcgctgctccagggcacctgcctgagctcgggcgcgatccccggccacaggcgcgcggggtcaccgccgggggaccgggactcagccctcggaaagtccgcgccaacccacagggcacccgggcgcccgctctccgactgctgtcccggctgccgactcgtggcccacgtccgcctcagtttccccgcccctcacctgctcgagacttcggagactgtcccggggggcgcccagcagcgcgcagagctccagcagccccgagggcagcgacaagtgcggcgacgcggcctccgccatggctgcccgccgcccgccgccagtaccgcactcgggcgcctcagccgcgcagtcgcccgcagacccctggggaccagccgcgccgcctgggggccgggggcgctgcgagcgccgtctgcggggcggggctggaggcggggcctggaggggcggggcccgagccgaggcggggcctggagagccccagaggataccgcggggagacagagtttgggggcggggcttgactgggcggggaggttctgggcggggcctggagtggcgtgcccggccctagggaccgggacttgggggcggggccggtcctagggcgggtgctgctggagacccgcgcgcggtcgtcatttcctaacccgcctgcgggccctggcgcgtgcgcggcgtcggagcaagcggccccttccttcggccccgcccagccccgccggccgcccgctccctggggaaccgagggaggaatgggcggggtcctcaggtgcccggcgacgtcatccagcccccaaggctccaggacgcaaagggtcccctgatctggcagtccctggacctaccctggagagcgtggggggacaaaggccggacgcgccgcccgctgccgcctccaggaagccctcccttgccaggacagtggagttggccgggtgtggacagcaggaagggccggcgggaagggggggtggaaagagccactcctggttaataactctgcggggttaacctagggccggccatactcaagtacggacttgagtaaaattcagcaggaaaaggagcagggtgggcgccgctagagggaggcttcaggactgagggtcagaggcccaaggcctggcagggcccttccctggtcagctccaggcttggcctgatgcccggtgggccacgggcctcttccagcctcaggctgaccccagagaaagaggacagcccacaagcccgggaggccggcttgctgcctggtcattgctgcagagcctggagggggcctgcgctcagtccccgctgaccgtcccctcccttgaccctgccatagccatctgtgtaacccaggggaaattattccaaagggacttccacttctgataatctatgattctattttctaaaaaacaaaactctaaaatgcttaatgtcaaacatctgtcatcagctgaacaggaaaaggaacagtaagtacaaagcaaggcaacatcagaaaagggagccctgaggaatttctccctccttccctgagccgggtgaggccgtgactgcagcctgactcacaggttttatttcacttattaacctaaagatggtgaggatctgctggttctcccccaggcctggaggctgcctaccatcggtggctctcatcggtgagctgaggccacagttgttatagtctctgacttcaaaagaaagaccgatttcatgaacaattgcctgtctctctcgacggtggcctcggttttttgttgttgtttttctgtttgtttttgagacagagttttgctcttgtagcccaggctggagtgcagtggcatgatctcagctcactgcaacctctgcctcccaggttcaagcgattctcctgcctcagcctccagagtagctgggattacaggcgcccaccaccacacctggctactttttgtatttttagtagagatggggtttcaccatgttggccaagctggtctcaaactcctgaccttaggtgatccacccgccttggcctcccaaagtgctgggattacaggcatgagccaccacacccagccttggtggcctcatttttagcagcctctgcaaagcacacagcctgaatccgtcacctagagtccccagcatgcaggagaggcgctctcaacccgggctggagccatgagccactccctgagggcacacagggcctgagtctggctcctgtgtgttgctgtgtgacaggtgagctcaacagccctaagccgtgacttcctgaggggcagtggtcaagatccaagggaggtaaacacatggcagctcttgccaccaggacccagtaaggctcacgcgagagcaggtctctgctgtccctttatcaccaagaggccaaatgctttaag

SEQ ID NO: 587401 - DNA, 4001 bp, Homo sapiens
gacacccatcagtcccagcagcttacctgggctgtactgccgcaagtcttcaggaacagccctcattacttcagccaagccctttctcatgatttactttctttctacccctctgcttctcaccttattcaatatattgatgaccttctactttgtagcctctcctttgaatcttctcagcaagacaccctcctgctccttcaacatttattctccaagggatatcaggtctcttcttccttactctactctttacaacagggctttatgaagtcacccccgccttcttggactgcacctcacaaacttacaccactatccatcatctacccaactcctataaaacaaccccttccccatctccctttgctgactccgtttttagactcagtccacctgcacccaggtgattaaaaagctttattgctcacacaaaacttgttcggtggtctcttcacacgggcaccgcgtgacaggtttcattagaaagtacttttgatgaaggaaaaaaagtttttattccctttaattctgaccacgtatttttaaaaatcaacaaagaatcgataggtgcaatttgccttttgtaacattaaaaatcagttaattctgacttccaatattggtctccttcagagacctttgcaagacactctttcaggtcctgaaacacagacatttagaaaccaaaacaagctggggaattcaggctaagaactagaagtaacaggggcccgcgtacaagttgtggctcaaacgctgcagagctgggttttctttttcctggcaaactgatttataaccacacgaagggcagctgcagaaccagttagaccataagtactattcccaaacagccctagaggaaggaccatacagggatgggaatggcaagggggattctgggggtcgtccttgttcccaagttccgtgagacgccgcaagtcttaattcttgcaggagccagggtccccatggatcctgctgcccaaaacgtgcgagcccggggagttggcacagcctcaaggcagcccgacaaggtgcctccacgcccccttgcggacccaaatgattgaggacgatgtgccaattaactgataggtgcagggtttcagaaatgctctctcagtttaacctcacaaaaagcccttgaatcagccctgttttacagatgtaaaacaccgaggctcaggggagtgaaggaagacttgtcagcaaaaaggaaaacctagtgaagactatcgttggtcttgctccttttatcaaggagtagaggggctggggtcgcctcgggaccccacagcgacccctcttgctctcttcgcggatgaggcgcaggctgtcagccgggaggcctggcggcgtccaggtacacgggaagacggacagcgcggtgggtggcagggactttgcccggcacaggactgcagcagccaggctagggcgcagcgcgcaccacccgctcgtcggcttctgccaggcagccccgcttggcgagcgagtcctcagggaccgaggctgcagcagctaagcgcgggcgcaccgaggaccatccacgcgcccgcagccgttccggcgccccacgcgagtcgcaagccacgagccagggagcgcgtgcgcgcaggactgcagcgggcacgcgttggcagtgccatcgtgagctcacccgctgtgtctcttgccttaccgtagctgttccccggtgaccaagacctcagccatgcgctccagctccctttgctgcgccccgccactcccgctggtgctgctgtcactgccagcactgccagtgctgccgccctcctccatggttttagggccgtgcggctaccactggctccgctgtccgccgagggtttgggtgctcggatcagtctgccctcacagacgcttcccgcgccatctttgttcggggcagctccgctgctctgactggattggctggagagggaatccctatgggtaggcagacgcgctgggctagtccggccccagaaacttgagcttgggggcgtggctagagcccctcatggtcggggggcggggccgatggaggaaaatataaacatctgggcggggcgctgctactgagctgtgtgtgctgctggaggctgaatttggtgagctctctttacccacaaagctcatgctgtagaatcctggggacaggcctggaggttattagtgtgaaggcgtttttattgtacgttccacaccccaagttgccagagagcaaaacataattcaacaatctggccaaatggtcaacagtgaaggttatacatgtcattgaagggcatggagaaattaaacattcttctctccccaacctctctctccaaagacgacttgtttgccttatgttgtaatcaataaggaacgccggcctaggaatcaggctgacctgggatccagctccgctcctgtgatgtcctatttaaatgtgtttaatcctcccttacaaaataaaaataattgcggctaccacttttgacatctgctgcattaaagatacttcaggtatggtattacctcgtttaattattacaataattcataaaataggtattggtgttcgttttgcattagaatgcaggcttggagaggtgaagttacttgtctaaggcaagcaaataataagtataagaagagccgggcaccgtggctcatgcctgtaatcccagcactttgggaggccgaggcgggcagatcacctgaggtcaggagttccagaccagcctgaccaacatgaagaaaccccgtctctactaaaaatacaaaattagccgggcgtggtggtgcatgcctgtaatcctagctacttcggaggctgaggcaggagaatcgctcgaacccgggaggcggaggttgctgtaagccgagttcgggtgagcggagttagtgccattgcattccagcctgggcaacaagagcgagactccgtctcaaatcatcataataataataagaagaaatctaaccgaggcaattctggcttcaaagttatgctttgaaaagactgaaagactgcctcttaaaatggggatacaatggtattgtctatccgtaaaagattatgaaaagaaatttgattagtaccaaataaatgttctgattttctgtttcatgcagagtcggagttggtctgcaggaaggcgaagtaatgtttatggcagtattcatgtgtgttgagcatttattctgtgctttacattgtgccaaacactttatcctcacaaaaccctggagtttggtattattttcaacttacaaatgagaaagcttaagtatagaaagatgaagtaatctgcctagaaagttaggtagcccttaaaccctggccatactcagccccactccagaaagagaatagttgcccaactcccttgaacatccgggagcagaccagctctgaatctgcatgagacagatgttaggtgactcttttgccaaaagaaattatttaagtttcttaattttttaaataggccacaatagacatgtagaccaaggcagacatagttctaggtgactgtgattctaagagccttattctgcataaaatacataaatcattcaacagaagtcccagagttaatgagattaaaaggtgtctgttgctcatgttttaatcttataactactaaatagaatatcaagagtttgcacgggcttctcagtcaaacatgcaatttctatctcaattctgtcgtttgctaattttgcaaccttatgctagttatttctcttggcctccctttcctatcgataaaacaggaataataatttctacttcatagggatgttgcgtggcttaaatgaaataatgtaatcccagttctttgggaagttagggtgggaggactgcttgaggccaagagttcaatgccagcctgggcaacatagcaagaccctgtctctacaaaaaaaaaacaaaattaattacccaggtatggttgtgcatacctgtagtctcagctacttgagaggctgaggtggaa

SEQ ID NO: 587402 - DNA, 4001 bp, Homo sapiens
agagatccagataagcactgaagtaacagcaaggatctcattgtggagcctaaggtacaagttggagagtagtaggagatgaggtcagagaagcagcaggggccttgcaggccactgaaaggacttggattttactcattaagaagacatggtaggattctggacagaggaaagacaggacttgatgtaggttttaaaaggatcactctagctgtctagagaaaagatggaaaggaaccagattgcagtgataatggcttgcaatggagaatgaaaagggattgtattctggatatatgtctcaagtagagtcaataggatttgctgacagattgtggggtgtgagaaaaacaagaaaaataaaagatgactccgacaattaacttcagctcctctaataacggagttgctattcacttctaaggcaaagggggaaaggggattcagttttggacacgttaagatgaagatgactcttagtcatccaagtcgtgatttcaagtaactgctggatgcacaaatctggaaatagggagacagatctggactgaagatatttatatttatatttcagaatctccagtttatagaaagtatgtaaagccctgaggctgaatgaatgagaccacctaaagctagggagagtctatagaaaaggtcctataactgattcccaaggcacatcctaacatttaaaagtcaggaagataaggaaccagcaaaggaaaccaagaagtaacacccagtgaagacagggaaagacaagaaaatgttatccataggccaagtaaagggctgaaattaatgccagatcttgctatctgacctgccactgattgaagttttaaatcagaaattggtgaatacagataaccttcagaaaactggcactctcttgacagaaatgttactctggactgtttccttcatgcttaagaaaataacaaggccttccatttctggacaaatgtactctttgcccattccttcgtacattctattactacgtgggggacactaaattaggtctagagggaaatgcagaacaatacactcgttctttgtatctctgactttaaatcactcctataggaaaaccaaaacaaaaaaactccataaacgtgaaaggaactcagctataagttggtgaagttgacacctacaggccacccacgtgggtgacagagggaggtcagagggcaatgctccaggcggacctaatcgccagcgtccaacagattgacaactaccaacgactaatctcactgcttccttcactgagtgcgaagagcgggaagcacaatctcactataccagtgaagtcaacccctccccaccaggccagcccacaactccagctatccagcaccccgctccagatcccagagcctccccgggcccaaaggaccccgccctaaaccgccggcgccggacccactacaaatcccagcaggcaccgcgcgcccgcaacatgccagcctacgcttagccgccgctgggcctcctggggcctgtagtctccacgccccccgtctccggtaagtacctgaaagcgataaaggaaggcttcgggccagaggaagaggtaggccgggctgatgaggccgagtttgccgaccaagggcacggcgacggtggcggcgaaccaatagcgcgtgatcgccgggatgctcctgaaccagtctccgatgtccgacatcttcgacccacaggtagccaagatgcacaagaccgcccgactccccgtgccgaccccctcacgacgcggccggctccgcgactgttaggtgtctaggtggaagccgccgaagccgcgatgcagaaggcggagacgggcggacgtggcgccaccgaattcggaccagcgaggcagccttctgaggcgaaacttccccttccggcgaccgcggacgacgtgaccagaagtcccgccgcttaaagggtaagcgccgattttaccgcccggccgaggctcggcgtcctggggggcggagccaggtagagcgactacacgactggtgggaaaacagtggttgcctggatcaacggcaaacgctccggccagtggcgaggccaaatgccattcacctagttctcagagttttaatgcggctgggtccacctggagggtatttaaaggggacgaaggcaaacgaagtgtctagttcctcgtctgcttactcattccacaagtgtttgttgggcacagttctagacactgggcagctgcggctgtcagcgctgtcgtggtaccctctctcctgatcttaacatcctcattgggataatttataaacaaatagataatgaagtaagataatctcagagagtgattagaaaaataggaaaatgaaatgagatgatgaggtggagtgacggggtgggggtgcggcagtgtgaggacagatggctaccttaggtatgaactgggccagccaggcaagagatctgggggaagaattttccatgcacagagaaaagccgctctaactaggttggaatgttggaggaactaaaagccaaaatgatccatcttgtctaattcaacttgtataagaaggaatctttaagaaaagatactggccaggcgcggtggctcacgcctgtaatcccagcactttgggaggccgaggcgggcggatcacgaggtcaggagttcgagaccagcctggccaacatgatgaaaccccgtctctactaaaaatacaaaaattagccgggcatggtggagggcgcctgtagtcccagctacttgggaggctgaggcaggagaatcgcttgaacccgggaggtggaggttacagcgagccgagattgcaccattgcactccagcctgggggacaagagccagactccatctcaaaaaaaagaaaaaaagaaaagatactgagtagagtttcccgttgttttgggatttggggccagcagtttaagattgctaaagtcttccaataaagagcaccaggaacaaacctgtagtcaacaaagttagatttattaacttgctgcagcaagggagactgcactccagaggaacctcaatgcctctcatcaaacggaagtgtcattattgggttatgggaatggggggattttttggtaagaattaactggagcagtgtttgatagactcgaagcaaagcagagctgtgtgcagcatcaggttaacatcagacctgagtaggaagcaggctctttccttggaaatctcaaaattacgacaaatgtgaaacgttgggtctgaaaactctatctaaagctttgtacctgtattgaaaatcctgtgtcaaagtgacctgtatggctcagatgctctggacaagaatgggatgttccattcacacggaaaggatgtcagacagcagagtttccaacattccataattttagagaatatttgtcagcaccatatccttgatgttaattaataaaaacagttttttcataacaaaaaggcattaaatattccacagtgtaatgagagtatacaacatttgggaaccaatggatagcaaatctacgaagaacacagctggtgggaatataaattgatacagccttacaaaaagataattttgatataaaagctagatatttatataaataacagataatacttgacgatattgcctgaggtttattctgtttatttccctctactaccaccaccattgttttgtacccactactcataaccaaggtacagtgaaagaaaacaggggttatctggcttaggtggagggctaaggaaagtttctctgataaacttaaaagtacacgtgcatgagaaaagacaagaacaagaaaaatgtacacccaatatctggcagtgtttatttcttttttttttttttttttgagacggagtcttgctctgtcgcccaggctggagtgcagtggcgggatctcggctcactgcaagctccgcctcccgggttcaagcgattctgctgccacagcctcccgagtagctgagactacaggcgtccgccagcacgcc

SEQ ID NO: 587403 - DNA, 4001 bp, Homo sapiens
agccgggtgtggtgggcgcctctaatcccagctactctggaggctgaggcaggagaatcacttgaacctgggaggcagaggttgcagtgagccaagaatgtgccattttactccagcctgggcaacaagagcaaaactagtctcaaaaaaaaagaaaagaaaaaaaaagaaatctcaattcccacgtcctccacaggtcatgtagccatccccctgcctcctggagagagggtaactccaggagccacacctccttttcaggtaggaggtgcctaggccagcctccctcaccagcaccccaggcccacagcaggcaagcacccctctcaggagggccaccctcctccccacggccccttcaaggcctccgtgcccgacctttgtccatgttgctccatgcctgactctcgctgaggttatcttatctcccagatgaactgagcaccctgagggccacgacagtgcctgccctcccccaaccccctccccatggtgccccgtgaaggaaagctctgttcttgctcactgagagagcaaatcattgccaactacatgtccaaaatcagcccacttctgccttgataacctctaggccctcagctgctctctaaaacaaagccctgagggcccctgggccagggtaaaggccataaaggggggatggagggtggcaaggggattgctcaaggccagcttggtggaggaagccaatgcccaggctggccaagtccttcccatcggccatggttctctccctccacccctctctgtcagtcatccagctgagcagggcacacgcctgcaggtgtgtccaccacccccataccccactccccacctggaggatggaagtcccaacacagaacccaactctctgtccctacaacagacgctggctctggcaacatcggcagggctccaggccagcctaaccactggagcaatgaatgggccacgcagccactctcagaagggtctgcaaggacaagaacgcctctaacactgccccttgtccggggcagctgctgattcccctgtcctcggacaggcctgggctcctctggccccctccctggcaggccagccctcctctgggagcctttcctacccgcaaggcaccgctcatagcaccaagaaggaacctatcaccacaaactgcccagatcttatctgactccttccatataaggggacactgtccagggccgggcccccaccagcccgcccctcgaaaagctcctcaggagcccctgaggatgcacagacccaagaggatctggatgcgggacacctgccggctcccctctgcctggccaaggccagctccagagcccctacccagtgaccttgtcaggtgactctccccaagcctcagtttccccacagggcccatagggcacaccgatccccgcttagcccagggcccatgttctcggactcggagctcgcgcttcggccaaccccggaaagtcgcggggcccttgggtcagaggttagggggtcaggcgctccgctacctcagctcccagtggccgctgcccacgccggcgtctccgtccttgttgggggccggggctggcgcgtcccccgcggctcccacgtcggggcccgcagcggcgtcccgcacctcctcttccgccgccgcaggcccgccgccgccgtggctcgagggccgcgaccctgtcctccggcgccgggagctgccgcggtcgcccatggcctcagcccgcacccggccgcagccaagcgtgggcccgccgggttcgtagcgcccgaggcgcgcggccccacctccgggccctagacaacggccgccactgccccctgccggccgccgtagcccgggtgaccgcctcaccagcgcgttcaacccgcccgcgtcgggcccgtcggcctcaaggacaacggctgcgttgctccggagccgctaactaatggacggccgcctctctcgtccatttgtagtccgcggccgacctgaggcggggcctggagaggctgacggggcgcagggcaccctgggagtcgtagtcgccgcgggcgcgccggcgcagagcaccctgggagtcgtagtcgccgcggccgcaccggcgcagagcaccctgggagccgtggcagctcccagggccggggctgcgggccgcaagtgcgcgcagcgggaacggaccttgcatcgctcccgcgtggtcccggggtcctgtccggccccacggagcgggatggtccgctgaggggtgcgctgggccccgacttcctggccgctgtgcgcccgcccctcgtcccacttgtgtacacacggggtctcggcgagtcactccgggcaatcatttaggaagcgcctagtgcgccacggtccagctgtccgggccggtgtccgcggcggctcgcgtcgcccgccacccagcgcgttggtttctgcgcacgcagcttacagtaacgtccctggcgcgcttctgctccgcgagccctctggttaccccggcaggaacctgcttttcttcgccttagggggacgtcagacaagggccaggtcagaagaccaagctggagaaatgcaccaggccctgcgtcaccgggacgcctgccttgcacgcgactcccaggctctccacctccccgcctgcagagcccggcgagaggagggcgagggcgagggcgagggcgcaggccccttggtggtgtcttctcagcccacccactctctccacaaggagctccacgtccctcaactctcagggcctcccagtttccaacgtgggccagcctctccaggatgtcagaagtctgggccgctggatcgccgggactcaagaggcttctgtgcatttgcacggcctgtgcaaccgccctgttgttttttgttttcttttttctttttttgagacagtctcactctgtcgccaggctggagtgcagtagcgcgatctcgtctcactgcaacctccacctcctgggttcaagcgattctcctgcctcagcctcccgagtagccaggactacaggcgcgtgccaccacgcccagctaatttttctgtttttagtagagacgggctttcaccatattggccaggctggtctcgatctcctgacctcgtgatccgcccacctcggcctcccaaagtgctgggattataggcgcaagccaccgcgcctggcctgttgttattttttctaaagatgggggtctcgctattctgcccaggctggtctcgaactcctggcctcacgcaatcctcccacctcggcctctgaaggtgctgggattacaggtatgagccactgccccagacatcttgtatgttaaatgaagcaactaatcaactgtaacagccacagttgcggcccaccttggcttggtgtgcatattgcacagggcatggagtgagaacatcctggatctcaggatgccagggttcactgaggactctgactctagaaacaccttcattcctctggggtgagcaggggcaagcagcacttctctggaagcaaacaggtgctcctcctgaggtggggtcctctcccgtgggctggtcacagcctcgcctctgagctccgtcctcttccaccacctccaccaacagtggccagcagggctgcccccttggttgcccccctggtgacatattcttgtcaccacaggccgctgtgggttgctgccaaccaggtatcaggcaggctggagctacctggcagatgccctttgtgtagcctgccgagtggggccgccctcactggacccaagagcccctcacacatgggccttggtcggtcaggaccagccccatctcctacccagtctctcagaatattcatttgttgaatgcagtcgctggcagacacactctgtggccaggtaggcccagacctgtctgagtatggactgacagcaagctcagagaggtctggacctggccacggagcacctcatgctaggcagaggagatcaacgactcaacctgtggtcgcgtcccaactcaaagccggcaagtggccacagg

SEQ ID NO: 587404 - DNA, 4001 bp, Homo sapiens
aatgattacaacttgagtctttcctttaaaatcattatctccaagtcattggcaagagctgttgccaggaaataaattattttgtttcattaagaaaaggcaagccgggtccggtggcttacgcttgtaatcccagcactttgggaggccgaggtaggtggatcacctgaggtcagaagttcgagactagcctgaccaacatggtgaaaccctatctctactaaaaataacaaaaattagccgggcatggtggtacatgcctgtagtcctagttactccagaggctgaggcaggagaaccacctgaacccggaggccgaggctgcagtgagctgtggacaacaagggcgaaactccgcctcagaaaaaaaaaaaaaaggaaaagaaaaggcagctgcatacatttacttcaagcatgaatctaggaagcaccattagagagtgcctaccctggaatattctagtctatggggcttagacactaccttcggtttaaaaaccactgttggcgttatgtcgctcaccgttcacacagagtgtcccagggcagcacatggcatctcgctggcacctcctccgcaacccacgacatgtagcacagaacggcttctcatcgcggggctggaggcagaactttctggtattgcagtccgtgtcagacaggcactgtgagccctgtggagggaatctgttatcacaaggctaggaaacccccaacacgatggaagatgacttattattgaaggcaggaggcggagggagccaaaggacagtggcgctgtgacaaaccctgggcagcatcttactctccagtggaaatggttttctcccacaaagggaagctcatgtcacccggggagacctaggcgctgcaaaggctatttgagtttgaaaaattgacttaactcagaatttagttttcctgtgctctttgtgaaaatgggaaaaaatgttttcctatgtgtgtcttaacaggtgagtatgagattttcaatatatcttaactctagaagctggctacagtttcattaaacatactattgatgtttgtggcattcctatttgattttttactctagtgaatcacatttagcttagagacccttccctaagtgaactgtcctttgattttcaatgatgcctcattgacatagagaaagagataccgaagatcaattgttctcatacacagttgatgcttctacatagacatacaacgtaggtgtagcatatatgatatatgtaataatctatacgatatataataacatatacacatacataaagcgattcctaaaacaactctctctgtgaagttagatggtgacaaggcaatgcatcatggccctctgtttaaattctcattcccatgtttgcttgctggctgtgtgagcttgggtaagctcttcaacatctctgagtcttatttcctcatctggaattagggaatgtttcacctatctcaaattgtgaggaagagtacatgacgtattacatgtaaaagagctggcacatagtagagcttccaaagtgttcgtttatttcgtgatttatagacaaacgtatggccgaatgatgtgaaaagccactgtgtttatttcatacattcacactaaggccactgatcctaccaggatgccctcccaaatccgaaaccaattcaatttacctgctaggtaagacatttcatacatgaatcagaatgacttactaaagcctaaacaaaacaccccagctgtcagcagtcccgtacctcgcccccctccctagcagccttaccttccgggccccatgcaggtcagcagagctcctgatgttgttgaagtccaggaccagagctcccaggggagagcagagccagctcagccccagcaggacggccgccaccatccttcaatcccggggctcctggagggtcccagcactgtgcgtcaccaaagcgaggctgctctccacccagagcagagcttccactaagctggcagctcagcacgtcgtctgtttgtcactgctttttctgaaagaagtaaaccttagtctgagtaaggtgcgtgaaatcggctgagcaaagtctgaccagcaggttcctcctgaaactatttataaccagatgtgcctcctccccgctccgttccttcctcctgccccacacaggcttcaacaaatcccttcaaatctgtttgatcaatagttcaaaacaaggactcaatagaaggagagaagaggcagggccatgcggcttctcctccaggggttcaatccctcttaattattgcatatcaaagttagttcaaagggccacggcagagcaggatgtctgtatcaaaggcaaactctgataatcacctgcatttcctaccttcagtaatcctttgggggtagggagggagtctgccctaagatctgttttcacagctaattgtgctcaaagaaaggatgaatcatactggccaatatgctatagaggatgccaaaaactaatgaggtacaaaatacactgagaagctgtaaactgggcttcagatagtgaggacagatagaaaaagagaaaacgccccctgattagctctggcatccagatgtcaaaatcccaaccgcttaaaagttgtgaacgtaacagcacctgttctgactaaatgccatttgggaaattactttcctttaaatgaaaattgaactgtttgaagttagggttattaggaaaataatgtaatttatgaaaatcccatttttcaatggtgggaacaatgatagcgcattttacacaattcagtacgaagctttgggtccattttatcagcaacatatttaatttgtgttgcattatgtaaaactcacttaagcagaacaaggatccaagtctctggctgatttcagatgaaatttcatgtatttccaattttcctaatacgaattttttaaaacttctgcttcatccctttcctgtctgatttttttccatttggactattagtcaggtaatttagacatgtgcttatcactgtcttaaatactttaagggtagaacaatctagatctggatcaaaaaatcattttttctcttcattgtttcattgctcttagcatagagtcatctaaaatgcattttttctatgccataaatgataatcttattatttactacattttcctgcagaacaacctaacatcaattcattgacatgaatctcagcattctgtgcatgggaacattctcaattttgagtaatgcagtgccattccgagggtgatgcaggtgattcgagccttcctactacttggcccttgtccttgggttggtattgcttgtctacctctcgtatggaagttacttgttttaatcccttaaactgacatcaaacaacaccctttgatagcatgataaccctggtgactaggggtgttacagaatttattttcaagttgtacaattatgaccaaggataaaggaaagagcccccagggttctgtctctgccgggtttctctgcttcctgctgcctcactgtaagggaatttcaggttaccaaaggcccctggcaatatacacaggcgaaagaactgacgggaactcctgtaacacggcacaaacagccactgagcacttagagcacttggcatggaacagagcctcggattacatgttaggaataaaatttgaaactccaatggccgggcacagtggctcacacctgtaatcccagcactttgggaggccaaggtgggaagatctcctgagctcaggagttcaagacgagcctgggcaacatattgagatcctgtctccacaaaaaaaaaaaaaaaaaaaaaagtaggccgcgtgcggtggctgacgcctgtaatctcaccactttgggaggctgaggtggatggatcacctgaggtcaggagttcgagaccagcctggccaatatggtgaaaccctgtctctactaaaaatataaaaactagtcgggcgtggtggtggtcacctgtaatcccagctactcgggaggctgaggca

SEQ ID NO: 587405 - DNA, 4001 bp, Homo sapiens
ccagctactcaggaggctgaggcaggtgaatcgcttgaacccgggaggcagaggttgcagtgagccaaaatcacaccactgaactccagccagggcgacagagcgagactccgtctcaaaacaaataaataaataaatgaacagcctatttatcttgacatgcagggagcacaagcactccccagggtacgcagaagctgagagaatgacctcagtatccaagcaatccccagggcactgataagaaaatgagatgttaagaattcagcacagatcctatttttttttttgaaccatttttctcaattgaaaaactgaatgccacagaaaacataatattcattaaaagacaacctagagaaaagtgaaatgcctaattacaaatggtgggaaagatatctgcaacacgtgaccaatgaaagattagtatttagaataaaaagagcccttataaatcattaagagaagcataatgtgagcaaacaaatgtggccgagtgacatgaataaatgctcattaccatgaaggattagggaaatggcagtcaaaatctctatatcattttatatccatttggttggcaaaaattaaagtctgacaatatcaagcgttgagggaatgtggatacacagattggtaagagtgaaaattggtacgggcactttcgaaaagcttgcattttaaaattgaacatacatattctttattacccagtaattctgttcctagggatagaagcaagatgaatcattatgcatgtaccacaaaagatagatgcaagaatgttcacaacagcacagcttataaaagcaaaacagagaaagccaaaatacccaccaaccagagtgtggatatgaataaacagtggtttcttgtgtaatacacaatggtgtattacacagcagccaaagcaaatgcataacaggcccatacagtatagaagaatcttaacaatacaatattaagtgaaaaataaaaaccccatgaaattacatacgacacactaccctttttataaacgtaaaaattactttgtaaaaatgtacttttcaggaaatggagtagaattatacaaaaagaaagcaagaaaatgatagtcttcagcatgctgattactttgggtagggagtggcaggcagcagatgggggagtggcatgggcgtgttaccaaggtgctagcttttgttttcagcggtgggggtcttgcatgcttacaacattttttttaaaaataaaacatttaaacgataaaactgctgaaaataagtcatagatcagtaatactcgcgaacaagggattatgattatgccaacttttaaaaagtggcattcccagcttaccttcataaagctgtgcatactgggggaaaccagttgcccgtagccaatcacaagcttccttggcttcaatttctagaacagaacagaagaaagacaaaattagccatgtgtacctcgccatgcttatttttcctgaataagctttcgttttatgatacaagcaaaacatgactgccatagaaaatacagataagcaaacagacatacacgcttaattcgaatggtttacattttgtatgcatcgtttccagttttttcacgtgtacatgaggatgtattttccctttacaaaaaatagaaatggggtcctgagagtaagtttctcattttgtgctgcttctgaagtgctctgattacaaacggttatgaaaataaggcatcatgagaaagttgaagagagatttaataactcatttgaagcctggccggcctattgtactacttttcacttcaacaaaaggccacaaagtacctccaccaccacgctaaaatagaatttatctgagtaaagtcacaggctttctgacacccaggggttgggtgtttcaaaagcccctgaccttgtgttgtttcactgttgcgtgatcaggtactcatcaggtattaatccagtaggagaggcccaggctgtcaaggaacatggagggcacgaagtcagtaaatcccacaatcttggcaggcagaaatggctaataaagcttctacctccctgtggtttcacatcttgtagatagaatcgataaacagaaaggccaagagcaactgacacactgtgttaaaactcactggagcacatatttacaatcccgttaaaactgactcacagaggaggtcctgggaacattagttagtgtctctgcttgcacaaagaatattcctttcaactcttcctcccaccttcctcaggccatgagagtactcagttacacaagtctgttcactcatttataaaggtctcaacattgcataatttatgccagattcaaatcttcattaagcatctctctcaagcaagtgggagactaatagttcatatcagaagtgtaacacatcttatttttgtctagtaactttatgttttcaaagcactttttcacctattatttcctgagttccttggcctttgaagaaaggtaattaagcaaatccaaattcattaaagcaagtgggaatttgatcaatgaacacaggaaagagaaaaaaaataacctgccatctcctgatgagttcttaatacccaaactaaaaacgattatggcagtagcctggaaataaatagcatggcaaagttaacttcatgaatcttttcagtgcagcagtgaaagtagcattattcaacccaagacttaggaccgaaatgggagcgaatgatagtgacatcagtgtggaagaacttcgatgtttacactgaataaaagtgtagaattgtccaaagtcaattatttgagcttacttttttttcgtatgtgtatatccacattttgtctcagcaaggaaataaagatgttttaaataaaattataaaatagacacttcctagaaaactatattgctggaaaaacatatacaagctcaatattttattttaaaaaacaaggaaattagactgggtgtggtggcttgcgcctataatccctgcatttgaaaggctgaggtgggaggatcatttgagcccagaagttgaagaccagcctgggcaacatggcgaaaccctgtctctaccaaagaaaaaaattacaaaaattagtcaggtgtggtggtgtgctcctgtagtcccagctactctggaggctgaggtgggaggattgcttcagcttggaaggctgaggctgcagttaacctcaatggtactaccacacaccagcctgggcaacagagtaagactctgtaaccgctaaaaaaaaaagaggaacttacttttgccctatctgtgtgcctgccccctcccacaaaacatagatatggaaagaaaaaaggctgtttgtctttaaaaatattttaaaaactcatttcatttggctacttagaggttattttcattgaacagactgttagacattgaacaatagattgttaaaaagtaaatgtgcttgctttcttaatatttaacttaataagtggtgagtaaccaaaaattctcagtgcccgcccttttttgacgatagtcagacacggcagtaggtgagcccacatacaaaagccttaattagataccaattcactagccaatcctgccagagcatgctcctgctttactaagagaaatagtttcatgccaagaggcatggaagatgtaagatactagttttttaagcaatctttatattttttatataataactttacaaagtatttatttaaggtcccatgtgatttcagcaacacaaaaatgcatattcctgtcttcttgttctctttctttttttttttttttttttttttgagacagagtcttgctcagtcacctaggctaaagggcagtgttatgatcctagctcactgcagcatcgaccttccgggctcaaatgatcctcccacctccgcctcccaagtagctgagatagaggcaggagccactgtgcctggctgtctctcttattttctaatggccctgtctaacaaataaaatgactccaaatgatcataaactgatcagaaaa

SEQ ID NO: 587406 - DNA, 4001 bp, Homo sapiens
ggactattattttccctcatcccttcagcaaacagaattttggaggaaaaaaaaaatgtaatctgagactcagtattctgccttctcccgagctgcaatgttttttccaaatacatcatcaatgccaccagcctaggctgcattcctctatgtcaccagtaatcgccgaaacaacctctgaatcctgagaatgaatccatttgctcatccatattgggtgtaaaaagactcactcaaaacaagactggggatgggaaaaggtggggagtgggacgaagctttctttaagtgcagattaatgactgcaagcaggggtttccttctgcggtgattagcacacactgggtatttattgaacatcgggaacaggcaacctgctaatcactttacttgcatgagctcatttgatcctcacaacctccccgcgcggaggtaatacagttatcacccctttggtgcagatgaaggaggcacagcgaggtcctgtcactgcccaagttcgcccagctagcaggctgctgaccaggatgagaccccaccagcctgaccccgtgtcccctctcactttcctcgccccaggggctgtgcgctgaaggacgctcgcggacgcagcaaactacacgcagcagggtgctgcagagaggaggggtgcacctccttcggagggatcaaaggctcgccccaggactctggaggtggggacagcgacatggagtgggggcaggcttccaagaagctgtcgccttgttacgaaaatagtcgggtcgggaggcgagcttccttcctctctccggcccaggaactcgctcctcggcctccttgtccgggtcaagggggtgggcatccccaagggggcatttcagggacacgattcagcgacccatctccgggaaaaaaaccaaaactgtgtgtgtgtgtgtgtgtgtgtgtgtgtgtgtgtgtttcctagcaagaagcacgtttgcaagccacggggcttgctaaactaccccaacactctccaggtacctgcggccaccaaaccgagacttccctggccaggtctgagttaattcccagcgcttaaagtatcttacccaaaaatggttgaaaaggaaaacaagtttttggtgaactttcaggcagtgatgaaaaaaaaaaatttccaagcgccactagggtctaaaatgttcccaaacagtaaactctcccggagttcactttgattttggactaagctggtgaatgacaggagatcagtacgagcgcagagcagtccccagaggaaaggaaggtagaaggcggtgtcgccgcgcccctcgagccagagccgcgagcccccgcccggctcaaggaggaaagtgaaccagggcttcccttcacgggttgcgaccgatccggagcccgcctggtgcgctggcccgcggtccccaggcaaaaggtaatcaagagtcactcctccaaaattcaaactccctccccaaactgcgagtcctgctatccccacaccacctccaagaaaatccggagactctgcagaaagcgtttaaagagcacagaacaggcaccgacttgacaaggcggggtgacactttctcgcggcgggtcccctccgcagcccgctcccgcggccagcccgacggcaagacgcaagtctagcttacgtgttaggatcatggtgtccggcttctttctgcacatcaagcacggcaggcggcggcggaagcgctgtggggaagtcgaggcaggcggaggcggctcggcttccgcgtcgggacccacggcggcacccgagacgcgcgccctcgcggtcctcaacgcatccttgctcgccgctccctgcccctcgtcacggccccagaaagaaagcggggttttctaaagatcgaaacgagggagcgctcagggagttgggcgagaagtccgtgagccggcgctcctgatgcggagaggtgcggccatgtcctggctgggagcgaagcgccctcgctcgggcagtcggagcgaactgtctcccgcgcgctccgccagccgggccctcccgctgggcccaccccccgaggggcggggccagagcgggcggcaccgcctcctccccgctgtctgggtcgcaggccttagcgacgggctgttctccggccccgccccattcccaggctccgccccccgcccctcttcctcgtggccgcagcctcaggccgccctctagccccgccccgcccaggccccgcctctcctctgtcccgccccctcggttccctcctcccccccgccccgccccgcgcctcctccgccgaaggctggaatgtttcccccacgggcctccacgttcccagcgggaagcgccgaaaagtcgccaactattggccccgggtgcaaaggcaaaggtcacaaggcatttacttggcggaggtgtccggcctggaccctagtgtgccttgagcgtcccttctttttcttggtagctctgcgtactttttacctgtcttttatcctggcgggaaccacgtaaatttgcgggaacggaggggaagcggagaggaagggatggtcagtgtttccagatctgtaaaaacgagcgaagggtacctgtcccttggacattggttatttattgctaaaacccgcatgggtacggagccaatgtaggtgataaatactgccttagaggaattgagctttcactcggcacgtgctgggggtcacagcccgtgtttctcaaactggcccttgggccacagtccgaatgcagctcctggaactgcccttagctggggtctgactgcataattccaatctttgatgatgagaatctgcaacttttacaagctctcagatgattctgatggcctgtagtttgaggacccctgatgtattaggaagcctaatgtgaagggatcacagctaaatatagttgcattaagagcctttaaaaaatccagaactggattccatgaaaatttacttcggggttaattgatgtttttgcctgctatctctgggcaaggaagactactgaactaaactcattcattcaacaaatacagaaagagcatttactatgtgccaaacacagctgtagactgggagatacagaagtgagcaaaagagacaaatatcccttccctcctggaggttactttctcgtgggaaaaatgcataacaaacaaaataaatgagatatatagagtatgtctgatggagatacataaagcagggaggtaatattggagctggggaagggcacaatttgtttttaaatggggcaaatacaaataggagaatttagtctcttaattatagtttaaaacttattggtttcatagcgatatcttagtttacatacagaagactcttctcccatttccctcataaattttgataaaacaaaaatgctgggtgaatgcagtggctcacacctgtaatcctagcgcttttgggaaccgaggtgggaggattgcttgatcccgggagcttgagaccagggttggcaatatagcaagactccatctgtacaaaaataaataaataaataagctaacttccactactggctccctaatttacccaaagcagaattcagctctaaagggtatgggactcctccgttcaacagatgtttccaggctttttacctactggtaactgctgagggtgcaaaggctacagcctggtgggaggaagcaacagggttgtatgaaaaagcggtgctgtgagggcccaggaaatggagatctgatctggcccaagatgatgcagttgccctcatgagtgtgggagccggaggagctgcccaagagcccaccgtcaccagcaagggggagtgtgattcaacgggaggccaggaaagtaaaagcaagaagtttcagtcccctgcgtgactatgttaaggaaagtccttaggagtgataaacagtgagaagccttttttttttttttttttgagacaaagtctcgctgtgtcgcccaggctggagtgcagtgacacgatctcgggttcacgccattctcctgcctcagcc

SEQ ID NO: 587407 - DNA, 4001 bp, Homo sapiens
ttaggatttttttccccacataattaacattggtgacagttttacctttttttttttttttttttaaattagaggaactgcaaatttctgtctgcaaagcacccttctactggacatgttcatacttcattatgcataattattatgggagggcaggatgatgggataaaaaggtatctgaattatgaatcagggcactgtggttctgctgtcctctcttctattagctagaggtgtgaccttggacaggtcacttttaaatcccatttctcagcttcttgtagacaacctcaagccattgttagaggagaccatctcttatgttctttccttctctgaaattccatttggagattttaattaaatcataatttagataagtcagtattttatcttccacatatataaaaagtagattctttttctcatatttaagaagttttaacacaaattgtcagtgaatagttaaaatttatcaatataagttattctagcataaaatttgagaatagctaatatagcagatggtcaccttgtactatataaaaacttataatgaaaacagttacttcatttcttatgatccaactgtcaaaatagctctccatctttcacttagtatattttgtattcatctaatagatttgaaaatgtacatgaatatttcttccctttatgtaccattttatttctataaaatgatgaattttattataaatattcagaaatataacagtatcttatgcattataagtccacactttttcggtcattactaaacttcttttctaatatattgtacatttaaacatttaagattaccttgaagagactacagtcaggtggaaatgtaattttacgattacataagtaaggacacaaacagtttccatatgactggagtgatttctggctgccttaaaagagttataatgagtgtcagtgtcattgagattgacttcagttattcaaaatattacacaaaatgtgaccggagcaagcagtgaatccaggaaaattaatataaactaaattcgattccgacatttaaatttccaaaactcagattaaatactatttaggacagaaataattcctgaaatttcacgtgtttactttttttttttaaatgaaccttttaagctgtacaggagaagcttgacatatgattgaaactggcttgggtaaaataataagaaattcaatcttcgtagttttaaatgagacacaaaatactctttggagactgattattaagcacaagtcactcgggtgctttctactctccctgttggcaaaggaaggtaggggaggaattcatttacacctcacactgatgtgtgagaaaatgtatttgtttcacgttatgccaagaaataggaaaactgatccgacagctcaattaataaataagttaaacgtaaaaagggataaaaataaaatcttactttatggaggaaaagagttaaatctatatggagcctgttttagaactgacagtttgctaaaacgaattgactcagaattttctacttatcaaacattttccacttctgattttatggctttgctctaaaacctaggaagtcaccaactccgtgcaagatgctaacatttatctcaatctttctgcctcttcaaagaccgcctcaaagcataaagatagtccatagcgtcttacctagacaacgaggagctgaaacgccaaggcatgacactgctcaacactcaggctaggaaagaagtccgtccccgttagtttctccaaaatctaagttcccatttcgtggttgagatcatggctctattctgagcagtttcacgcagtgtgtgagtctaacaaaaacaccctctgcagctggagggagccttagctaaggcaggatcctgtcaaggcattcctagtgacttctgtctactaaattcagactgaggttttgcaaaaggggcctccacaaccaggcccagattgcctggaaagtatttcctgcctctgaggagtgtgcatgctagaaaggctgtacgaagagaggggaggaggggagagcccagccgcctgggcgttttaggagttctgattttacacagaactcaagtgagttttgtcaaagctcttgaggtgattagctgtagagtcataaagtcctagagctttttctatcccacactgcttatgaaaaaagaaagaaagaaagaaagaaaacgtagttttctctctatccacaacctttccactatattaaatgtatatgcacagcttaatcaaaatgcctgtgcttgctctcatttcaaaagatcttttaagagagcaagatgaatttagccttaataccataattcttctaaatggcaaaaccttttttgaacatgacttaaaattggaaatgctgcagcttttcattctgtccctgagaccatctgtaagtaaaatcccaagcatccagttaatagaacgatttcttccagatctctctgatcacaagaatccttcacagaattaaaatagttcgtgttatggcaaatgcagcagcgcattacctctagtcagaatcctccagttacaaaaatccagtgctggagcagaagacaggctccatcttgatcgtattagagtcttgctgacattaaacacttacaactgcttccatctagcatggcagcgttcctgaatcacatctctaaagccgctcatggtatctgcatccttcgtccgtcacaaattttgtgaactatcatctgtttatcttttctgctttcttgtgcctcccttgaatgacttcctcctagctgctccaggttgggaatttggactaccatttggttttgattaaaaccagacaggcaactctggagaatttagggaataagctaatggaaactgcaagtatggctttaattagtgcatcaattaataatagatgttagctcgtcttataataagatatcacaaatacaaacacagaggaagctgaagtcgtttcaggaaaaaagttacaccaattttccttcctttatgacccagaatcctctttagagaatgtggaaggaaagaagagggaggtggttttgggacatccaggctgtggagaggccagtagagcagcttcattgtttataccagggaagcaggaaacagcatctctgactttaattatcttgcttggtggaaatggctcagtcatgtctcccttctactttatttacaatcaatggatttcgctgctatttatgactcaagcatttttttggggggggactgatgatcagattaattattaggtctatctgcttcttgcaaatttctagaagctttcaataataggaagtgcaagaataattccagttggatgtgataaaatgagtaacatataaagaggtaaaagacatcttaaacttgttggccctaagatctatcctgttcttctctgaaattgtaagtagttttcattgttcactgttattctccatccctgtatatcacaagggctatcttgtagtactttttgataatattgggtaggtgataactcaaagatgcacaaggttctaactactatttttttccttattaggtagctaaaatctctcaaagttaatgcaaatcatgaaccatattagacccatgttagatggcaagaatgacttatactgtgcatgagtttgaagatgagaagtagtcaaataaaaacgtttggtcagaagcagctttaaaagtttagatcaaagtcttattgactaaaaacatgagcatttaggtttctttaatttaatcttcaaccataggccaagaaagaagtctgttcttccataaattctttaaaaagtatttatatttatattcaaagtgtttctactgacagtatgcctatttaatctttccaacaattttgcgtgtattcatatgttttattttacaaataaagtattgagaagcaattttctcacagtcaaatgatacaaagtgcccaggtccacactggaactcagatattctagctcca

SEQ ID NO: 587408 - DNA, 4001 bp, Homo sapiens
ccacttctaggagggccctggaggagtcagtttcagagacagaaagcagaatgggggttccagggctggggaggggaaagggactgagtgtttcatggggacagagttttacttgcagaagaggaaaaagttctagagacagaggtgctgacggctatacagcaacatgaatgcatttaatgctgttgaacttacttacaaagggctaagatgaaaaaatgctttctgtccctacaatccagccttcaccaagccacccatgtgacattctgcctccttcgccccccagcctcatccctcgatgctcacttgtgtggctgcagaacaaacaaactctcaaccacggagtccagggtcagaatccaggcaaagctggcctccccagagtgactcctgcactcttgtttcagttctgtgccccctgctccagcctccaggttcttttcactgtgcctgagcccaagcagaaccaccccaggtacctcctgctgccccagagaaggcccctggggcacgtgggcgccgctgctatggagaagaactggaatagacacaactatgacattaacattgtccagagacagtgcaaaggcagctgagctacctccaaagcctcaagaaaacaaacgtcaaatgagtcccgtgcatttggaagcctccccaggcaggctgagtagtgaagattcatcgcgatggagtattgccagactgaggtttaaaaaaacagatgcataattattcaaacatgatagccactgttccttcctaatgagaagtcgaaatactttcactcgtctatttccgagtgaagaaaggctgtgtagaacgtcagttagcaacaaatctaggactcagttgcagtggataatggacggtcatcctttagaactctacccatttccatcatcttatattgaaaagcaaacactttttggctgtagttttctttaacaaaaatcacagctttatacaaagtggactccttcaattttcgatattattctttaggcaaatcaaaccagcaatagatgcactggctaaaagtctgaaatacgtttttaaaaatgtacatttaaatataaattgaacttatgatccgagacccagccctgagtgctgtcactgcagacagctgtcagtggcttgagaaagaggctgacaatcttttaggttagagaataaccacagacagcaacaaacctcttttaggttagagaataaccacagacagagccactgatggggcttccgtcttcagctgtggtttgacgttgattttattcaacagtttgatgtcagatgtattcaacatttcacatctttaacagaagcattgggccttgttcttgtaagcatagctccatgtcaaaagactgatggcaaatatggcaccagctttgctgtgctggtggcagctcagaaatgaaatttccacgtgatttgaaccagcatcggggaaagtgtgtcgtggcagcctctcgcagggcccttggaaggaagcgcacagtcatactcagcatccagaccccagtgtgtggggccagctggagagatgagctgcttcctgccaaggaaggtctacatgaaaaatgcaaatgcgggaacaccctgcttcctgagtttgcttagaatatgtttagacacagaggagcaagggaaggaggggtccttcacctctggagacatgcatcgtttatgtgaacggctgcctcagttcctgagggccaggagcagcccttcctcacctagcacttccgtaatgcttaaaaactattatttttggaaaaaagtgccgcattgtacttagttcttcttagctccctttctaaacatgctaacgtgtgtttgtgggacggtccgcatgatgggaggtgcccggagcatgcccggttctgtccgggccccgccagagcggggctgacgtctgtactctacctagatcctcctctgccggccccggaaagctgatgcccggctggaccaagtctccagcttcttcctctgcaaagacagaaacaaagtcactctttaatgcgtttctggtgtagactgcagtcattccctgcacatcttcaaaaccctccacactcaacagttcaaacatgacagacacctttgtatttcttcaaacgtcaccgctcagagcccagcattttgtgccaataacctcaggaacaaccagtgttttctgtaaagcagcattgtgaccacagatgcacgtatttctcccacctagacacggacataggcagtgagtcccaatgattctcagctttaactctggcctaacttcaaatttattaggccttatttgcattggaacagacttgagtaaaatcagtccactctaattttccccggttccttccagctgggtgagtcccatgagggccctgcatcgcccatgagaaagactttccttccggtctagaaagcttcatgccattcgaagcctcattttgcaatgttcaaagcctgcatttgtgatcttagtgcttaatattagttcatattaggtccactttgaccaaaacgctgatttaatttccctctgttgggagatcacccaggtcactggcattgattttccattgttcgatctgtgctaacacaaaagcagacatcactttcttagaatgacatcagcatgtggctgtaaaaggtcttggggtcactgagcactgtcttccctccatgtgtggggcaacagggaactggggagacagacaagcttgtcacttgatttaactggtccctgaggagctggactgagcatcatcccgtagctctcctcccagtgggctctgcccaggaaaccaggtgccgactctccaggctgccttggtttctaccaggctgcagaggcagtgcagacacagctggatctcagggaggctctgcccaggaaaccaggtgccgactctccaggctgccttggtttctacctggctgcagaggcagtgcagacacagctggatctcagggaggctctgcccaggaaaccaggtgccgactctccaggctgccttggtttctacctggctgcagaggcagtgtagacacagctggatctcagggaggctctgcccgacaccagccacagtgagtggtgtggggagtggcctgaggaggggggcagggagcatcagataagggagaatttggcaccacgttacatgtgcatgtaaacatgttatttatggggtatcagaatgatgacacatgtgcgtacacacatctttgtcaccattttggcatatatgccccaaatataaatatgattgcatgttcagactctaggcatgtattcacacacatatgtgggtttccaatattcatggacaggctttgaggcacatctcacatttgcccccaccccccccacccaagtgttagatgcagttagccaggctgtagtctgcaaacggatttatttcagagtgtgatgctggagccacttacactgcaatcaccatctctgattcaacaaatcggcatctgccattttcaataagttcgtagaggtttgggaaaggaagatgacagatttggaatgtgagatgctgatgaagaggatacggtcgcctctcaggtaaatgtgaactaagagttcatttcatgggatctcccagttacagcttttaaaaaaacacacatgtataagaaatagctatctgaattaagttaagtatcttacaagacagctcaaatgatttaacataaccccatttcttcaaggctaacagcactttttgcatagtttaagctgcgtttttcagctaatgaaatacatctgccaaatgtccacattaagtataacataaaaccacagactggaatggtctcattcatgtagaaatatgatggacagctctaattaactacagtttccatggagaccatcgtcatatgtgtgagtaatgtgagaacagagcgtccagctgtgtgagaaaggaatttggggatgaactaaaacaatgggcccttcaacctcagccctc

SEQ ID NO: 587409 - DNA, 4001 bp, Homo sapiens
ccagactgtggctcccctggacttttagaaatgaagcctccgcaggcagaatggcaacttcggggtggagggcccctggtctagctgtgctcctgtttccagccaaccactacctgcttggtggcagcccctgtatacttgggactttcatacatcgtctctaaacctcacacaaaacgacattctcctcatttagagatgagcaaaaatgaagctgagaggtgaacttgccgaaggccccccaaatagaagccaagccagaatccctaccccggcctgcctgaggccaaagccaagtgctcttttcaatgagtaccaaagatcccagttcaatcaaaatgtgggacttgggggtcccacgtgctaaccttagacagtggagccacccagagtcctgctcgttgatggcatctgtagaagagcagctgggagtgtgggggcctctggctccgggccacacaggcagcagggtccagccaggctggaggccggctggtgcagacagtaagtgaattatgaaacgaggcaagtcatccaagcaggctggcgtcggtgggcagggaactttgccccgcttcgccttctcctgttctgttcacagtgcgactgcctggccctctctccctttcttcctcctgtctttctgctttctcttctggtcccttttcttggctttcttcatcttttctccctccctccctctttccctttcaccctctcccctacccagccccacccccgcagttactgtggcaacaattcaatgccagaaataaaggcagaatccagctaggtcaccagttcccaaaacagcatcctgggtggggaggggcagggagggtggagcagtgcggcgctgcagggcaggggccaggcgctcccatgggtgctgtgcatgcgtgtgatgtgggtggggtagggcaccttgctccccgcacccccccgccactggaaaaggacaccaggaggctgaggcctgctctgggccagtggctcatcagaggtgtcccttacttaggcgaagcctgaactccaagtctgtcctaaggctggcagagcctggggactccctcctcttctcccactttctccctctcccctactccaatgttttttaccgttgtgtctgctgggatgagggttcccctaacccagcactacagggcaccctctcatactcggataaaggaccaggcctgggtgggtggggagcccagagtccccctgctcaaggcctgccctcccttgttctctcaataacaacaaaaccgggcccaggtgccccctcctgcctctctagcccacccagagacgcatctgtgcagccatcttctcctaggtctctctctggtttggtttctatgtgccctctccacccaccctctgaagagaccccgctttctgctttctgcatcctgcagccccctcaggcggactgcttcccctccatttatagctggtcctgttgtacaagtgggactggcagagctgggggagatgcagcctcaattcagctttctggatcccagggcctccctgttccagtcccacaacacccaggagctctaggagagggattctgcagacatccacccacgggtggacaacctcacccaggagtctaacgcctgaccacagagaggccggcagcacggacacaagatggacaggtgggcacaggcagaagcgcccgcgctgaaaccgttgcaggacgcatgcacgcggggagactccgaagccctgtgtgccagctcatgcccccactctcccatcgaggccccctcactgtgacacatggtgctgccaacacccgctcacacccacccaccggtcctctccctggcatccatcccagagtagtgcacgtgtacagcaacatacacagagccctccacttacccagctctggaggccttccctgggctccccattcccacagcccaactgccttccttgtcttggacctgtccctgctcccctgactctcacaaccaggcaactggtccctggaagggacacactgggtgtgtctgcccaagaaagggggctggacctgctaggccctgagggacagagctagggagggggagccccagaaccctgtgggggctgcatgtctgctcagccctggccccttcaagcaccccagcggcgggcacagggggagtactgggcttgggcttgcagctgcgccctgccacagcctcactcttcactcagccccaccccagcctggccagccactggctgggggcaggctctcctcccactccccctaaaaagcaggctccaaacaaacagcctcaggcccctaaatgtactgctccaacccccagagcatgtggagtggttttggggaggccagcgggccagtattcagcagagagggaatgctcccctgcccaccccgtgcccccacagtccatcccttccattgctggcctgctcagctaggtaggccaggcagagatgctggcaaagaggggattgggctgggagcagttctcatccttgggatgagaacaccccaggccctcttccccagatcagaaggttccattagatcaggcccagctggtcccaggggccggcccatcctcccactgaacagggcccacagtgggctccccccagataccctgctgccacccaaagcctggctcgccagcaagcgctgtggcccagagtgcccacagaggggaggagaggcggagaccctgccacctacctcttcccagacagtgtggcccagacgctctgaggccacagaggcccgagaggcgtaggccagatccacgggctgtcacttcccccaggagcctaggtaataggtgtctcttccaggaaccccgcggcgcttccccggagcacaaataacaggaaaaatgccggcttagggtgggtgggcggggtgggagctggcgaaggaggggagctggtctcggctgagcggtctgatctcccctctgggcccccaccctccttgcccccaccctgcttctctgcaacgcacggccgcctggatcccccggtgctggggagtcctcgtctgggggcgggagggcgggcgggctgctggctcccccacgccctccccgcgccctccccacttccagctgatagcgtgtggctggcaagggtgtgtgtgtggatgtgcgcgctcttccaccagcgctgcagctcaatccatttcaaacaagaggagcattaacccagcgtcatgacaaagcagaatcagccagcactgtcctctccctttcccacaccgcagtctgcagcactcacacgcacacacacacccacacgcacccagagcccctcagcctcctcctaaacagccagagttcaagttgctgtgggcggtgggtcgagggagggggctactgatgacccaggcggacaatgcctgctttctccaggcacctgcacctcctaccctattcatgaccaccccaccatctgacagcagcaactgaggcctctggggcccagcctcttgaggtgggggtgcaggcacaggccagaattggttacccaaggatgagctctctcctgggagggtagaatggagggatgcaaccaggtcctcagtactgagacttgagctggcccctcagtaacctgaatcccctgggaactccaatgggatgcagcagagagagagaaggaccccatctctccctagggtggcttcatgaaaaaggagcttcctgcctggtaacccctgggtcccagcacagaatttacaggcatgtgccttccctgtctctagcaaagcctcaaccaccccaggagcctctcattggcctttcgggccccctgggcaggatggggaaggacaacaagccttgccctcgaccctcgccctggccccaatgtcctctccacctccacaccgcagacttgcctacctaggcagccctcaccgttgccctggcaaccctgcccccagccggtcagctgatggtatcagctgttgttggggaaatctagaatctggg

SEQ ID NO: 587410 - DNA, 4001 bp, Homo sapiens
gtctgggggcgggagggcgggcgggctgctggctcccccacgccctccccgcgccctccccacttccagctgatagcgtgtggctggcaagggtgtgtgtgtggatgtgcgcgctcttccaccagcgctgcagctcaatccatttcaaacaagaggagcattaacccagcgtcatgacaaagcagaatcagccagcactgtcctctccctttcccacaccgcagtctgcagcactcacacgcacacacacacccacacgcacccagagcccctcagcctcctcctaaacagccagagttcaagttgctgtgggcggtgggtcgagggagggggctactgatgacccaggcggacaatgcctgctttctccaggcacctgcacctcctaccctattcatgaccaccccaccatctgacagcagcaactgaggcctctggggcccagcctcttgaggtgggggtgcaggcacaggccagaattggttacccaaggatgagctctctcctgggagggtagaatggagggatgcaaccaggtcctcagtactgagacttgagctggcccctcagtaacctgaatcccctgggaactccaatgggatgcagcagagagagagaaggaccccatctctccctagggtggcttcatgaaaaaggagcttcctgcctggtaacccctgggtcccagcacagaatttacaggcatgtgccttccctgtctctagcaaagcctcaaccaccccaggagcctctcattggcctttcgggccccctgggcaggatggggaaggacaacaagccttgccctcgaccctcgccctggccccaatgtcctctccacctccacaccgcagacttgcctacctaggcagccctcaccgttgccctggcaaccctgcccccagccggtcagctgatggtatcagctgttgttggggaaatctagaatctggggagggggctctggggtgtctgaatggagaagcacagggggaggggcttgagggaagaggccaggaggggacagaaagtatctggctggtggggacagagaggacagtaacctgagggatgggctccagagagaagggaggaaggaaggaggcaggtggctgagaagggagacagaacacaggctgagctgctgcagccaggcgggggtggctgtgaaggtagagaaaacctgggggtgggggatgaagcatcagatccatggaactgcagagaaaaaggccaggagagtgatgtgggagggggcataccttcaatgtggcagaaaggggcacagccttggaggaggagccactccagccatcgctccacaaccagcccggcctcagcccagcctctcggctttctgtaccttcaaccccacccttacttccctctaatcagagtctgagagacagaggggaagccccagccccactccagccctagatgatctctctcggtccctccagcggaccaggtacttggggctttgacacctcagccctttagaattcctgatccccgccgcaccccgacctgggttcctcccctgtattgcccctcccccaccaggccccaccccaggagagctgtcttctggtgcaagggtccccagaggtagagttggaatgagctgatgccaggaaggacagctgtggccaggggcctggaacgaggtgggtgatgaggaatgggtagaatcgctgggcctgggaggaggggtgcctcctcctattgaagccagtgcatgtagggcagagtagggggagtcaaggggaaagggcggaggggagaaggaggggagggtgctcggtaccttcaagggcccagggcgtggggcaggagcgcagcagcctcctcggtgacatacacctccatccctcggcgcatctcctctccacctcctgttgccaagacaacctgccggcagctcaggcccggctcagccgcggcagcagggagggggggaggaggaagctgtgcctcccgctgcctcttcctcagagatggagggagggggcctgagggtgggtcctcagtgctggggctgggggttaggggacagcttcaggagctagggtgcccagtgaaccccaccaagtaccccatccccccacttcctttcataaggctctagaattggctttaggggtgaccccaggagaaccctaattcagggctggagagcaggccagtcttgaagagtatgcagcactggggagagtccccactccaggaagcccagtgtggagctcgggacaatgacaggcagcaaggcagggacagtccttgtgctgaagggccagaggggttgctccggcagggttcagaggcccctgggcgctggctgcactgggcacgcggctgcgggccccacacctctgccgtctctgtgagcaccttcacctggtcccaaaccctctctcattccacctgagaaaactcagagcaagggacagctctcttccaattcctcaaggccccattcccactgtcccccaccatgcctgagtctcacattctatcggaatgtccctccatgggtggggcgggcgggccaccttgggcaggaagagtgctcagcccagccaggcctggacccaaggggactgcagagtgagggctccctctgtcgacctgaggagtggtagctgccaaggtcattttgctgccagggatctgggctgtgtgtgtgtgtctgtgtgtgtgtgtgtgtgtgtattggtggtgggcgttcagaggggaggcaaggggacccttctcacccatgccatcctctgaccctacctcgtcactgtccttgtcccatgggaagactcactctgcctccggcctcctccccctgggaaggcctctgacctctcaaggccagctgaactgaactcccccatggcttgtctgagaggggagattctcccccttgaaagctggcaacactgaacaacaggtgcctgttggctcaggccccaggcgggtgggcttcctcagctctgctccatactgagcaggcaggaggcggctgccagggctctcatacctttggaagttcaggagttctcaggaccttgaggatgggcgcttgtgtccacaacacggggccaggattcctgtatctctcaggcaggggggtcccaggccccccgacgccccgttcttggctcctttccccacaaggtcactggtgccagatgtcctgggtggactccggccctgctgcctcctccctcccccaggccctgtcgataggcttctctgtccacgtctggtctgtctcactccagtgccccccggccccaccctacacaccaacctgctgggcgggggagctatctaaacattaacttcgggagaggtggagccagggcacctggacactcagggaggaaggaaagggtgacagagacctgaagaaaaggaaggatgagggccccaaagccaccattctcaccagagattgggagccatgtgcccctgcctccgggcattggactctgctgcccagaccctagagcctccactccttcagcatgctgccaccagaccactgcatctggcccccgcaaagcccctcaccatctcctccctgccacagcataaggaccaaactcttcatcatttgatccaatcacttcctgccacttctctacacaaatttcagctccagccaagtagacggactattccccttccctggagcacacctcccattttgccgccttgattctcgtgcccgtttttcctctcgtcattttccgctctgtgcatattttctccactgaaatcatctgaaatcatgcaaaccccagaccttccacaaagcccccgcaagcaccctggcctgtgctctctcctgccccagaactcacgatgcctgggcacactttgcaggcaaagtgtggaagccgggcagaatctagagtgcagtgctcactagctgtgagaccgtgaatggcctggcatttctgagtgtgaactcatccacatgtgctacatgggaacatctcact

SEQ ID NO: 587411 - DNA, 4001 bp, Homo sapiens
cttcaatgtggcagaaaggggcacagccttggaggaggagccactccagccatcgctccacaaccagcccggcctcagcccagcctctcggctttctgtaccttcaaccccacccttacttccctctaatcagagtctgagagacagaggggaagccccagccccactccagccctagatgatctctctcggtccctccagcggaccaggtacttggggctttgacacctcagccctttagaattcctgatccccgccgcaccccgacctgggttcctcccctgtattgcccctcccccaccaggccccaccccaggagagctgtcttctggtgcaagggtccccagaggtagagttggaatgagctgatgccaggaaggacagctgtggccaggggcctggaacgaggtgggtgatgaggaatgggtagaatcgctgggcctgggaggaggggtgcctcctcctattgaagccagtgcatgtagggcagagtagggggagtcaaggggaaagggcggaggggagaaggaggggagggtgctcggtaccttcaagggcccagggcgtggggcaggagcgcagcagcctcctcggtgacatacacctccatccctcggcgcatctcctctccacctcctgttgccaagacaacctgccggcagctcaggcccggctcagccgcggcagcagggagggggggaggaggaagctgtgcctcccgctgcctcttcctcagagatggagggagggggcctgagggtgggtcctcagtgctggggctgggggttaggggacagcttcaggagctagggtgcccagtgaaccccaccaagtaccccatccccccacttcctttcataaggctctagaattggctttaggggtgaccccaggagaaccctaattcagggctggagagcaggccagtcttgaagagtatgcagcactggggagagtccccactccaggaagcccagtgtggagctcgggacaatgacaggcagcaaggcagggacagtccttgtgctgaagggccagaggggttgctccggcagggttcagaggcccctgggcgctggctgcactgggcacgcggctgcgggccccacacctctgccgtctctgtgagcaccttcacctggtcccaaaccctctctcattccacctgagaaaactcagagcaagggacagctctcttccaattcctcaaggccccattcccactgtcccccaccatgcctgagtctcacattctatcggaatgtccctccatgggtggggcgggcgggccaccttgggcaggaagagtgctcagcccagccaggcctggacccaaggggactgcagagtgagggctccctctgtcgacctgaggagtggtagctgccaaggtcattttgctgccagggatctgggctgtgtgtgtgtgtctgtgtgtgtgtgtgtgtgtgtattggtggtgggcgttcagaggggaggcaaggggacccttctcacccatgccatcctctgaccctacctcgtcactgtccttgtcccatgggaagactcactctgcctccggcctcctccccctgggaaggcctctgacctctcaaggccagctgaactgaactcccccatggcttgtctgagaggggagattctcccccttgaaagctggcaacactgaacaacaggtgcctgttggctcaggccccaggcgggtgggcttcctcagctctgctccatactgagcaggcaggaggcggctgccagggctctcatacctttggaagttcaggagttctcaggaccttgaggatgggcgcttgtgtccacaacacggggccaggattcctgtatctctcaggcaggggggtcccaggccccccgacgccccgttcttggctcctttccccacaaggtcactggtgccagatgtcctgggtggactccggccctgctgcctcctccctcccccaggccctgtcgataggcttctctgtccacgtctggtctgtctcactccagtgccccccggccccaccctacacaccaacctgctgggcgggggagctatctaaacattaacttcgggagaggtggagccagggcacctggacactcagggaggaaggaaagggtgacagagacctgaagaaaaggaaggatgagggccccaaagccaccattctcaccagagattgggagccatgtgcccctgcctccgggcattggactctgctgcccagaccctagagcctccactccttcagcatgctgccaccagaccactgcatctggcccccgcaaagcccctcaccatctcctccctgccacagcataaggaccaaactcttcatcatttgatccaatcacttcctgccacttctctacacaaatttcagctccagccaagtagacggactattccccttccctggagcacacctcccattttgccgccttgattctcgtgcccgtttttcctctcgtcattttccgctctgtgcatattttctccactgaaatcatctgaaatcatgcaaaccccagaccttccacaaagcccccgcaagcaccctggcctgtgctctctcctgccccagaactcacgatgcctgggcacactttgcaggcaaagtgtggaagccgggcagaatctagagtgcagtgctcactagctgtgagaccgtgaatggcctggcatttctgagtgtgaactcatccacatgtgctacatgggaacatctcactgccctaaagaaggattgcaagcaagtatgccctgagtgtggcctagcacatctcctgagctcggtacatattagtttccttattcccaataattcttatctcccctttccctctttggggacgtacgaaaaaaaaaaggttgctttgttatgtcatgtgtaagagagggttttccaaaagtcccaccaaagaacaaataattgcctttttatgggtttatccctccaattaaatttcaagtgccttgagagctctatcttgtccatgttttttattaacagaaggattagcacaggacttgaatgttgtggggggaaaataaacactgggactaactgcttaagcccccgccccacccacgtctgcctaaagaaggaaggagaaggcaggattctggcctctctcctgcctctgcctagagggatggtggggtgttgggccaatgacttctttctagggcttcaagtggtttatttcctcaataaacatttaccctgtgcaacatactgtgctgggcactgtcggggaggaaaagatggactatttctacatctggggcacttgctatttagcggaatcatgacaagcacatacatcatgacagttctggacaagctgtgacatgtaccacaaggcaagggcaagtgaatggctggcaagaccagtggcagtggagacagtcgctcatcccggggtagtgccaagagcctatggagcagaggaggagcctgcggtctgggtgtgtgtgtgtgtgctagagcaggacacgccaggtggcggggacccttcaaatgagaatggggacatgcttgcttgatagagttccagttttccagtattcttaaaggggagttgtggggctagggccgaatagggagactggacagggctggacaggagtcttaaagatgacgctaaggagtttggccgggatagtgtggcgtgggtagagctgtggttgatggtagggaaggtaagtggagcaaactcggatgtactggactggagggcagtgttgagaggcacagagatgatgtagggagcgagtggatatttagatagatcccagtgaggtctggccacggtgcagagccccagggtttggcagagagcagtcacgcgcaaggaggcggtggctgagatgctgaggttgctcagaggggcagctggcagacagagagcagagcgggagggaatcttgggtgagggtcctctgtgaggagctgggaaagagaagccaggcaggacagctgagggcaggc

SEQ ID NO: 587412 - DNA, 4001 bp, Homo sapiens
acacccggctaattcaaaacaaattttttttttttttgtaaagatggggtctccctatgttgcccaacctggtgtcgaattcctgggctcaagtgatcctcccacctctgcctcccaaaatgttgggatcataggtgtgagcccctgcccagcccatctttgtttcaatttaacccttacattccaatcttgtgggttggcttggattggcgagtacctcgtttgcacatgaagaagttgagacttgaacaagttaagtagttggtcaaggacacagtattgtgtggaatctaagctcaggtctgtctgatttctaaaaccattcaccaggatactacccaggcaaagctggtgtgagtcactaagcctctggcctctcacctctgctctgtctccagtcccttcctgcccacaaccccactgctgggtcttgcgctttagcatctgggtctgcttcctggggtcagccagggccctgcaccctggtgccaccccctgccatttgttagagagcatgttggttgataaattatttccacagaggcagaaattttgtcttaccccttgtggggcatttgcacgtaaacgtgggcctagccttaaggcataatgtttgtactggttaaattttaagctgtcagaaggccagccgggaaaatgggggtggagaagagtgtgtgtatatgtgtgtgtgcgtgcgcatgtgtgagggggagagagagagagagagagcgagacagaaagagagaaagagagagagagtttccttggcttctctcaaatcacaccctgcctactccacccacaagtagccctttccatcaaagctcatttctcgcaggtcaagtgccagctcactccacctcctcccatccagacccctctcccatccatgcaccccgcctgtctgtgcctgcatccccaaggtcccagcgacctccgtgcacaaagagatagaaagggcgagctgcagcaggaagaggggagggagggaggaagagagagcaccacagaggaaggcaggtccaggtgacggaagggacagctcagctgcccctggccctggtcggacgccagccagccgctcgccctccatctcagccccaccctcccccagctgtgtgtccctgccttatctgagccaccagcccagccccacctcacccaccaccctctcctctccacagctccccaggatgtgggtgataagacccgcccactgggccctccgagtttgtgcccactcatcctggcgcgctcttcttccaggcagaaactgatccagactgtggctcccctggacttttagaaatgaagcctccgcaggcagaatggcaacttcggggtggagggcccctggtctagctgtgctcctgtttccagccaaccactacctgcttggtggcagcccctgtatacttgggactttcatacatcgtctctaaacctcacacaaaacgacattctcctcatttagagatgagcaaaaatgaagctgagaggtgaacttgccgaaggccccccaaatagaagccaagccagaatccctaccccggcctgcctgaggccaaagccaagtgctcttttcaatgagtaccaaagatcccagttcaatcaaaatgtgggacttgggggtcccacgtgctaaccttagacagtggagccacccagagtcctgctcgttgatggcatctgtagaagagcagctgggagtgtgggggcctctggctccgggccacacaggcagcagggtccagccaggctggaggccggctggtgcagacagtaagtgaattatgaaacgaggcaagtcatccaagcaggctggcgtcggtgggcagggaactttgccccgcttcgccttctcctgttctgttcacagtgcgactgcctggccctctctccctttcttcctcctgtctttctgctttctcttctggtcccttttcttggctttcttcatcttttctccctccctccctctttccctttcaccctctcccctacccagccccacccccgcagttactgtggcaacaattcaatgccagaaataaaggcagaatccagctaggtcaccagttcccaaaacagcatcctgggtggggaggggcagggagggtggagcagtgcggcgctgcagggcaggggccaggcgctcccatgggtgctgtgcatgcgtgtgatgtgggtggggtagggcaccttgctccccgcacccccccgccactggaaaaggacaccaggaggctgaggcctgctctgggccagtggctcatcagaggtgtcccttacttaggcgaagcctgaactccaagtctgtcctaaggctggcagagcctggggactccctcctcttctcccactttctccctctcccctactccaatgttttttaccgttgtgtctgctgggatgagggttcccctaacccagcactacagggcaccctctcatactcggataaaggaccaggcctgggtgggtggggagcccagagtccccctgctcaaggcctgccctcccttgttctctcaataacaacaaaaccgggcccaggtgccccctcctgcctctctagcccacccagagacgcatctgtgcagccatcttctcctaggtctctctctggtttggtttctatgtgccctctccacccaccctctgaagagaccccgctttctgctttctgcatcctgcagccccctcaggcggactgcttcccctccatttatagctggtcctgttgtacaagtgggactggcagagctgggggagatgcagcctcaattcagctttctggatcccagggcctccctgttccagtcccacaacacccaggagctctaggagagggattctgcagacatccacccacgggtggacaacctcacccaggagtctaacgcctgaccacagagaggccggcagcacggacacaagatggacaggtgggcacaggcagaagcgcccgcgctgaaaccgttgcaggacgcatgcacgcggggagactccgaagccctgtgtgccagctcatgcccccactctcccatcgaggccccctcactgtgacacatggtgctgccaacacccgctcacacccacccaccggtcctctccctggcatccatcccagagtagtgcacgtgtacagcaacatacacagagccctccacttacccagctctggaggccttccctgggctccccattcccacagcccaactgccttccttgtcttggacctgtccctgctcccctgactctcacaaccaggcaactggtccctggaagggacacactgggtgtgtctgcccaagaaagggggctggacctgctaggccctgagggacagagctagggagggggagccccagaaccctgtgggggctgcatgtctgctcagccctggccccttcaagcaccccagcggcgggcacagggggagtactgggcttgggcttgcagctgcgccctgccacagcctcactcttcactcagccccaccccagcctggccagccactggctgggggcaggctctcctcccactccccctaaaaagcaggctccaaacaaacagcctcaggcccctaaatgtactgctccaacccccagagcatgtggagtggttttggggaggccagcgggccagtattcagcagagagggaatgctcccctgcccaccccgtgcccccacagtccatcccttccattgctggcctgctcagctaggtaggccaggcagagatgctggcaaagaggggattgggctgggagcagttctcatccttgggatgagaacaccccaggccctcttccccagatcagaaggttccattagatcaggcccagctggtcccaggggccggcccatcctcccactgaacagggcccacagtgggctccccccagataccctgctgccacccaaagcctggctcgccagcaagcgctgtggcccagagtgcccacagaggggaggagaggcggagaccctg

SEQ ID NO: 587413 - DNA, 4001 bp, Homo sapiens
ataaagtaaaaatctggtaaattgtatacatgtttttttaagaaaaaaaggattacttctaatcagccctcaatttacagtagctagtcaatttccctggttttattttcactgttatctcagtgttttgaatggggtcttcagtgctttttcttgtcattgaccaaagcttatcttgtatggaggtgcagaggctaggagaatatctgcttttaccaataaccacaccaaggtgataaatgagatttcctccttttagaatattctaacttagaaaatcaaagagttagttcaaatatgaaccaatacattcattcattgtggggcagagtgtattggagaggccaccaggctaagagtgagggggcttaaactttagtccccagcactaactagcttgatacccttagctgagacacttctctgtgtggtttctcctggaaacgaagctgtggaatggatgatcttctagttcccctccgactctaaaattctgcagtatgcgacaggctgcagcagcatgtgactaacacaaggatcagggaacgttacagtcaacaaatgcaaatggagatgagttaggacattctgtgttttgtgggtattatctgaggttcagcttaaacttagttttcaatggctatcaatgaaggaagcctaaaaactgggccaatgagattttaatgttcaagtcttaagtggttatgattagatcataacctaattgtgaaaatcacagtgacttctgtacagaagttgaatgtgtgctatgaagtttatgtgcaagtatattttgcttttatctggatctctcagttttacatgctttggggactattactactttcatagagtgtgagagtattgaccttactgctgtgatatatttattcgtgatgtgttggaggccaaggagagttagagttgtgtcctgtggatagagaatccatctcctcctcttcttgtcgatggctgttggggtcccctgtgggtaactgacctacctgtcagaacatggactcttactcccactgagggagcatcgccatcaactctgaccttgcaggcagagctcagcgtgcctgcctgagctgtcctgtgctccaactccggggtcgcagtgtgctaagacccaagggagtccacatggggatgagtcagggcctggcgctggccccatgctccgccccactggtaaacagaacagttctttgccgtcactcagagcctctcagggccccaagactccaggaagaaacaagtattgtagaagccaaaaccccaaggcaaggtaaagaaaacagaactgtccgcatccccagcaatgatttcactggcaggagttgctgggggcggggtggggggtccggtatatgttccagcagagctgttttacttacttctcaaccaaaaggcccttctcttttactctttataggggtatccttttgcctttcaagatttgaactttcaaaacttgaccttagagtcagtcttgcttgctaacccataatacaactttgcaccttttattacttttgtttgtttttgtactggcttctattaaaatacttccttagttaacttatttttgtttactctaccctgtcatccggggaggagctattgaaagaaaaaaacctctaaatagaaatatatcaccagcagcacaagtggactacagcctcggaaatgtcctcaccgtccggcttcatggcaagcagcctggctgttggcaagatgcgcccagctctgcttctgctcgtgtggaaccttacattaccctaacgcagctggggcacaagccgtctgtgcttatactattcttcttaagcttggagacacactcaccttgagatctctcctctttttcatctagacactggcaagtcctgttctgagcttagcaatgccaagtacctgaactggaggcatggctggctgatcccttctagctccctccagtagtgtcccaccttggctatatcagtaactgcgcctcctgttatttctccttcccagttgtcaaggtcaaacctgggctggatattgtgatgtcacagagtggaatcctcactcctccagatggtccagctgaggccctcttggacaacacttcctctcctgcccatggtgggaggttgggaaggacattcccccatttccatttgctctgccattcaaaaccttgtgagggccctcagggaagaatccctttgcaggtcataaactgacctgcagaattatgggatcttaactgtggggagagacctagaagaccggctagtgaccagattctcatctaactcctttttttttgcagatgaggaaactgaggccccacgtggtgaagacaatttttacccgaatccacccacaacaagagaccatttggataatgtacattatgggaagagaacagagtctcagtgaagatcatgtttccccagcaacacaggtgccaggagtagctggctctggtcccagcccagactcagaaatcctgagccaccagaccatttctagattaacaagtaaggtgacttctgagcaactaatgttttcattgagatttgatgataagcagcaaagctcaaatgaaagtccagagttagtgttggcagggcgagatggctcatgcctgtaatcccagcactttgggaggctgaggtgggaggatcacttgagcccaggagtttgagaccagcccgagctatatagtgagaccctatctctacaaaaaatacaaaaattagctgggcgtagttgtgcgtgcctgtagttctaactactcaggaggctgacaggggatgatcgcttaaacccaagatatcgaagctgcaatgagttgagattgcaccactgcactccagcctggacggcagaatgaaaccttgtctaaaacacacacacacacacacacacacacacacacacacacacacacacacacacacacacagagtattgattacagcgctataccaggttctagtgttgagtaagggacagggaggagcaatctgtaaagaaatagagtctcactggaatttcattcttcattatttcatacccttcactttttctagacgctaaccccatatgatactaaaaagtatctgtattgcatcagacgacgtatctgtgaagtcagagaattgtgctttaagaatctctcaagaggagaacatatattgggctttcataataccaataacattttacatcatgcttcatttacaagctattttcacacatatcactctatttaatcttcacaacttggtgagataaacaaagtattattttcagtataattttctggatgagaaaattatagcttagagaagttgtgtcttgcacgagatcacaaagctaattaagtggaaaggttacttaacattaactacaaaccagatcttccaccaagccttttccccaccacagggctttgctggttggggagaaattgtcatttggtcccagaacacacttgaaggccactgccttaagcaaccctttgagtaacaaggaagaaagtattcccgtaggtcataaatactgctttactaacttcctaaatgtcttcataaaatcttagggaaatggttaatggacactaattttaaactttaaaataatataattattgccctttcttccaacaattccacatctgtgaattctcctaagagaaccattatggatatgaaaaatatttagctacaagaggttttttgaagcactgtttataacagaaaacaaatataaagctcagcattggaaaagtggtaaaatggattatgctgaactcatgaaaataatgtcagggtttcccacactttgattattcatgtggcatcttcagaatattgccatctgcactaatatttacttaacattttcctttaaattaattcatacattttactggaataaaattatttaaaggtattttttattattaacataagtagaaatacagtattaattgccttaaa

SEQ ID NO: 587414 - DNA, 4001 bp, Homo sapiens
tgaatagttttgaaaagagcttttaatcctgataaaattagagttgataacatttctgtagtgattgggcattgtaaatatgctttcatctaggggccaggtgaggtggctcatgactgtaatcccaacactttgggaggccgaggcaggcggatcacctgaggtcaggagtttgagaccagcctggcccagatggcgaaacctggtttctactaaaaatacaaaaattagtcaggtgtagtgatgcaagcccgtaatcccagctactcggggaggggggctgagacaggagaattgctggaacctagaggtggagcttgcagtgagccgagattgcgccactgcactccggcctgggcgacagagtgagactccctcgtcagtccgtctcaaaaacaaacaaaccaaaaaaaaaaaaaaaaagagccctgaggcagaagcaacatctctacccatttctgagatgcagctaagggagagactaagattctaaaagcaacttaagagcaaaaaagaaaatgtcttttgaattgagggaaaacaaaaaataataaatatataaaggatcacaacctaagaataatatagtaaatatgagactgttaaaaaacaaaacaaacaacaacaaaaaaccctgactcctggctacagagttgaaaagcccctagacacgttgagtagctcttaattgagactgcacttcattaaccagtgaggtgaggaaaaacaggacctcagtaagggagtaaagtcaaagactaaattacaaacaggccaaatgaatggatctgagaggaagtgataaaattcgcaacacactcagccgtgtttattgtagggaatcaccccaggtctaactgccattgtaatcaccccgttcagggcagaagtcttcccacaggccctcaataacttcaatccttgataaaaagccaaaggagcctgactttccacctgggtcaaaatccccgcacatctattgtttcggagccaaagcaccaccaccagcaacccctgcgcacaacccggggctctccagcaccgctgttctgaatgccaagtgcccagcacggggtctggcacagtttccttaataaaatgtcctcttctcgtctccaggatgaaactcaggatccggaaggcagccttacaccctctccagacaggctccgttaggggatgagtgcgcacaaacagccccaggggccagccacccccttcccgtgccacaacttcctgtcccttccatcacttccacgccacgactctagtttccatccagctcacaactgtcatcaagatcccagtctctggaggaaagggggcagggcggctttccaccctcaactcctcacttaaggggcgtctgagaagaacctacgaaagcggggggcagaaagcactgggacaatgagcaccagtccatgtgccgacccgggctggtcacctactcccaggtgaaacccacgctgggcgcaccggggcgagccacagagctgcggccccaaaagagcagcaggcgcgcccccctcgcgttgacatttccctggtgtgaagtgccggagattgggatgcaagagcgggattacggtcccgaagctcagctgcacttggaagcactcggagtccccaaaccctgggcgacttccccatcggcgctccctggagaggactcctaccgtccccggctcccagagctgcgcagccgggccgagcccccggccagggtcctccgccgggctctgcgcaaacctggcagggccgctgtccgcgaacttggccgcgtgggtcgggccgggacaaggtggggcgcgcactcaccaaccccgtacttctgcctcttggtcgggatccagcgggccatggcggcgacctcgccccgcggcggcggcgactaaggctgctacagctcctcgggctccggccgccgccgccccgcgctcctgcgtgccccagacgcttccgccatgttccgccaaacttcgctggactccgcgggccgcctcctcgccgcgccgcccgcgcccgtgcccgtgcccgcgccgcccgcggtcacctgctgggccgggctgcagcgcagcagtgcgcgcccctcctggcgccgccccagtccctcccgccggccgcaccctccgcccgccggggccgcctccgagccgcgggcgcccggcctctcccgcccgcgccgctctctgcgctctgccgggcgggggccgactgcggctccgcctcgcgcgcttccctggagcggcttcctgggccggcgggactttgacgctggcggcactttgcctttctcccgccctccccacccggctgataccccggaggctgggtcccgggggtccggctcccgacagagggctgcgctggaggagccgggcacgcccaggccgggcggccggtgggcgagggatgcgggctgcgctcccacggcgcgcgccggacacttggggagcggaaacggatcagcgagagcggcttcttgctcggggcacctccggtgcctggcactaagcgggcgcgcaataaatatttgttgaatgaatgagcagttgacttctgccttcaccccctggagcttgaacccgcgccgcgagcgggagaagccggactcagggcagactgaatctcccggggccaccgcttagagcctggaaagcagaacttttatcaccggagagctggtgcaagggaggtgggctcctcagaagtatcagaccgtttgctaggggatcctctgcagggaaattgtttagaaagccctaatttggaagtcctgtatccccaaactccggggaccccccaaccttaagctgaagaaacttagaccctcatgcccagacctccctttcccaaccagccagcagcccagagagcattcccgtggagaaagggccaaggcgcatccccgtcttttctccgtcaacgactgccttttcttgacgaagatcccaaaggggctgcgcatttgaaccgccttgggctccaggtggcgccctctctggagctcccctcttggaattcatttcttcctggagagacttggagaatgaagatccaggggtttctccctaccttgtaccgagaagtaacattgcaagtagagtaaatgaccagcttaattacgttcaccttcgaagaagattcctctagagagaaattatatcctccttgcagcctgtgaaggttttcatgcgttttaggaatataaaagaaaggaagacaaacatgtagtaaagatagtaaagacaggtagttggccaggcgtggtggctcatgcctgtaatctcagcactttgggaggccgaggcgggtggatcacctgaggtcacgagttccagaccagcctggccaacatggtgaaaccccttctctactaaaatacaaaagttagccagacgtgctggtgtgctcatgtaatcccagctacccaggaggctgaggcaggagaatcgctggaacccgggaggcagaggctataagtgagccgagatcgcgccactgcactccagcctgggcaacagggcaaaactccgtctaaaaaaaaaaaaaaaaaaaaaagacagtaaagatagataggcaaacaaggtaacaagatagtaaagtttcattggagaattagtgcattttaactttggtggttttttaccaaacgaggtctgaaattttttttaagtcctattcacggtgggtaactactagagctggctttttttttctccatcaaccaataggtatttattcacaatgtttaacaataatttaagaaattcctctgtcactttagacttgacatccagaaagaattccaccatcttccctaaaataatttatcttcctccattagtatatcatgattctaatttcccaggttaggtaatttcttcttccttcttcacacacatattaaatgcctacacgttaagtgccaggcatcactctaagaatgagggtgcagcggtgaatacagtagaatgtgtcccttcacagagcttcta

SEQ ID NO: 587415 - DNA, 4001 bp, Homo sapiens
agggagagactcaaggcagggtaggctccctacgttgggctgcacccggaagcgagaaggagaggctgataacggggctggcccaggctggggataaccacaaggcaggaagactcggggccagcagctagccagcccacacctcctctccacctcaccctggggagagcccccaggggagagcagggcagcccccgccccctcacctgtgactgcgctgctgtacaattcattttcctccatgcagggccggctctgctttccctctggccccgagagctccttcctctgcccctagggaggaggcgccccgtctcatcaccttccccgatccccaggcccccctctggcccaggccttctttcaggccacctcaacctgctggctctgtctgcacactgggttcgggtccccccacatggaggaagcaccccatcaccctgaccttgacacctgtaacacttgcccacaggaagtatctaacaccctcggcctgcacgcccccttgccctttccgcaccccgcgcgactcacggggaaggccaggaggcagatggcctgcacccagtcgccgcgctccgctgcaggggccgccaggaggtacaggcgctccttggtctccaggaagaaggcactggtgtcccgggggctgctggcctctccgccggcctcggccacccgcaggcagtcactgaggcggatgaccttccgggcagcctcacaccgacgaggcttctccgggccctcctgcagctccagccgggccaaggcgcagtccgaccctccatacagtgaggcgccgaagcggcgccatttctgtgccagaggcgtgggaggcgggggcgggagggagccacccagagacggggagatcgtgagccaaggggagaagaggaaccgtgggagggggactggggcagccacttggagatggggagagagaggtgaagatcacatgagacccagggaggcagagaagaggacagtgactgcaggaattagaaaatcggagatcagccgccagccccgagaaggaggcccacgagcaagagcagagactgcccaggcagaaagcaacgccgggatgagcccaaagcaggctgcaagaaggccaaacaggcccaccgcagtggactccagtctggggaggaaagcggggcagtggccgaggcccagaggagggagtgaggagggcggcgtgtgacccgggctggagacctcattctccttctgtgcgaaatcctgaaggagaacttctctccaccctcctgaaccttgctgcctcattccttgataggttgggccatgagagagagacaggtgtgccccccagtgttggttaggggacgaggacttcctggttcaaggaggccagggaaggggaaagaggatggacagccggctggggtccaggcccccagaggccccagcccaagctgaacaccagccacatgcaccccactggggttgggaaggaacctctattgtcatcctaaactgtccctccagctgccccttccattcccttccaaggtgtccggtgaaaagaagtcaacatagagcaagagagcaaaagaggcaagagatgaaagcagcacatcccccacccccacccagggcaaacagccctcagtaaggagcacagtttgggacctggttggggcctggttcaggagacagcgtcgggtaggaaaagagccctcccaaagttgagctctgggtctaacttggtgggtgcacagtcagacctataagggttttgaatatgaaactccctctccaacccaggaattctagcagcctcccaggccccctgcccaaccccagcccagcctcactcctacctttccaaacgtctgctgctgctgaagatacaagaagccttgtttcactgccccgtctcccatcctctgaccatctcggagccccaggcttcagctctctccttcactcctgcccttgcctctctcttcttagccgtgtgtttcccttctctgaagttcatttcctctctgcctagggttttctatactattctagtctgctcgatgacgacaggctgataggccctgcggtttcttctgagtgtgtgttcttttttttcttttttttttttttttctgagtgagttttatactcaagcttcctgcatttccagtgagttagagacaatttccaaaaagctaaatgccagctcttcagtgagcaacaattcaggtacagaagttggcacagggaggcgccagcaaagagtggctggcccactggaacagagacccagaaaccaaactagacagtgaaatcagtagtgaaggcccccccctccaagctgtacgcaagttggaagggacaaaccactaagttacaaataaggaaacaggcttggaaagtctgagggatttattcaaggtcaccaaaccagaacccaggtctctcaacgcttaacagctgaatgacacacacggcactgcacagagagacacataagacagctcatgtgggcctaaccagataccagtttcacaaacacacacacacagagagagagagagagagagaggcaaccgtttaactacatgcgagcactccctgtctgccaacaacacacactcacaccaaccctgtaaagattctagaaagatgatcatcccctctggagaagggactgactccccaagtacatctcaactgttggatttttgccttcttgcaagcattcctgagcattagaaagatgcttaggtttcatctgcaaattatcttaagtttcaatagcaatcactttcatatacattttgaaaatggttcagagttaccgaaagtgcttcgtagctcgcaaagcttctaggcacacacttttcatcagccacgccatcctttgacaaaggcagggcaggtatgaacacacttatttgcaacttgcctgaggtcacagaggtagttgggggcagaggaagaagtagagaccagggctcctgatctttaattcaacattttgcagggcccctaaatggaatccagatccatgcaaaaagatccattgctgtggggaaatccaagctgctcagagaagtttaacttaaagccagatggtttagagaagcaatctgtatggaggcacagtgcagaagggttggaaaaaactgagactcagaccaacactcttggggttaatcccataacaggtgcttatataaacaggcccatttcctctacaacaggggttcagttaccgtggcaaggagcgagcagcaccgtgcacagcttaggccttctgctgtacatgccatggactggaccaaataagcttgaaaaaaatgaatgtcatgagctctgtgaggacaaggatgagtcacttcaaactcactgccctcagccgtgatgcctgggtttgaagaggttgatccaaagctcaagggagaaccaagcatactgttttgggaaaagcacaccttgggaagtggttaggggtatggaaatgggatgtgacctaatcttcctctttagtccctaaggagagtcaactctgcctgggagctgcatggtctttggtgcagggagtgagaagaggagggctttatggccatcttaggggctgccagagcagtgccttccaaactgtaacatgtagatcttgttcaaagtagactccaataaagtaggtctggaatgagccctgagatgctgccggtggtgggtgggtcaaagcacactgagtagcaaggtgacagaggatgtcccctgctaacctgatcgccttccctgaaggcaaaatggacacattccactcagaaccacaggggggcacccaagtttaccagattacttgaaagttgtttaaacccggaggcctgaaccccaggcaatccagacactcccttgtcatcccttgcttatggaagctggaggagttctccggtagccgttgactgcagaagatagggcagcagagtatataccaagagcaacacccttgcagtccttctaggccccttcaactg

SEQ ID NO: 587416 - DNA, 4001 bp, Homo sapiens
tggcctcccaaagtgctgggactacaggcatgagccatcatgccccgcccatttatcattttacatcacgtaagtaaaatttacaaaacggtacaatcttttaatattggctccacagatctatttaagtacaaccatagtctaaaataatttttcattttgcatgatgtattaaagactttcagtattgtagtactgattttttaatgcagtcttaacttttttaatgctttaagttaagcatgaatgtactcataggaacctacaagctagtatatcaacctacccccataaatttgcaattagaaaagaaaaatacatcaagaaatatttcaaatgatgatatactgtaaccacagacagaaccaagtaaacaaatggaattacattctttctcaccaacgacaaatagctttgtttttgaagctgtttttagttagaatgtcttaaattcagaccagctttaacactctgaaaactcaatggaaacaaatatgaaccaagcctgcatagggacaggtcagcaagtcacacatcagtaaacacttcttatgcttaatttttaaaaattgctttccgctgaatcctttaaactccttccttgcactcttgattcagaaaggcttgagtcggctggacccgtggctcacgcctgtaatcccagcactctgggaggccgaggtgggcggatcacctgaggtcagaagttcaagaccagcctgaccaacatggagaaaccccgtctctactcaaaatataacattaaccgggcgtgatggcgcatgcctgtaatcccagctactagggaggctgaggcaggagaatcgcttgaatccaggaagcggaggttgcggtgaaccgagatcgcgcctttgcactctagactgggcaacaagaacgaaactccgtttcaaaaaaaaaaaaggcaggggggcttgagtctaaattagatcgatttactatcacatccacagctccactcataaggtaaaaagttgtgttttccaccagaatgcaaaaatctaattgcttctcacttcctgaaactagtaggggttatcatgaagttactatgccatgagtattccttgtattgtttatcactaaccgataagtttcatctaacttcccatttttgtctcatacttatcattttctataaataaaatactgctgaatgaattacttatcttagcattgatcctgaaggcggcatggaaacctttctccagctcacccactttgaccctcaaaggcctcctggcctcatcatctcccaaaactataataattagatggctctgctctttaccattttcccctgaacctaagtgaacttggctttcttcagtttctgcgtgttcgcccattcccaattaatcttgccacgtttatcccaaatccctgcctctttatccccgtggtgaatgttccctcgccccctgtgcctctgggtttgtcaatatccacagccctttaaaaatcgcattccaaatatgcactgagtacctaaacctgatcttcgaaaccaaactgcgcctcccacttcaccaagaatctgatcaggaccctccctctttcccaaccactcccggcacagctttctctcttgctacggattcccaactttcagctccacctttgcttcccaattcggccgacaaaacttcgggccatttgctccgctctcctgaatttctccgcagtcctctcctgggcgccgcgctccttcccgccctgcccgcgcggccgccaccgcgaccgcggccaccagcagctccaacccagacctccagcgcccccgcccctccttcccgagaccactggcagccgttggcgcgctggaccccgcggcaatcaccttcttcctccgccatcgtttctgcgaaggctagggcgccctgcggctcccgcgcggcccagactctccctccctccgcgtcgccgaacccctcggcctccgggggcccgctcctggccgccgcgcccccacttcctgacccacccccctccggtgtcgccgccaaccgcgtccccgcaggcggcccgggaaccagagtgttgggagaggggagcggccggagcgtttcgctggggcgccggggcctgcgcgggcaggaaggagactccacgccgggagtgcagcccacagctgtagctcctggccgccgcctgccctggaaagcgagactggtgggtctcgctgcagccccgcccctcgtcctactcttcccaaaaagtgagggcatgctttccgccacttttgtgactccgcgacttagcgagtcagagacgatcatcagcgacacctcccaggtccagcctccattcccgccccattttacatggaggaaactcagatctaatgtggtggaagtcacaaagccggtcagaggcagaagtggaacccggtgctccagaactgccatcgctgcctgcgttctcgctgggatttcagagtgcagcagcaaaacgttctcagttggcgctttggtttcgtaggccacttgaccattacaagaaagaagcttgtgcttggaacttgttttaaatcaccaaaactggtttagcaaatatgttgcatttcatgatattctgggggggggggcggggagataatacaatggtctggggtagagcagtgtgcaattagatattacagagcaatagggaataattttaatttgttaaactgtgtttaactttcattatatctagcattcttcaacaaacaccgggatcttttccccaacagtactcagaagtaaatttagtaaatgaaatatacccattttagatcgggagaaacaggcacgagaattcactgaagtcatggggtaattatggacaccccattattagcaggcagcaagattctcctaatagcacctttaagttaggatatttggggagaggctatcatttttcagtgatgtgcagaaacggttccaggaactttttttttttttttttgagacagagtctcgctctgtcgcccaggctggaatgcaatgactcgatctaggttcactgcaacctccgcctcccaggttaaagcgattttcgtgcctcggccttcccagtagctgggactacaggcgcaagccaccacttaattttcatatttttagtagagatgggatttcaccatgttggttggccaggctagtctccaactcctggcctcaagtgatccgcccaccttggccccccgaagtgctgggtttacaggtgcccaccaccacgcccggataattttttgtacttttagtagagaagtggaggggtgtggtttcaccatgttgcccaggctggtcttgaaatcctgacctcaagtgatccaccggcctcagccccacaaagtgctgggattacaggcatgagctaccacgcagggcctccaggaactctttttatgtctggttccccgtaaagatgttttttgccttaaaacaacactttaccaggagttagaaacagtggaccagaaaaggcctggtgccagagccaagagagcacagaatataaggaccctgaaaaccacaggatatggtagggtccctggacatgagcaacagtacctgagtatgctgcttatcagatcagctgactgaaagagctgcacctcttggaaaacatatagtagctattgaggtctgctgttttctaagtctagagtcttaatatcctacagtttcttcacggtcacctcaagttgactaatggactaaattttaagtttgcctgacctctacaataacaggggaaagaaaaatgatagaaaaaaaatagcttcttaaaataacaaatggaaatataagataagatagagataattatgccctagtagaaacattcttctcttgaaccctaaaaacccacattagggccgggcacggtggctcatgcctgtaatcccaacactttgggaggctgaggcaggtggatcacctgaggtcaggagttcgagaccagcctgaccaacatggagaaaccccatc

SEQ ID NO: 587417 - DNA, 4001 bp, Homo sapiens
gcctgcccagatccttctctctgggtcaaatctacctgccttcctttttttctgttaatcattccagtcaattatagaggattggggaacttggagagggggaggtgtaaggagagcaaaactgtcagaaatcagtatatgaatgaagtagctatcaccaaaactgctttggaagactgtcagcctgtccacagtaacatgggaatagaaagaaagagaggggtggagggggtagtggggggagaaagaagggagggagtgatggagagaaggagggagggaggaaggaagcctactatacactggacttaatagcccaacttgtttcacacatcaaggtatggtccaagtgaaaagccaaggcctttagtatatcaatacatcttcactttggaaggagccatttctctcaaggcagctcaaaacacaggacttagggaggatgtgggctttactttagcccaagtgctgagagtagaatttttactctatgttcctgtaaagctgctctgttagtctcttgatcttgtgttgaggagctttggggaaatgttgcaggggtgtccaatctttggcttctcttgtcttgggccacacatgaaatatactaacactaacgacagccaatgaactaagaaaaaaaatctcataatgttttaagaaagtttatgaatttgtgttgggccgcattcaaagctgtcctgggctgcatgcggcctacaggttggacaagtttggtttaagtttcctttcattgacccaaacttctaggcctttgtatctagagaaacccaagcctaccttcacctggggagtggtgatctgattaccctcctgcaacatcagtaaaactatgggtactccagcagcaagaatgttgtgtccccagcgcaagtgggatggagaaaagagcctgctgcgaggctgcgttggtgtgtgtgagtgttgcgagatcatttctggaatactttctcttctaaaccctggtcggggctatattttttctactgggggtgggagtgggggcagagggtaggggacgggaacgtgaacacggtgggcatctagcctactcagacacattacctgctacactgctcactttgagtcaaggctgtaactaccaggtgaatggatttttcatttggttttggttggggataaaggatgggtcgaaatggttgggagaaatggctggaagtgcctactttaaaaaaagattctaaagaatgtatggaagatttgcgacttccacagaacaccaatcaaaatggggttgcggggagatttggggagtaagcggtatagagaaattagggtaaggggatggccttaaactcgtcaaattaaccactaaaggaggagtcgagggcatctggttgagccaaggctgctcggctgccgccgagaaggggcgcctgaaagggaccccagcgaagagaatctgagtcccctctgacacccgccggggctgcgctccttcccgcccacccagctcctcggcgccgcgccgcgcgaggcggccctgctgaggaccccgggacgactggggaggctgcccgagcctccgtgggtaccgcggggcgggggcgcggcggggcgggtaccttggtgccctggtggaagtcgtcgatggaccgcgagcccatgaaggggaactgcatgtgcgtgtgtgtgtcgatgcctccgggcaggacgagcttgccggcggcgtcgaggacccgcagccccgcaggagcgcccccgggaggcagcaggtcgtgcccgagtgcccgcaccacgccgtcctccaccagcacgtcggccacctccgagaagtcatcgttgaccacgcgacccccgcggatcaggagccgcgagggcgccgccatagcgaggggcgcgcggggtcctactcggcccgggctgcgcgcaggggctgggttgggcgggccgggcgggcttggggtgccctcctgcaaggtccccaccgacagcccccgagctctgcctcaggctgcaaatccggagcccggcggcctgacgggtttatgacctggccgcatatgcggctcctccccccgggaaggctgggctggagcccaaaggccgggattgaacaggtccgcatggtccttgcacactcagaccccaagtgttctgcgccctgagttgaggtatccacccaggcttcggagtcattggaagggaaagatcttggaattttaagagaaaggaacctgcgtttttcatcataagattaggtgctaaagggaaagaaatccacctcaccctttcccttggttgggggtgtgtttgtaccaaaagacagatccagagggagaaagaaagcaagaaccatcactagaagcagcaacaaaaatacccaaacccacccaagccagaacagagccactcgatctgggtttcctgttaaatgttcttaagcgaggagcaaattatcatataatcccagtaattggcagacacagggaaggatcagagtaaaatatttaatgtatttgaaagaaaacgacttggtgtcaactattctccacagtttaatgatacaacacataccagcaagtgtttcttggaaaataaccggtactgtaactctaaagatttaaatttctactcccagcttttccacaaaaccagtttagagatcttcagttaaatcttttattctcttggttcctcagttttctcatatataaaattgattaatacttgttcttgccttccatatttgctttgagaagcaaatatgatcatggctgtgaatacaccctaataaagtgggaagcaccatgcaaattcacttaaatactggctttgtaaggactacaaagcttacctgactagggggattggctagagggctaagtgggaaagataaaccacatttccaccctcaagtagctaacagccaacagtgacacacattcatatttcaatatataaaacagaacattctatctttgagaagggataaagataagaatttagaggaaagagtgagtttatttctggcttaaagacatcagatatggaagatttgtgaagaggtatttgaactaggatacagagaatgtgaacacgcagaggtgagtggtgggaagaggacatagtgctccaggtagagtgaacagagcgtgtaaaggcacagagaggatgaaggaatgcactccctgtggttaagctatgagggataggcttacactgaatcctggaccatccctttgcttataggggaggaggaggaagaagagacagagtggtcagagagaagggagaccacaggtctgtgtgatggaaggcaggaatgcagaattttaagaagggcaacaggatggaatcttgcaaaagggttatgaagggtcatggggaggtggggtggacatctgctgaccaggcatatattcttgtccttattctggtaacagtcactggcatttctttggtgggaaatcctctgcctgaagtctcagaacacttgttttggagaaactgatggtgagagacaggactagctggatttcctaggctgactaagaattcctaagcctagctggggaaggtgactacacctacctttaaacatggggcttgcatctcagctcacaccctaccagtcaggtagtaaagagggctcactaaaatacaaattaggttaaaagcaggaggtaaagaaatagtcaaatcatatatcacctgagagcacaggaggagggacaatgatcaggatataaacccaagcattccagcagggagcggcaaccccctttgggtcctctcccattgtatgggagctctgttttcactctattaaattttgcagctgcacactcttctggtctgtgtttgttacggcttgagctgagcttttgctcaccatccaccactgctgtttgctgccgtcacagacccgccgctgacttccacccctctgaatccagcagggagtccgctgcgctcctgatccagcgaggcgcccattgccgctccagttcaggcta

SEQ ID NO: 587418 - DNA, 4001 bp, Homo sapiens
agtgaaatatggatatgagacactcccttatatgaataaattagagggcagggctggggttggatataaattattagttgtgtcaccttttacaaatgacagcaaatgccttgtttttcctagacttgaccctacaaaagtcaaaagctgcaaaactctatgtcacatcagcaaacagtcaaatcatgccccaaccatcatcaccaattctgaattgttctcaaaggctgtcactgtaagtacacaaatgtaaatgcttgtggaatccctcgctgaatatgtatagaccactcccaactactctggaagccctctgagaagaagaaacctcttgcactttctataactaaccttccctctgccctacaaggcaaggcgcacaataggtattcaatcaacaatcattcattgattgacttattatttttaccagcaggcatgggagagaaacggaaaacgtgttaaaacattttgcattgtaaattatcagttaagaaattaaggctgtggaaaagaattacactagtgtaaggatcactcagataaagaaagaattgtggtgtgagattattactgcgctgaaaatgctcactgttcatatttgtcagaaagtgacaaacattttctaaaatcaagcgtgaccaaattggcctttgtttcccccattaacacaataaaagggggtttagtcttcttcgacagtctatttcgagtgcgaggggttttcccccttttcttgtctttttgaccctttgaacataatccacttagttccccgcttcctaaagcgcctcccacatagcggtttggggagcgctctgtgaagccccggctgagacacttattggaactttgttccccacataggctatttaggagcgtctcggtttcctcgggtgactccacagccttcctggctcttctcacgctgcgagcaggagtcaagggcggtgcggtgctcggagggggtccggggggcgctgaccatggtcctggcctcggagctcgggacgtgagcgcagaaggcgcgggcggaggctgtagggagcggccgtccgaacccccgcccctcccgaccaccggggagccgcgggccttcacgcaaagcctccaccgcacgctctgagccgctcaaaaaaagggtggggcacccagccgcagctgcaatcggaagccgcccgggagggtttcagaagaatggaaccgcggccaaccccctcccagacgaccaccgcccgccccagcaggggatcagcccattccctatgcccacgccccacctctcaagctcaaggagacgcgggcagcctttgtgggcgcacggccgcccaccgcccagcccgagcctcgccgcaccctgcgcggagaaggggcgggtagggcggggtgcgcgtgcagatgcgggaggcgaggtccagggcggggcatgaaggcgggcgcgccgggctcaggggcgagggaggggcgatccccgcgccccgtcctccgtctccacccccaacccccacaccgacctggtcgttgatgttctgcagggcttctttgcccgaggccctccggatctccaccttccggcccgattcaacagatggctctccgccggcgcgccggccctgccgcgagtacggcggctgcgggtccgggcccaagtgggcgacgtcccgctgctgagccaccacctgccccgagccccggcccaccgacagcgagtcgaagtcgatggtcttgttctccgaggacccttccaccgggcagaacatgccacagaatttctgccggggcttggggctgccggagcccaggtttttaaaaaaagcagggacctcttcgtcctctgccgccttcccggattgctttctctcggccatggctcgggggctcgggtagggtcctcgccgtccgtccgtccgtctgccagtccctaagtctccctcgctgtgtgcacaagccccctagctgctgccgcggctgccgttcgccgcccaccgcaaggtgcacagaaaggaaggagggctggcgagccggcgacccaccctcccggtccctccccctgaccccgcttctcccctccctgcccacgccccccgcggctacagcgcgagctcggggaagcggcaaagttggatctgggagggcgtccgctgcggctgcgggagccgaaaggctgccagttcccggcagcgctgggaggagggaggcgcgggcggggcgcggcgccggggaggggagcggtgctcaggggagggctggaggggagggaaggagagagagaggggagggcggcaccgcccctagccccgcgctccggaagtgaagcggccagaccaccagctaatggatgcggagcggagggcccgctgaccgctctccgcgcctgggtaagtatcgggcagggcacgcggagtgaggaccggaggacgcagcccccagccccagtgcccctctcctccacctgcctggcccaggcgcctctgccccgccgcatggcggaggtgggccgggggcgagggcgcactgtggataggggtcccgccccgttaccctgggtgtgagctgatggatgggaaaaggggacaagccgggcgccaggctactcagggtgtgggaagcgggatggcactgaagatgagcaaggatagcacaggcagggtggacaggaggggggcagccaagacgctggacaccccagcttcagtttgtccactcgccttggcaggctgcagggagcagagactgaaacgagaaggttcccgcttcgtgcatccactttggtgtggttggggtgacgggggagtggggggggggcacacaacatggcgggaagaaattcagaggggcgtagcagatgggagaggaatatagagagagacgcaggtctgcggtctatgggggtgtagcaaagagtgcagtcgggaattccagcccagggccacgacttaaagacggggtgcagaccgactctattgcgcaaggcgccatggaccgtgtctgcgccactgcgccaagaagggcgcaggaacgtgtcgcgatttggtttattctgcttcctccaccaaaaaaaaaaaaaaaaaaaaaaaaagagagaaaaaacaaactgaaacccccttcccaaatctccagctttcccctgcgccccagagccccgcctggttcccccgcccctgttgcgcactgcgccacagtcgcagcgtttcccgggttaccagatgccacgtgtttggggagtaagtgcgggtgcgcatctggtgcggagtaggaggtaggatgtgggctgtgagtgccatgaattgtgtggggccaagcaggggaaaggtgtgtaggaacttggtgtgtgtgtgcagtagctgagccacggccaccgggttggtaagtaaccagggggcaattagatttgtgtgcctaacacggtcaatgctggtccttcattgcttattcccatctccacgtcctttccgcgtatcagtccctgcctctgcgcgatgacagctccgcctctctttccacagtggcaaaatcctgcagaaatggtgcccctcctttggtggcccgggagggagttctgggcatgctcagtaaccagggtgggtttgggctgagaggccgtttaccgcagggccaccgcgtagggccgtgtaaccagggatccagtcccattgtcagcccaggattaaatgcggttaccaaccacccccacagtccaattgtgagagatagtttggtgaatatagttacatctgctggacaatcagtcgcaatttgaagatcagcccatcttgataggtggaaaggcgtctccggatgagaaacagactggggaagaagaatataggagtggaggggctgagagaaccggagggggcattttggacttagcggcagatgtgctttgcatttgaataaagcatttgaaaaaagcgcttccaactgaattacatcatttcctactcacagccccactgtgagatgcgtgccttatcagcactgctttccaggttaggaaa

SEQ ID NO: 587419 - DNA, 4001 bp, Homo sapiens
tcatgacatcagagcctcgaaagaaatctgtgaggtagatgaggccaggttctattcccatgacacataaggaaactgaggctcagagaggttaggccacttgcccaggtcactcaaatcagtgcacttgtcctctgtctacaatgacctccacttctctcccagatctctaagcttccatggaataaatatcacctggaaggcaaggagaggcctcccccttcacctcctgcctccacagtcactgtggtacctgccccagccatcaccgcgaatatcccgagccaacatgatgccatgaaaaaaagtgaaacaccacacccccgttcactctagtgccttccagaaggctcttacataagaggctgccagtggtgagggagggaggaataccatgctataggtcctatgataatgcaaccagattttttaaagggtgtgggggggggggcgctctttaaaaaaaaaaaaaaaaaaaaaagtcttgttgatcgtttgcttttaatttttttttctccccacactgtcaaaatgaagctgccttgttcattcacgaagacagcaaattatttgaggcttgctgcaaatctgctttccatcctccctccccagagtcaccactccttcctcctgcacagtgaacacacaagggtgggtgccccgtgcccggccctttgggatcttgggtcttttgccttcaagaagaagctagcgcccttcttcagatcatcctagaaaatcctccgagcacacgccccctcccctatgcatttgctccccttctctctcccgcggatgggtgtgcccttgtgcacggagaggaagccggggtgcccatggctaaagggaaaaccagaaccaaagagcgtccttatatccagccctaaaaacacatcctgactgctttaaaaggctctttcgatctctgcctcagtcctaggttctacccgggaatcagctggccggttgcaattgcacatccttatataacaatgaatttccctggtgttcccccctccctgggatttcactggggatggaaagaataggacgaacgaatttttccaggaaaagatggggagagggagggagcaggggagaggtgggagcaagactggtgctgatctctgaggcatcgctaattcacggcacagacgttttccccgtggtttgcaaaccaacaagtccaggccccagcactgcgccgagccctccggccgccgcgatcattgtctggccggggccgggccatctgctcccgcgtcgcgcagcgccattagcgcccggccgctcgccgcggtccccgcgcccaccctgcagtccgctttgtatgcaccaacacggacgcctcctgagcggcagaaggggcggaaaagagacgtgaaaaagagcccgaatccccgccagggccccagccccgaactacagggcgagaaaaccggggggggggcacccaaaaccggttcctggccaacaagaagcccccgccttgccccccgccttcctcctctgctcatcacctcgtccctgtttttccttcccgtttccacaccattccggtacaccctgcccttttcagcatccctctgctgtcattacgccttagggctcaaacccgctcctttttccaaggacccggagaaggctccagaaagccctttttgggtgggggcggaagacccggggaggatccaagtccccatctccccatcgctgctggaggagtccagcctcgcagcacgcagcccagagaacaatatccgagctccaggcatgcatattcaatctggcatccatttgcttgcaccccgcgggccgacgctgcagcatctctcactgacaataaaagatagaccgggtctggcgcgttacctaaggctaccttcgtgcactcgcgctcctgtttaatgccttgcaaacgatgcgacttctaatcctggatcactgcatctcccacaaccaccaccaccatcaccatcgcctccgttagcaacagaaaggaaaaaaaaagttcggtccctctcctttcccctcctttttaaaaattccttagaccttctgtgctacaaaaggtggctggccgaccgcagatttcccaagtaccaaactcaccgtgatgcgtggaatatttttcttcccctgataagacatctctctcctgggaaaaaattaatttcaagagggcagctttaaggcaaaaactgccgggaaggggacttgggttttttttgttttgttttgtttttttcctttgcaagattgaaaagggtgcaaccgcttcgctggtcttgctattaggaaatttcaagaacgtaacggatgaatgcaatcctctgtctctctttcttcctctcctccaacacagccccagctagggcggaaaaaaaagagagagagagagagagagagagaaggagagagagaaacaggagggaagggggtggaaataaactacagcaataaaagcctcggttcaagtcggccaccgtggcgcatgcgccgccagccactccctttcctctcaggcaaaagccatccgcttcgagagagacgagcagcgattggccgcgatcctgggatatgcaaatttaggccggtggggcggggcgcggcgcgagagcgcgaaatgcggcagtgaacggccgggggcggcaggcggcgcgagcgcccgcgctgggagcgcgcctttcgcgcgctttcttcgggccggggcggtggggaccgggtttggcggcggccccaggcgcggcctgggccacgcggggacaatggaggggtggtcgtcgcggccggggggaggggcggcaccccgagacggcggggcttcggggccgcacgcactcgcctgcgcgcgccccggtccctgcccgcctgcgcgccaatccgcggaggccgccgcggcagccccgcgtggggtgactgcgccgagccaatggcttcgctggcggcgagcgcgcgactgcaccgccggccggcgccgcgcagcccgggagggctcccgggccctcctcccccgccgttgctggcgctgaactcgcctggcccccgccctggcgcggctgaggactggaacggcggcgggcgggaacccggcggggagggcccggccacgcccggccccggagagggcggctgcttcccgggagcgtccgggcccggctcctgggggcggggaatgggcgcgggccggggggaggctgcagagacgggatctggcccgcgtggaggcgccgggctgcaggaaatgagagccctgaggaaacccttccaactccgagccgggaaggaggcatccggggaaggctgcggggtatgggaaaccccgccctgaaacatccttttgtgccttccggccgcgaggaacttagtagggcggaggaatggggagcagccgcagcccgccgaggccgatgtggcgcgatctgcgctctgtgcgcccgctttacagtcacgcccacctcggctccctgaggggtgcgtgggggcgcagcgcatttcgctggtgcctgcagcgctgtcgggggcagctgctgcgatcccagcgccccggggtcctgagggtttacagtgccagtggatgggacccacaccgcaccgtggggcggagaggaggagatgagctgtggaggagcaagaaaggaagagtttatatcccacaggaaagggaaactgagtcttggggaaaacctactgaatcggagttaaaatcaagagtgtcctgactgcccaggcagagccttgtcacttcaaacggcactcaaggccccttcgtggtcctagcaattgagcaggcctgggaccccttagctttgcctgtccaagccatgctgggatgctctaacttcagggtccgtgggaaagaaaaacgctgatccagttgatcctcaggaatctaccgaggccaacccccgtgggaggttgccctggcaggtacaataactaaaacatctggaccagccctcgtagcgctcgggcttctctgcttgaggtcgaaggataca

SEQ ID NO: 587420 - DNA, 4001 bp, Homo sapiens
tgcaaatctgctttccatcctccctccccagagtcaccactccttcctcctgcacagtgaacacacaagggtgggtgccccgtgcccggccctttgggatcttgggtcttttgccttcaagaagaagctagcgcccttcttcagatcatcctagaaaatcctccgagcacacgccccctcccctatgcatttgctccccttctctctcccgcggatgggtgtgcccttgtgcacggagaggaagccggggtgcccatggctaaagggaaaaccagaaccaaagagcgtccttatatccagccctaaaaacacatcctgactgctttaaaaggctctttcgatctctgcctcagtcctaggttctacccgggaatcagctggccggttgcaattgcacatccttatataacaatgaatttccctggtgttcccccctccctgggatttcactggggatggaaagaataggacgaacgaatttttccaggaaaagatggggagagggagggagcaggggagaggtgggagcaagactggtgctgatctctgaggcatcgctaattcacggcacagacgttttccccgtggtttgcaaaccaacaagtccaggccccagcactgcgccgagccctccggccgccgcgatcattgtctggccggggccgggccatctgctcccgcgtcgcgcagcgccattagcgcccggccgctcgccgcggtccccgcgcccaccctgcagtccgctttgtatgcaccaacacggacgcctcctgagcggcagaaggggcggaaaagagacgtgaaaaagagcccgaatccccgccagggccccagccccgaactacagggcgagaaaaccggggggggggcacccaaaaccggttcctggccaacaagaagcccccgccttgccccccgccttcctcctctgctcatcacctcgtccctgtttttccttcccgtttccacaccattccggtacaccctgcccttttcagcatccctctgctgtcattacgccttagggctcaaacccgctcctttttccaaggacccggagaaggctccagaaagccctttttgggtgggggcggaagacccggggaggatccaagtccccatctccccatcgctgctggaggagtccagcctcgcagcacgcagcccagagaacaatatccgagctccaggcatgcatattcaatctggcatccatttgcttgcaccccgcgggccgacgctgcagcatctctcactgacaataaaagatagaccgggtctggcgcgttacctaaggctaccttcgtgcactcgcgctcctgtttaatgccttgcaaacgatgcgacttctaatcctggatcactgcatctcccacaaccaccaccaccatcaccatcgcctccgttagcaacagaaaggaaaaaaaaagttcggtccctctcctttcccctcctttttaaaaattccttagaccttctgtgctacaaaaggtggctggccgaccgcagatttcccaagtaccaaactcaccgtgatgcgtggaatatttttcttcccctgataagacatctctctcctgggaaaaaattaatttcaagagggcagctttaaggcaaaaactgccgggaaggggacttgggttttttttgttttgttttgtttttttcctttgcaagattgaaaagggtgcaaccgcttcgctggtcttgctattaggaaatttcaagaacgtaacggatgaatgcaatcctctgtctctctttcttcctctcctccaacacagccccagctagggcggaaaaaaaagagagagagagagagagagagagaaggagagagagaaacaggagggaagggggtggaaataaactacagcaataaaagcctcggttcaagtcggccaccgtggcgcatgcgccgccagccactccctttcctctcaggcaaaagccatccgcttcgagagagacgagcagcgattggccgcgatcctgggatatgcaaatttaggccggtggggcggggcgcggcgcgagagcgcgaaatgcggcagtgaacggccgggggcggcaggcggcgcgagcgcccgcgctgggagcgcgcctttcgcgcgctttcttcgggccggggcggtggggaccgggtttggcggcggccccaggcgcggcctgggccacgcggggacaatggaggggtggtcgtcgcggccggggggaggggcggcaccccgagacggcggggcttcggggccgcacgcactcgcctgcgcgcgccccggtccctgcccgcctgcgcgccaatccgcggaggccgccgcggcagccccgcgtggggtgactgcgccgagccaatggcttcgctggcggcgagcgcgcgactgcaccgccggccggcgccgcgcagcccgggagggctcccgggccctcctcccccgccgttgctggcgctgaactcgcctggcccccgccctggcgcggctgaggactggaacggcggcgggcgggaacccggcggggagggcccggccacgcccggccccggagagggcggctgcttcccgggagcgtccgggcccggctcctgggggcggggaatgggcgcgggccggggggaggctgcagagacgggatctggcccgcgtggaggcgccgggctgcaggaaatgagagccctgaggaaacccttccaactccgagccgggaaggaggcatccggggaaggctgcggggtatgggaaaccccgccctgaaacatccttttgtgccttccggccgcgaggaacttagtagggcggaggaatggggagcagccgcagcccgccgaggccgatgtggcgcgatctgcgctctgtgcgcccgctttacagtcacgcccacctcggctccctgaggggtgcgtgggggcgcagcgcatttcgctggtgcctgcagcgctgtcgggggcagctgctgcgatcccagcgccccggggtcctgagggtttacagtgccagtggatgggacccacaccgcaccgtggggcggagaggaggagatgagctgtggaggagcaagaaaggaagagtttatatcccacaggaaagggaaactgagtcttggggaaaacctactgaatcggagttaaaatcaagagtgtcctgactgcccaggcagagccttgtcacttcaaacggcactcaaggccccttcgtggtcctagcaattgagcaggcctgggaccccttagctttgcctgtccaagccatgctgggatgctctaacttcagggtccgtgggaaagaaaaacgctgatccagttgatcctcaggaatctaccgaggccaacccccgtgggaggttgccctggcaggtacaataactaaaacatctggaccagccctcgtagcgctcgggcttctctgcttgaggtcgaaggatacatagaatccctacgtaatcatgggctggggggtgggggaagaaagagtatgtaattggctcacacctgctcagcaaagcttagctagataaatacggaataattcgagctgctgtgggcctgacttccaatctttctgcccttcaccaccttagccactttaggggaatgtctgtccttccagactcagagaaggtgtaaaattctccttttcactcctatatctctaaaaatctgaagtcccagaaagtagccgtagggcacgcacaaagtttcaccgatggttaattcatccaagttcaatttagctgtgcatctgaaagagaaagtgaagcacttccccctccagcaatctgatatgccgcaagcaaggtgagatgatgtcggcaagtattgctgtcaaccggtaatggttaaagtcacgagtctgagaaagcttaaaatacgcctttctacttggcctctctctacttgtgaaaaaccaacagtcagtcccagctttgcggaggacagggcagtggagaggagtgtcctattagctcacaaaaaaactacttggcaagggagtaaataaagagactca

SEQ ID NO: 587421 - DNA, 4001 bp, Homo sapiens
agaacgcagtggctcatgcctgtaatcctagcactttaggaggctgaggccagaagatcgctcgagagcaggagtttgagaccagcctgagaaacatagcaagaccccatcactacaaaagaaaaatttaaaagttagctgggtgtgatgatgcacaccttaagtctcagctactcaggaggctggtgggaggatcgcctgaccccaagtagtcatggcaccatcatgcagagagccgtgattgtgccactgcactccagcctggctgacagagtgagaccctgttcccaccactctctccccaaaaaaaagataaagaaaaaagaaggaagaggaaaggatgaaggtgaagcggaggaaaaggaaggattaaagacaaagatgatggcaatgacaggggagttggttctagcagttttccttgtctgtaaagcatttaattctcctgtgcacaactcgtttcttttgaataaataataagaaacctgaaatagcagactgtgtatttatttttgactaagtcttcatttaagtaaaaagaataaaaggttttttagattcctaatgctaataatgcttaataggcccaagtacctagtctttaacatttatttctctaactgcactacccccactttgaaatattttgtttataccatcactccctacaccccaaaattaaaaacacacgtttccagggcctgtttttatttttttgtttttgttttgttttgtttttgccagctagattaactagaactggaccgagagaaagtcctcacacctgagttcctttctcaactctccaccaactgaaccgggatggaaacagactagtgaagttctttcagttcccttaaaggtactttgaggtatatagcaggtatctgaagaatggccagtttactctaacactctttggtgggcaaagtacgaaaactgaaagacagcctaaaggattccattaagaaaaaagagaaaaaatagcctaataaaatataggtgtcggaggaccaattgtgcaaaagagaatcaagctggagctccctattttgcaggagctggggctgcacagggtggagggatataacgattctctagacttctcaagactgcctttaaaaaactacctcaacttcgacttctaatcaatgatcttgcagcaagtttgtatctgacctggaattagaaacagcttcagatccctactaagcaagtttgcttcggggtgggtaggggtctcacccaattaccaagtctgtaagctgattcccagcacttcctatctatcatctgagtaaaataaatataagtggaaggcaagagttctataaacattgggtatcaccactgtattttaaggtagagtgacaggtgtcctgtagagtccctgtaatcaccggtaactcttcaaaaacttcacggaggttgtattagtatttcctgacttgctcccgctgacacatgcctccaaggtcagctggaccagtgctactcatcaccgcagtgcagctaactggacggcccaccggaggcgtggactcctcgggaacaggcagcttgctatgagcccccggccaggtcagtgcatctctctggccctgttttcttatcccgactttccccgctgagaaaataacgtggccggccagaggctgggggcgccgcgtgaccagggctcacctgtgtccatcctccagctgctggcacagcgtgggctccagctccagcaggcagaagtcgccggctgcagcgccgctggccccagggccgaagcccaggcagtgcaccgccggcagcagctcggccgcattcagcttggcgatctgcagcgtcgcatccacctcgtcgcgggtcctcttcatcgcagcgccgggtctaggagtcccgccgcgcccgggtggctgcgggcttggcgggcaagaaagaagttcccaagcagccggaaggtaggaaacctgagcgtttgaaagcgcgccaaggcggccatgggcgtgtttccggggcggagcgcgctgcgggcccgcccgcgggaaggcctgccggcttctgggagcgcgagcccctccgtgccccacgccggaccgcgactgcaggaaggaaacgcggcttcccggggggcggtctcggcggaagctcgcaggggcagagctgcgactcggcgggttgggacacggatccctcgcccaccctttccgctgtccccttgcccgccccccatccccgatctccgtccctggtttccagccgatgctcccatttcctcgccgtccacattgtctcaccttccgccagtggcgggccctgtgataaccacttggcatgtataattccatgagcccgttgccacaaccctgtaaggtggtgccttggtcattcccttttgccaatgaggaagcaggctccttgctcgtgatggcagagtcaggaggtaacagagtctgactccagcctagccgactgtggctctaaaagcttcctgcggggttttgtgcaaataacccatgctcgggagcgaggccctgggaaggagtatctcgcttctttgggtcagggcaccatcatatctggagacaacggcgggactagtctattcgttgaatacctagtgttaaccgaaaagtgactgatgcaggtctcgttcaatagaggtttatttaagcaaggttgaggacgcacccgaagggaaaaacaagtcacaggagcatctgtgacttgtacattttccaaaggtttggggaacttcagtattaagagttttaagagaaaaggttttcactatgcacacatacatgaattgcttgtaacagcgtaatgtgtaaactttcccagagatgcttagggaatcgttgagggccctggctgtccctgagagctaaaatagtctgggaggaatcacttaagagatggtgacctcctactagttagtgcaaatcagaccttgcttgaagtgaaagaaagtggtgggtaaggtgttgaattcaaaggatctgagcagacatttttttcaattcttgggtaaaatgatacgaaaataccagagtagggcatcccaggagtctgggcagtgctttcgttggtggtggaaagattggttcatgtgacctacttcttcactagcctcttttacatttgaatgcataggaattcggtggaatgaaatcctgaatgtgacagtggttgcctgataagaagttattattgaagggaatcaaccattgtagttgctctattaaatgggaaacattccctacaactagaagcagtgtcaactagaaccctgacatttacatcagacaggcatggctgcgaatcccaactctcttcagaactttgtgacctaaggcaatttacctaatttctctgagtacaacttccttatcgataaaaaagcacataagacctacattcttaagatgtacattctaaaatgcatggctgcttaataaatggcagcagttctttttgtttttatgtattaatcattatgaatttaatttccaattaatggtatgaaattattgccattaatttgatattctgtcagggagctggacctgtgttcctctcataagacaaaatgatgatagtttttattaattcattctttaaaattatgttaatatgtttttctaaagtaagaaattttctgtaccttttcaaaaaacgattgaagctggcttaatcattcatctggtagcaggaaaaaaatattctttatcaggtaaaaaaatgaacagttataataaatttcaaaagttctgttcatgagaacagaatcagctaaaattgattctgttctcttggacactgtactcttgattatattgctcatatattgtgtttcatggcatgaaatgagaattttatttactaaatcttagttcatattatagaatcatgtatgaacttttttccttttcttttcctctcttctcttcttttttattcaataaagagcacagtgacggccaggtgcagtggctcacgcctgtaatgcc

SEQ ID NO: 587422 - DNA, 4001 bp, Homo sapiens
ggttgtccccactgctggggatcttgccagctggaatctgagtctcatctgcctggggctatcggcagagagcctagggagctgggatggggttgggggtacctttagacccatccaaagagaattagcagggagacaacagcagctgaggccatgacacatgtcaggcctgccatctctgtgccagagttagactttaaccccttcgtgacctgccactgcctcagagataaacctgctatgggaagggtgtggtgggggtgggatggggtgagtggagaatagcaataaagaggaagagtaagtttgcaaaaaataaatacttgctgaatgcatgagcttatggaagaaggcaccaatctatgtgcacaacaggcaaaccaccctccttggatcagcattaggaaattactgatcagatctcagctctaatgtgagaatttctgaatctaagcagggttggagtgttttgtctgtgtgtgtcttgaggggagggtgacagaggtggatggtgggggaattgacgcagggttggagtgttttgtctgtgtgtgtcttgaggggaggggggacaggggtgggtggtgggggcctagaaagcaggaaggaaagggaaaaatgagggatcctgccaggtccaggggctcagaggcttagaattaccaaccgtatggctgttggagtcaagtgaccctacaaaacacgaggtcaataacgaggggcttagcaggtgtgtctcagattacctgttgagctgcagagctgggaaggaccagcgtttgaggcttgccctgggaccttcaggcagggaggcaacaatggcaaggccccttccccctccctccccatcctctcacacctgtggtcctgcctgtttgaaagcaggaggtcctggagcctgcagaatccccttccactcccttcctggcctcctgccagggggacttcaactctatgaccagcagtgagaggccatctttgtccctgcccatgctctgtccccatctcacacccctagacagggcccagctctcccttgctccagtgccaagagaaaccaagcacttacaaggcattagaagcaggggttttaggaccaggattggtgagggaagattggatgttagggagtttagggagagagagttttcaatggctgggtccggaaggagcacagaaatatagcactacagccatcatcaccaccaccatcaccatcatcactaccaccatcaccaccatcactatcaccatcatcttcttctacctttgcacccaggcctaaagaccccattactgtattgcaatacaacctttcctcttagagagtctgctgtctacgagatgatgaatgggatgggggaagcgtgaaggagcccaggtctaagaaggatctccgtggggctgtttttcccgggggatgcagaagcccctttctgtccagggatacagccctgggcattctccaatcccatccgtcggctccaggggccctggcccgccgctccctccctccgcctgcggtcgcctttgtaacaggtccatggctgtcgccccagtcctcgccagcctggcagccgggccccgcgcgcggagggagggcgcccgggagagagaggctggctcgctgggctcgggtgcccgcttcccggtcccctccctcccccgtcgcccctagctgggcgcctctccccagcgtggagagccagctgaaaaggcgaaggcccgccgcagcccctctacctctttgcaagcgctgcgctgggcctcagtccgaaaggcggatcgccggcgcagacagcgccacggccatgacgctcctgctgctgtcgccgccgctgtttctgcccaagacaggttgacagattagcagctatttttaagccatgacacacacgtcgaagcagggttcaaatcagcgtgtgcgctggtgacataaagggactcggtctcacattcggtggcccgagtcgccaggcagcgtgggctccccagccaaccccccacgagcccgcgcgccttgcagaccagacacggccccgccgagccccagcagcaccgcctggaatgcatgcgtgtgttctcagagctgcaccaattacaaagcgttttgcctaaagattacattataagtcatcccaggcactgtcttaaacacacacactcctcccagacagaattaactaattacatagacacgattctgtgcactggcttgtacatgcctcggtctcaagaaaccgtgtcataaagaacaatggtccgaagcccccattagccttcattatatgccatgtgcttcatttagcttaaggcattttatactccccacaagtctatgagggagacataattactattgtcctaattttagggaggaggcgacctaggcacagagaggctaggtactctgccctggtcacacagctcgttactggcagagctgagcttgttcaaacaatgcagcctggctttgcagtttatgtccttaaccactctctaaaccagtgcctcccacaaaatggagaaggcaccatggatttccttcattcaggaagccatttccaccagctcagctcatagtgaacttcactttccccagactctcaaaacattcatcttcatatttctttctttcttttttgagatgcagtcccactctgtcgcccaggctggagtgcagtggcgcaatcttggctcattgtaacccgcctcccaggttcaagccattctcctgcctcagcttcccaagtagctgggattacaggcgcccgcctccatgcctggctaattttttgtatatattttttctttgtttgtttgttttttagtacagatggggtttcaccatgttgaccaggctggtcttgaactcctgacctcaggtgatccacccaccttctctcaaagtgctcagattacaggcatgagccactgtgtccggccatcttcatattaatttctcatgtgctgccttctagtgacatattcacttgatcggcatttttattgtaagcaccaagattgtaagcactttgaaggcagggactgtgctaccttccccagtgcctaccttattgtgtgagagggaagtgggggagatgataaatgttagcagatgatgctgttgagaactaggctggcttgaactctcgctgtctactagaagaaaggcagaaagtagattggctcagattgaagctgatggtgtcagctatagctgaaaccaggactgactccattcccagcagtggtggcagatcaggttttgatctctgggttagagaaagtactggccaatgtgaccaatccccaggttccatgacaggctgccatccaagtttaatgtaccgcctagcctttttttttctctagagaaacaaaattcttttcacttttccttgtcccttgtgttacagcagtttaaatatgaaatgaaatccttgtcatttaaaacaaagaggcagggcatggtggctcacacctgtaatcccagcactttgggaggccagggtgggcagatcacctgaggtcaggagttcgagaccagcctggccaacatggtgaaaccccatctctactaaaaaacaaaaattagccgggtgtggtggcaggcgcctgtagtcccagctacttgggaagctgaggtgggagaatcacttgaacatggaaggtggaggttgtaatgagctgagatcatgccactgcactccagcctgagcgacagagcgaggctccctctcaacaaacaaacaaaagcgaaaataaacaatcaaacaaacaacaaaaaaccccaaggaattgacctgagaaatttgagattttaatttgcgcatccaaattaaaatttggatttaatttgcaaacctagttaaaacattatcataaaaggaattgtgaaagagcacttacaagatcaatatcttttttttgtttgtttgtttgagacggagttttgctctttttgcccaggctggagtgcaatggtgcaatgtcagctc

SEQ ID NO: 587423 - DNA, 4001 bp, Homo sapiens
gcgcctgcgggggggaggagcggctctttgatgggtgtgggggggtctgaactgcctaccgggctcggaagcgcagaccctacccgcgcggaagaatgcgcggaatgcggcggcgggaggcggaggcgcagcgcggcggggggcgcccggaccccacgcgccctgcccgctccctagcccgagggccgcggacccaccctgccctgcaggtgtggcgggcgccaggtccctccagggactcggacagcacgcgatttttccaggatttccgactaccaaatgtgacaagacagtctcgccgccgagagtttcgccagggctcgctaaaatccggcacgcgccgccatcagatagtcgaaaatccgggctgaacaaaaggtgatcattctccgctgcccggatttgcaggcgctagaggaccggttccgcccggcgtcccccagatacccagtccttcagcctcccgctcccagagcctggatctagcccgggacggggattggccaccttccaagctgagcttggagttgggcagcgggaacgcagatacagatcgctctacacagtgtgtgcaacccaatctccctttctgcatttgccagggtcttgttttcagtgaaactggcaaggccaattgtacctcggcgcccacccctcttcaccttttctccacctctgggattctcccggtccggctcagtgtagggccccagcacgccaaaccaacaggcctatcttgtccccacgcgccccgtggtacttggaaactgttcccgggactcaagatggaccgcgcagaggagtcgcttcatcctcgaggctaggaccgttaatgtcaataaacggggcctcgctaggacggtgcggaattgcaggtgaccggagaaacccgtccgcactttccctgaggacttgaacctcgcacttgcacagaaaccttgcaaacccctacacaccaacacacacaaaggggcgcgcggggatccccgcaaccacgaatcacgccggggactccttcccgtgccaataaggcgcaggccgccaagaccccctccatctccccgactccagctagcgcccggagccctcgtttacctttgagcaggcagatgtcggtgcgctcggcgttgcggcgcagcgcctgcaccaccagcgacacggtgctgtcctcgcggaggctctcggcgcgcgggctgcgctcgtcgtagacgatgaccgccgagtagaggccggagcgcaagcgggcgcgtacctcctcctcggcgggcaggatctgctccaggctcacggagcccttagcccgccgccgcacgatggtgttacagcgcacgttgaccgaacctaggatgtagcccgcgctgtgcgccaggaacggtctgcagtccagcagcaggcacttgccgccgctcggcagccccagggtgccgtggctgccgctgccgcccgcgccgccgccattctcgtcccggttcatcagccttttgagcacactgcagtccatctcccgcagctcctccatcgtcaccatggtcgccgggaaccgaggcggctgggcgcgcgaggaagagaagagaacccgggccgcctaggctgcagaaaggggcgggcgagagctaagaagggacgcctgcagaagtggccgcaaacttggtcctcaagggctcccgcgggagagcctcttcttccctgtccccttcctcccgcagcctcgcggtcacatagcagtcggagcggcctcgggcgcccagccgggcggcgcgcagagcggagggggaggcgccggtggaggagagtgtgtttacgagagaggaccgcggactcttttcggcgacggcctcccgtgtatttttgccggtcgcgcggctcctgtcgccactggcgccagcgctgccctgcctacgctcctccggcgctcagcgcactgccccagccagagttttctcctcggcttagaggtttattaatgctcctccgcgctcccgggggagggggcgctaggtactaccccgccaggccccgccccgttccattccgggccccgcgccgtcccccgccccccgcgctgtcccccgccccccgcgctgactccccgccccctccgggcccctcctcccaccccctccccggagcttgaatggagcgcggccgctggctcccggtcacgggaactcgacgtcacaaagagcggagtaaacagggcgccgggtgctcgccatcaggcccattcataaaaccgaggccgagaggaagagggaggcggcctccgacccgccgccagcggcgggcagcgcccggactttgtgaatggagcgcgcggcgcctttcgccgtctacccgcgggcccagcctgcgccgcgcctccagcccgacaccggcacctgtgccgccgctgcaccccgccgctaggcgggcggcgccaaaggaaatagccggctgaggaggccagggctcgggtttgagctttcatcccttggcaccttcgcgcttccccgcgtgacagccccgtaggtttttcccggttacccaagtggagaggggaccggagcgctgctgcccacccagcggggcctgacacctcctagccccagactccccgtgcgctttcggcccggccagtcctttctgaatatgcgattcctgagacgttagcgtatgcattagcgtgatcgattttcatctaaagccattaaatcagttttatagcttccccaagaacgtgggcaaccccctgcttggaagatgaaagagaaagtcctcccgcccgaagcccaggatcggagtgaggtgtggggtttgttgctttactacccaaagggaggcattaattgccggaatggtgttccgagggaggagagcaggctgcgctcctgtccacgcttcctaaaagatgtttatttaaccctggtcgggggaaaaacaaggttttcgggtttgggaaacgtcttcaccctatcttgcatagttgtgaattatcctttcaggaaatgacagggtccacatttgttgcggagctggaccctggaaaatgtacccgcaaagaatgaccttttgaaaggacttcagcagctctgggtccgattcatgtttctgggcatccctttttcctggtcacgtagcagccctccccatccccatttctcttttgcatttaatttcccagaggcggcttttggctgggggtttgtgcacgcacgcggtggggaccgtgcagaagccaaaaatcattcgcccgacatcttgccaagtcttgttagtgagaattaatcacagagcaagggagttacaggactcgctcgcagtttcggaggctgcagagtagcgtattccattccggggcgcgcgtggaagcccgacccaggcagcgagggcaccggtacccgccgggtctctcccgcccaagctcaccctctccccatgcctttgttccgggcggagcggctttcccgagctctcacctccggtcccgggggccatccctgcactccccgaccggagctcggcggagcctccacttccgagaccttcgactggcctcgtcccccactgggccccgaatgcctcgacccccgggccctactcggatgagctgtaggggcaccgcttgggcaaggtgatatttccttttgctccgggctccaaaatggcttacgatggcactgcacggatcctttctctttttaaaatttagtattttattcatcatggattttttgcatttttttttcttttaaagaggcattgcatcaagatatttcttttgattactgacttttcggcgcccttcttaaatgttgcgctcaaggcttgtgctcaccctagtccaggccctggaaggagccacaactgtggactgaccgaggctgcccggtggcaggaccctgggcgtcgggcactccgggtgggagatcagtggtcaaagccgcacggcgtggcctccctgtggggagggcaaaaggtgtctgagtccagtttcccattctgctgaatgggactgtgggggt

SEQ ID NO: 587424 - DNA, 4001 bp, Homo sapiens
agtaacccttcaacgtggcagaaatagaaaaactgaattttaaaatgcaattaatagaattagatagctttggctggacatgctactatcacttctgaaaatactcttgttgcttttactgcttctcctaacccctccaagaatggcagacaccaaccatcaagccttccactggcttcctgtcctgctttacagacacgcacaggcacacctgaaatgagacatacatacattccctcgctggaaaataaaatgaattactccagtaggaaacaaattctccaacccttcaccaattcaggcatttactaaagataatctaaggggctttttcttcctttgcttctcaaaattcccctttaggtctctgccccagagccccctcccgggaaaccacatttgctccactgcactggcttccaggcatggaagggaggtgtatctggagacctgggagacaccttgatttccttccccagccccttcccgcagagctgtgggagcagatactgactttttccttctgacctctctagggatgcctttccattagagggcaaagaggaagaagaggaactgggttaaagatggcctctgctgaacacatatgtcaaaatcagctaagctaaaccgaatagggcccagttaacctcaacgatgttcaccacaacagagcaggctggaagattcccccacctctcaattttaggtgcttgcttccaagggcaggctccctttggaagcagaagctgaacttctggctaggaggggctattctagaagagaccgaagctaaatctgtggcccaggcctgcacacctccatctgcaaggatgtccactttgagatgcagaagatgattctccctgcccgcgtcggggccgactacgagaggcagtgcaggctccaggaggaaacagcccttaaagtacttctcttatgttggccaggcacctcgccacccaccagagggctgtcattttacctagaggcctgtactacccagtcactagcctcgcccagaatctccagggctctcgaatcggtctggctggggaaatggaggaggttggggagggaggactctcaacgggattcacgagggacagggaaatgccgcgcgccctggggataaatcttaaaaaataatccctctctccccgggagcggggcctaagtggctgcacccccggaagcccaagggccgaggtcctggagctgccgctctagggcggtcccctcgggatttcttccaggaaggaaagcaaaacacaacaaaacaaatccagactccacgtggggctggaacccagtcccagccctgctgtgttctagctggtcccgggtttggacgccagcgaaggaaggcgcgcccgcgctctccatcggggggactcgagggcagcgccgtgcggggaacatcccggccagccccggccattcgaggggacttgcgtcccagaggaattgccctcatctctcccaccagcgccgacaagctcaaacaatggcgcggacgcccaccctggtggcctaaccaggacctggccccgctcagccgccaggccttccgggacaagccccttcctggcactttctcttggagcgctttggggagaagggagggggactgggctcatttggaggagcaaaagacagccctcgcggaaaaagaaagaaaaatcagcaaaatcgccttagcagttcaaccaaaggtcaacagcagcgtttccccagcagctgacaggtcaaatgggcaggaaacaactgcggggaacaaagccccccgctgtccggcaggggcgaacccggctcctccgcactgaacagttttgttgtgctttttggaggggagaggtttccgccccctttccagctcccttcctcccgggtggacaggtcggaagaggagcggaaaggaaaggaagggagggaggcggcgaaggcgcctgcgggggggaggagcggctctttgatgggtgtgggggggtctgaactgcctaccgggctcggaagcgcagaccctacccgcgcggaagaatgcgcggaatgcggcggcgggaggcggaggcgcagcgcggcggggggcgcccggaccccacgcgccctgcccgctccctagcccgagggccgcggacccaccctgccctgcaggtgtggcgggcgccaggtccctccagggactcggacagcacgcgatttttccaggatttccgactaccaaatgtgacaagacagtctcgccgccgagagtttcgccagggctcgctaaaatccggcacgcgccgccatcagatagtcgaaaatccgggctgaacaaaaggtgatcattctccgctgcccggatttgcaggcgctagaggaccggttccgcccggcgtcccccagatacccagtccttcagcctcccgctcccagagcctggatctagcccgggacggggattggccaccttccaagctgagcttggagttgggcagcgggaacgcagatacagatcgctctacacagtgtgtgcaacccaatctccctttctgcatttgccagggtcttgttttcagtgaaactggcaaggccaattgtacctcggcgcccacccctcttcaccttttctccacctctgggattctcccggtccggctcagtgtagggccccagcacgccaaaccaacaggcctatcttgtccccacgcgccccgtggtacttggaaactgttcccgggactcaagatggaccgcgcagaggagtcgcttcatcctcgaggctaggaccgttaatgtcaataaacggggcctcgctaggacggtgcggaattgcaggtgaccggagaaacccgtccgcactttccctgaggacttgaacctcgcacttgcacagaaaccttgcaaacccctacacaccaacacacacaaaggggcgcgcggggatccccgcaaccacgaatcacgccggggactccttcccgtgccaataaggcgcaggccgccaagaccccctccatctccccgactccagctagcgcccggagccctcgtttacctttgagcaggcagatgtcggtgcgctcggcgttgcggcgcagcgcctgcaccaccagcgacacggtgctgtcctcgcggaggctctcggcgcgcgggctgcgctcgtcgtagacgatgaccgccgagtagaggccggagcgcaagcgggcgcgtacctcctcctcggcgggcaggatctgctccaggctcacggagcccttagcccgccgccgcacgatggtgttacagcgcacgttgaccgaacctaggatgtagcccgcgctgtgcgccaggaacggtctgcagtccagcagcaggcacttgccgccgctcggcagccccagggtgccgtggctgccgctgccgcccgcgccgccgccattctcgtcccggttcatcagccttttgagcacactgcagtccatctcccgcagctcctccatcgtcaccatggtcgccgggaaccgaggcggctgggcgcgcgaggaagagaagagaacccgggccgcctaggctgcagaaaggggcgggcgagagctaagaagggacgcctgcagaagtggccgcaaacttggtcctcaagggctcccgcgggagagcctcttcttccctgtccccttcctcccgcagcctcgcggtcacatagcagtcggagcggcctcgggcgcccagccgggcggcgcgcagagcggagggggaggcgccggtggaggagagtgtgtttacgagagaggaccgcggactcttttcggcgacggcctcccgtgtatttttgccggtcgcgcggctcctgtcgccactggcgccagcgctgccctgcctacgctcctccggcgctcagcgcactgccccagccagagttttctcctcggcttagaggtttattaatgctcctccgcgctcccgggggagggggcgctaggtactaccccgccaggccccgccccgttccattccgggccccgcgccgtcccccgccc

SEQ ID NO: 587425 - DNA, 4001 bp, Homo sapiens
tgaaacaggaggaagctaaagaatttcaagtcaagaaagggcaaagttccaccatatcctgaggcaagctgagggagaagccctcaaagtccagccgtcagagttcagttttacctggaaaaccccaaacttccctgattttcttacaccaaagtcacaggctacagctgaatttctagattttgaacagcagtttgccacctgtgctttgtaacattcctggctttctctgataacttcatgacttcctgtgaaattctttaaacagaatccattttaattcactacaatttaaatactacacatgccataaatcactttcagggagagaaaggaagaaggggctgtggtggaaaaaagagaacaaggaatttccagaggtgggaaaaaaattccaggaataacatatcaaaaagaaaatagtagaaattacttaccaaaatgcaaaatatgtgcagcatgcctcagttgtatgaagttgaacaatttaggtaattcagttcaacaatcactgattgaacaccaactacatccagggaaaggagagggcactgaaaagatctacttccccttgggctacactggaggagggcctctagcagaagagttggcccctgcaagtcttggtccttacattcagggagctgccactgctttatgcagagccttgaggatgcagtgacactctcaagccaggtaaggtggtccaggcactcccctgggagctggggccaatcctccaagtaaggccacatttagggagtcaaaggggatttgcagtgattattgggcagttagtgttttttgtttgtttgtttctaaaactttagttcttaaacttcgcgcggagtgaccacattctcattatcctgagcgctgttgaattcttccaaatccttcctagatcggttaagtcattctgtatgacagaacagcttttgatgcctgctcctgtttgaaaaatctgaacgctgtaaaggacgacgcagggagagagtttactgagcacttccacctctttgggtgaaagttgtaaaatatccccttttcgtgtgacagcagatctcacttttggaaacccatgacacatgccaaatgaagtcacaaatcaaatacccctcctaactatcagggtgatgaaagaagtgcacaaggaagatttaatactattttatcggggaggggcgtggaaagaagtactcttttttttttttctttcatctggtagagatggcagactgggttttgtttttcctcctttttatttaaactacaggaacatggttccaactggaatcgcctattaaaaccatccattcttaacagcaaaatcgatatccacggtgtctccgggcaaagcgcccgttaccccgtgagcctctgccacaggtggacgcagagcaacagacactcggttaccctcaggtccctgcgcccggagacagaagccacgcgggcgcgctcgaggtcctgggctctttgtcgagagcccagcgtggcgccgggccccattggttacgcgtccgctcggtgccatcctggtccctcgtccctcccccatcccggcgtccacgacccgggcgcaggccacatggtcctcggattgcccggtcccgggtccccgcaaggcgcgtctacaccacgccgctagacccacgcggcgaggggctgggcttccccgggggccacgggttccgaagtccgcccccgtccccgcctccggagctcaccgctttgagatccagaacgccgtccttggcctcctgcagcagcgacacgaacttggtagtgagcagccccaggctcttctcgtgcctgctgctgccgcccccggcgcccccgagctgcggcggcgggggcggctgcggggcttgcgcctgcggaggctgcggcggcggccgctggccctgcccctgccctgccggcgcctgctggcccgagctcgcgggctctgccgccgccatcgcgtcccggccccgcggtggtcgggcccccgcgcactttcgctcgccggccccgcccgcggccacctgccgggtcggctccgctgcggccgcttccccgcccgccgagagcggtagtgcgggtcgctggctgctgcaaacaacaggtgtgcggcgcccacgggagtctgggccgcttgtcacgccgggcctccgccccctccccaagcccggggaagcgtgaatgaggcccacgaccgaggggggaggggtggaaacgaggagaaggggctgcgaggggtggggacctgagtttaaatggcaggaagtgacgccgccgcccgccgttgcctagaaacacatttttctgtaggaaggaggagcgcacgaggaggaggaggggtgttggcgcgtgtgtttcacactcgcctccctggcgttcgcgagctgacccgaggagtggtaatctcacgcggcaaagcagggaggaagaaaaaaaggagacaaaagaaaaaaagacttttatctgggcagaaagtcacaatgcctagcggccaaacgtttgtgagcggtgaagttggttgactgctcaagtttgcagagcttcagcagtaggttactttctctggacggtttctgctatctttgctcttttcgagctctagcatcgtttgcaaatatttcaatgacttggaccaagtgcagagttttacttcatagctcacccttttagattcggagtacagaaaaaggcatcgtggagttttagggttggttttcatcaatcctttccaaggcctttactttctacatggagaaacgtgtagagggagaggttgtgaattgccaaagacatgccgttagattccagatctcctgtgtttgaccaaagttcttgaccaaagttcttaatatcttatttgaaccaaattatattgtatttggaatattgggtagccacaggcccttggacttcagtgatattccaaactattgatggcaaatgacattatggagatctgagtaaaagaaagtcgttgggattttttcctcattatattacaaactcttgagaatccagactaaattttaaatgacttgttgtcacactcaacactttgaatatagtagacaataaagattaggcgaatgagaccaggcgcggtggcttacgcctgtaatcccagcactttgggaggccgaggcaggcagatcatttgagatcaggagttcgagaccaacctggccaacatggtaaaaccccgtctctactaaaaatacaaaaattagcggggggtggtggtgcccgcctatagtcccagctactccagagcctgaggcaggagaatctcttaaacccaggaggcagacgttgcagtgttgcagtgagccgagatgccaccactgcacttcagcctgggcaacaaagcaagactctgtctcaaataaaaaaaaaaaagattaggtgaatgaaaattctatatggcaataattaatcaagaagatttcatgcaagaaagattttgcttaattttaagtaacaataaactaacaaaaaaggtcactgaagcgacatcaaatacaacagcattaactagtaaagctgaacacaccatttataacacatcataggcacagaactttataacctttattaataacctattcataataacctttattttaatcaaatctataaacaaaacttaaaattgaaaatctgaagtaaaacatgaaaaattcagttgatacaaccattttccaacaacctatccaagaaaggctatctttatttgatttgacatgggacacatcattgacaagttttgcaaatttattttattgattattgtcaagtagtatttcttagaacatactgaattaggaagattctaatttgtttttaactttataacagaacattgtgttatatgtgcagggacaggaattaataacactaaatgtattaatatttttaaaacttacacttctatggtgtcttagtttgagaaagtaccataaactgggtgacttaacggaaattaattttctcacagt

SEQ ID NO: 587426 - DNA, 4001 bp, Homo sapiens
aaaaagaggttgggtgcagtggctcatgcctacaatcacagcactttcagagactgaggcgggtggatcacttggggccatgactttaaaaccagcctagccaacatgatgaaaccccatctttaccaatacacaaaaattacccaggcatggtggttcacacctataattccagctacttgggtggctgaggcaggagactcgcttgagcctgggtggtagaggttgcagtaagccaagatctcaccactgcattccagcctgggtcacagagactctgcctcaaaaataataataataatattaataagtaggaacaataaacatttgatctcagctataaaaagttgcaagaaatgggaaatactaaaaattgttgacagtggttctctgtgagtggttgcatactgggcaagttttactctagagtatattaaccttttcccaagctttctactgatacttcagtaattgtattttaggttggaaaaggaacatcagaaagtatatcctcactttcacaaaaatattaagatgtaagaggaaacttactcataattgaggacagtcagtctttactggtgaaattaaaacaatgatttatttaggaagggatggagcaagatggcagagtaggacgcttcagcaattttccccagcagaaacaccaatttgaacaagcatccatactataacataccttcacaagagctaaataagccatataagagattacactatctggttgcagcacaataataagaaaagtcacattgaagagggtaagaagggcagttttatattaccccgtcatccttccctcaaccctaggaagcacagcaaggagagagacaccatacctttagctccaatgctaggattgccaaagtaaaacctaacactggtgagaccaccacaaccccatgttccaggctagtgcgcatagactgaagctctagatccagcctggtgccaagcaggatcacataacccgaggcttcaggctttcaaggcaaactcaatctctgggctgcaccaatgccaggctgatgtcagcagtccagggctctggacagctcacaataccagggatatctcagtgaactttggcttcagattgcaccactcctgtgctggccacatctgccaaaagcttctggcctgcctcagtgctcaaagtgctgaaagaaaccctgccagccaagaataccaaaccccacaaagctgtccttcagaaatgaagaagagataaagcctgttccagaaaaacagaagataagggagttcatgactaccagaagtgttttacaaaaaatggtaaagggaagtcttcaatctccaaaaaaaaaaaaaaaaaaaggatgctaaggagtaacacaaaacaatctgaaagtctaaaactcacttaaaagtaagtacactgactaaagatataagcaatttatgcagcatcatcacagaattaaagtattctggattttgtgtaaaagttaaaagacaaaactattaaaaatcatagtagctgcaataatttttaagcaatagacgatataaaaagataaaacttgtgacatcaaatattcaaaatgtgaggaggggactggaataaaagcatagaggcttgttaggtttctttttgtttgtttgtttttgcgatcaaacttgttatcagcttaaaataccgcattgtaagatatttttttgtaagcctcatggtaacaacaaagcaaaaacctatagcagatacataaaaaggcaaggaatcaaaacataccactagacaacaacataatttagccacaaaagaagatagaaagaaaggaagaaaatatctacaaaacaactagaaaacaacaaaatgacagtattaactacttacctatgaatgataaccctgaacgtaagtggattaagttctccaataaaaaggcaaagtagttaaatggatttttaaaaacactcaacttatgctgcctataagaggcttgcttcacctgtaaggacgtagactgaaaatgaaagaacagaaaatgatactccatgcaaatagaaaccaaaagaaagcagaagtggctatacatatatcagattaaatagattttaagtcaaaaactataaaaagatacaaaggtcactatataataataaaagggtcaattcagcaacatgagatataacagttgtaaatatgtgtgaacccaatatagcagcacctaaatatataaagaaaacattaataaatctgaagggagagataaacagtaatacaacaatagtaggggatttcaacagcccactttcagtaatggacagaacgtagagacagtaaataagaaaatatcaaatttaaactatactctagatcaaatgaacctaacatccatccaacagtagaagaatacacacgcttctcaactgcacacagaacattctccaggttagattatatatgaggccaaaaaacaaatcataacaaattctagaagactgagataattacaagtatcttttctgacaaaatcattaacaagagaaactacagaatattcacaaatacatggaaatttaaaaacaaaaaacatgctcttaaacatctaatgagtcaatgaaaaaatacaaagggaaactgaaaaatatcttaacaaatgaaaatggaaacaatataacaaaatctatggaatacagcaaaagcagttctaacagggatttttttttatgcttggattgttagagaaaactaaggaggaatttatatatatacacaccatatatataccttacatatatatataccatatatatacaccttatatatacacaccatatatatacaccttacatatatataccatatatatacaccttatatatacatatcatatatatacaccttatatataccgtatatatacaccttatatataccatatatataccttatatatatcatatatacaccttatatataccatatataccatatatataccatatataccttacatatataccatatatacaccatatataccttacatatataccatatatataccttatatataccatatatactttatatatatcatatatatacacacacaccatatatataccttatgtatataccatatatatatataccgtacatatatatacacacacacatacacacaccttaagttctggggtacatgtgcagaacgtgcagttttgttacataggtatacatgtgccatggtggtttgctgcaaccatcaactcgtcacccacattaggtatttctgttaatgctatccctcccctagccccccaaccctgaacaggccccactgtgtgatgttcccctccctgtgtccatgtgttcttgttcaactcccacttacgagtgagaacatgtggtgtttggttttctgttattgtgatagtttgctgagaatgatggtttccagcttcatccatgtccctgcaaaggacatgaactcatcctttcttacggctgcatagtattccatggtgtatatgtgccagattttctttatccagtctaccattgatggatatttgggttggttccaagtctttgctattgtgaatagtgccacaataaacatacgtgtgcatgtgtctttatcatagaatgatttatactcctttgggtgtatagccagtaataggattgctgggtcagatggtatttctagttctagatccttgaggaatcaccacactgtcttccacaatggttgaactaatttaaactcccaccaacagtataaaagcattcctaattctccacatcctctccaacatctgttgtttcctgactttttaatgatcgccattgtaactggtgtgagatggtatctcattgtggttttgattcgcatttttccaatgaccagtgacgatgagcattttttcatatgtttgttggctgcataaaagtcttcttttgagaagtgtctgttcatatcctttgcccactttttgatggggtt

SEQ ID NO: 587427 - DNA, 4001 bp, Homo sapiens
tttctcaaatgaaaattagcctaaattttctgaaaaattataagaaaaaagagccagaaaagagactacagaacgtgtggtacttggcagggaaggaaatagaatcaaggagatactctatcagtatgttgtgaagaaaaatgatatttaccatttgggactgtcagttttaggatatacatgaataaaagttgagaataaatttcataaactgccctagtaaccacagccatcacctttccaaatattgttagtgtcattgttttataaatatttgccaacttgaataacttcaatgctaactggaggtaaaatttaaaggttgttttttttttcccaataaaaaatagaaactgggtcttttagtgattacagaatagaattctctccctagcaatcaagaatatcctcattctgcagaaaacttccttttgtgattaataaaagaggagaactgatactcattgactgtctactatgaaccatgcactatcaaaatgttaacacacaactcaaaaagccatcttatgacatagatactattgtccttgtttcattgaattaaacacagagtaagcacatccagtgactccattcaaacctaggtatatttaattcaaaagccaagaacatctcatgaacaaggaacattcttaataattcagtgatactaccacttccaagataaattttccaaccagttgcactaaaatagggaaaatgcgatcaagccacactttgattttatcaatcacactgactggcaggcaggaatatcctttgagacctgtatttacttaatgtccctattcatctaaatgaatatatattagcacctactatgtttcagtcgctactttggatttggaagctgggaaatactaccaactccgcatggggaaactctgcgttcactcccagttgtcatgagcttgcccataaacttatccctgaggaatgcaagaaactaaggaggcaggacgtccatcagtcttgctcattctggtatttataggtctcagtcaaagccgggcacatagtaggtactcaaatatttgttgaatggaaggaaactaacattccttgagcacttgaacgctcaagacaatgttcgatcacctcactggaatcctaaggacaaccaaaagaggtaggtttttcactactcccgtttaatagatgaggttgacagacttagattcacttacccaggatttaaagggactgacccgaaagcccaaggctctccctacatcatatcctacttaagaaaccttttaattgtgtgcacattgcctcagtgcgatttttgaaatgccctctagatcaccaatttgataagtatcttacgctactttacactttagttgctttaaaacactttctagaacggaacaatgttaatataatctaatcttaacattaaatttccttaaaaattacaaagacaaaaatttgaggtatatcagaatgagattcaaaactatgaggcaatgtatcctcattaaggctttttgaagaaatgacaactctaggaaatcaagaatgagagctctgccatgttaacggaaaaaaaatacaattaaaaaaagaatgctacattagaaactgatagatcaaatgtattatatcttttcttgttgaaattctcggtaaactgctagaggtcctttcaagtagcctcaatacatcacaattcacaaaacaagcaaagccaaaatctatgttcggtacatactaaacaggtgctgtatttctaaaactctatttacgaatcttttcataccaaaatttgaaaaccatatgatctagtacagtccagaatatcctcaaactataactctctgaagtgggttagaaaatattacaaagctcccaaaataaaatttacctgaactcacttaaatttgataaataaaggtttgagcagcggcccgtaagagaaggggaaacagaagcggagtgtgagagctggtagtaaaatcgaacattctgtgccatgtctggcaaccgagagtcaggccctcaagtatgtgacaccactggggcggttccgaaggcggagtaaggtctccagaataactcaaaaggaaagagtttcataacttaagtggtttcatttcagattacccacgtgaaatttgttgatgaaaaaaaaatcatacccactgcacagatgagaaaaacaggagcgttttcaggttatacaagccgacgcctggcgcccggcgtgacgtgaaacgctctaagttgctggagctggataccaggtgaactgagatttaaattgtggaaaaatcggcctggagaggtacaaggcctgtagacggagggcagtaaggtcacgcaaatttccctgaggaaggcggctttggaggctgcgtgctttccgggccggtaccccacagcccagtctcccacgcgtgagcggagcatggcgaatgctgcacgcctgggtcccgctcccagtcgcagtttcctcaccccagaggtcaccctgacccggaaacagtacccagagcagctgtcgggcgtcgagggaggtctggtggaagggcgaaaggaaggtgggagggcgggaagtgcgcggctaggcggagggccgacggcgaagggcagacaatgccccagaggctagggctggggtcgggatgggggtagggagaggaaagcccctcccaggcacgcgcgaaccgcacacactcacctgcccctccccctccccgcccgcccggcggaggctccgagctgccgcgggccgcgcgcgcacacaaggcgcgctcacgcgcgctgcctgtctcttcctcgagctcgcgctccgcccgctcactcccagccccgctcattcaaagccgggcgcgcgctccgtagcagcctgcgttgcctctgcgcagctgccatggccgccccttcatcgggaaacccgcccccagcccctcctctagccccgcccccagccctccttgaaggcggctctcggctgtctccaggccctcgcttctgcactccgcctcaggtcctggctggcccaataggtgagaggctacgggtctgacgtcgagactgggagccaatgagccctgggagcggggcaagcggcgacaggcacgccaggttcggtgaggggtagctttttgggactattgcgagctgctttgactgtttattctcggagcgcctgcttctgccagatgtccctactttccttctatgcagagtgcctcccctccagcaaagtccctttctgttcaacccacagaacccctgtgtcagatgcgaccaaggaaaatacactgcaacaaatgagggatctccctctgtctcaggaagatttggatgtggctagacagaccccctcccctcagtcattccgccacctcaaagatgtggaatgctgagtttaattcaagacgtagcctcctcccagtaatttttaattgaattgtgttgaactagaaatgaagaagtggcacttcaccgtgtccatgcatttgttcctcacatgcaccctggacttgcccttctttcaacctgagatgttctttccttcagtgcttctctctttgcagcctgattcttctttttatcttgtatgctatgaaaggggttgttatgtgcaggggaccctcagaatactatgctccacagttgcaaagtgactggtgagggagaagtgaatagggtctaaggccaaaatcagtttatgcaaattgttctcaacaagcctttttctttatatgcctttaatttttttttttattacagctgcctttgttctcccaccctgacccagcaaccacctacccacttaactttgtgataatctaccacaaccgtcctctttccaatttgcaccacgttttttattaataatttaatttccaagacgggaaagatgtgtttatggctcgtgctctggaatggttctgtgtaaagttgggtaaaattatttaatctgttcacctcaatttcctcatcagtaaaatggccataatagtgcc

SEQ ID NO: 587428 - DNA, 4001 bp, Homo sapiens
tttcattgaattaaacacagagtaagcacatccagtgactccattcaaacctaggtatatttaattcaaaagccaagaacatctcatgaacaaggaacattcttaataattcagtgatactaccacttccaagataaattttccaaccagttgcactaaaatagggaaaatgcgatcaagccacactttgattttatcaatcacactgactggcaggcaggaatatcctttgagacctgtatttacttaatgtccctattcatctaaatgaatatatattagcacctactatgtttcagtcgctactttggatttggaagctgggaaatactaccaactccgcatggggaaactctgcgttcactcccagttgtcatgagcttgcccataaacttatccctgaggaatgcaagaaactaaggaggcaggacgtccatcagtcttgctcattctggtatttataggtctcagtcaaagccgggcacatagtaggtactcaaatatttgttgaatggaaggaaactaacattccttgagcacttgaacgctcaagacaatgttcgatcacctcactggaatcctaaggacaaccaaaagaggtaggtttttcactactcccgtttaatagatgaggttgacagacttagattcacttacccaggatttaaagggactgacccgaaagcccaaggctctccctacatcatatcctacttaagaaaccttttaattgtgtgcacattgcctcagtgcgatttttgaaatgccctctagatcaccaatttgataagtatcttacgctactttacactttagttgctttaaaacactttctagaacggaacaatgttaatataatctaatcttaacattaaatttccttaaaaattacaaagacaaaaatttgaggtatatcagaatgagattcaaaactatgaggcaatgtatcctcattaaggctttttgaagaaatgacaactctaggaaatcaagaatgagagctctgccatgttaacggaaaaaaaatacaattaaaaaaagaatgctacattagaaactgatagatcaaatgtattatatcttttcttgttgaaattctcggtaaactgctagaggtcctttcaagtagcctcaatacatcacaattcacaaaacaagcaaagccaaaatctatgttcggtacatactaaacaggtgctgtatttctaaaactctatttacgaatcttttcataccaaaatttgaaaaccatatgatctagtacagtccagaatatcctcaaactataactctctgaagtgggttagaaaatattacaaagctcccaaaataaaatttacctgaactcacttaaatttgataaataaaggtttgagcagcggcccgtaagagaaggggaaacagaagcggagtgtgagagctggtagtaaaatcgaacattctgtgccatgtctggcaaccgagagtcaggccctcaagtatgtgacaccactggggcggttccgaaggcggagtaaggtctccagaataactcaaaaggaaagagtttcataacttaagtggtttcatttcagattacccacgtgaaatttgttgatgaaaaaaaaatcatacccactgcacagatgagaaaaacaggagcgttttcaggttatacaagccgacgcctggcgcccggcgtgacgtgaaacgctctaagttgctggagctggataccaggtgaactgagatttaaattgtggaaaaatcggcctggagaggtacaaggcctgtagacggagggcagtaaggtcacgcaaatttccctgaggaaggcggctttggaggctgcgtgctttccgggccggtaccccacagcccagtctcccacgcgtgagcggagcatggcgaatgctgcacgcctgggtcccgctcccagtcgcagtttcctcaccccagaggtcaccctgacccggaaacagtacccagagcagctgtcgggcgtcgagggaggtctggtggaagggcgaaaggaaggtgggagggcgggaagtgcgcggctaggcggagggccgacggcgaagggcagacaatgccccagaggctagggctggggtcgggatgggggtagggagaggaaagcccctcccaggcacgcgcgaaccgcacacactcacctgcccctccccctccccgcccgcccggcggaggctccgagctgccgcgggccgcgcgcgcacacaaggcgcgctcacgcgcgctgcctgtctcttcctcgagctcgcgctccgcccgctcactcccagccccgctcattcaaagccgggcgcgcgctccgtagcagcctgcgttgcctctgcgcagctgccatggccgccccttcatcgggaaacccgcccccagcccctcctctagccccgcccccagccctccttgaaggcggctctcggctgtctccaggccctcgcttctgcactccgcctcaggtcctggctggcccaataggtgagaggctacgggtctgacgtcgagactgggagccaatgagccctgggagcggggcaagcggcgacaggcacgccaggttcggtgaggggtagctttttgggactattgcgagctgctttgactgtttattctcggagcgcctgcttctgccagatgtccctactttccttctatgcagagtgcctcccctccagcaaagtccctttctgttcaacccacagaacccctgtgtcagatgcgaccaaggaaaatacactgcaacaaatgagggatctccctctgtctcaggaagatttggatgtggctagacagaccccctcccctcagtcattccgccacctcaaagatgtggaatgctgagtttaattcaagacgtagcctcctcccagtaatttttaattgaattgtgttgaactagaaatgaagaagtggcacttcaccgtgtccatgcatttgttcctcacatgcaccctggacttgcccttctttcaacctgagatgttctttccttcagtgcttctctctttgcagcctgattcttctttttatcttgtatgctatgaaaggggttgttatgtgcaggggaccctcagaatactatgctccacagttgcaaagtgactggtgagggagaagtgaatagggtctaaggccaaaatcagtttatgcaaattgttctcaacaagcctttttctttatatgcctttaatttttttttttattacagctgcctttgttctcccaccctgacccagcaaccacctacccacttaactttgtgataatctaccacaaccgtcctctttccaatttgcaccacgttttttattaataatttaatttccaagacgggaaagatgtgtttatggctcgtgctctggaatggttctgtgtaaagttgggtaaaattatttaatctgttcacctcaatttcctcatcagtaaaatggccataatagtgcctacttcatgcagtagtaatgcttgcaaagctctcttagcacagagcctggcacatagcaaacattcatagataacagttgttgctgcagctactactactactgcattactattgcattactacagtatcatttccggtaattgcatttcccaaaggccatgcaacccctttcagtcccttaaacacctgctctaactttaatctctagaattctaatgcctaaatttcaatataaaatttctaaattttttttggatttaaaaaatcgagttatctagctgggcacggtaactcatgcctgtaatctcagcactttgggaggccgaggcaggaggaacgcttgagcccaggaatttaagaccagcccaggcaacgggcgaaactccgtttctacaaataatttaaaaattagccaggtttggtggcgcatgcctgtagtcccagctactcagaaggctgaggtgggaagaatcacctgagcctgggaggtcgagactacagtgagccatgattgggccctgcactccagcctgggagacagagcaggacc

SEQ ID NO: 587429 - DNA, 4001 bp, Homo sapiens
atgagcttgcccataaacttatccctgaggaatgcaagaaactaaggaggcaggacgtccatcagtcttgctcattctggtatttataggtctcagtcaaagccgggcacatagtaggtactcaaatatttgttgaatggaaggaaactaacattccttgagcacttgaacgctcaagacaatgttcgatcacctcactggaatcctaaggacaaccaaaagaggtaggtttttcactactcccgtttaatagatgaggttgacagacttagattcacttacccaggatttaaagggactgacccgaaagcccaaggctctccctacatcatatcctacttaagaaaccttttaattgtgtgcacattgcctcagtgcgatttttgaaatgccctctagatcaccaatttgataagtatcttacgctactttacactttagttgctttaaaacactttctagaacggaacaatgttaatataatctaatcttaacattaaatttccttaaaaattacaaagacaaaaatttgaggtatatcagaatgagattcaaaactatgaggcaatgtatcctcattaaggctttttgaagaaatgacaactctaggaaatcaagaatgagagctctgccatgttaacggaaaaaaaatacaattaaaaaaagaatgctacattagaaactgatagatcaaatgtattatatcttttcttgttgaaattctcggtaaactgctagaggtcctttcaagtagcctcaatacatcacaattcacaaaacaagcaaagccaaaatctatgttcggtacatactaaacaggtgctgtatttctaaaactctatttacgaatcttttcataccaaaatttgaaaaccatatgatctagtacagtccagaatatcctcaaactataactctctgaagtgggttagaaaatattacaaagctcccaaaataaaatttacctgaactcacttaaatttgataaataaaggtttgagcagcggcccgtaagagaaggggaaacagaagcggagtgtgagagctggtagtaaaatcgaacattctgtgccatgtctggcaaccgagagtcaggccctcaagtatgtgacaccactggggcggttccgaaggcggagtaaggtctccagaataactcaaaaggaaagagtttcataacttaagtggtttcatttcagattacccacgtgaaatttgttgatgaaaaaaaaatcatacccactgcacagatgagaaaaacaggagcgttttcaggttatacaagccgacgcctggcgcccggcgtgacgtgaaacgctctaagttgctggagctggataccaggtgaactgagatttaaattgtggaaaaatcggcctggagaggtacaaggcctgtagacggagggcagtaaggtcacgcaaatttccctgaggaaggcggctttggaggctgcgtgctttccgggccggtaccccacagcccagtctcccacgcgtgagcggagcatggcgaatgctgcacgcctgggtcccgctcccagtcgcagtttcctcaccccagaggtcaccctgacccggaaacagtacccagagcagctgtcgggcgtcgagggaggtctggtggaagggcgaaaggaaggtgggagggcgggaagtgcgcggctaggcggagggccgacggcgaagggcagacaatgccccagaggctagggctggggtcgggatgggggtagggagaggaaagcccctcccaggcacgcgcgaaccgcacacactcacctgcccctccccctccccgcccgcccggcggaggctccgagctgccgcgggccgcgcgcgcacacaaggcgcgctcacgcgcgctgcctgtctcttcctcgagctcgcgctccgcccgctcactcccagccccgctcattcaaagccgggcgcgcgctccgtagcagcctgcgttgcctctgcgcagctgccatggccgccccttcatcgggaaacccgcccccagcccctcctctagccccgcccccagccctccttgaaggcggctctcggctgtctccaggccctcgcttctgcactccgcctcaggtcctggctggcccaataggtgagaggctacgggtctgacgtcgagactgggagccaatgagccctgggagcggggcaagcggcgacaggcacgccaggttcggtgaggggtagctttttgggactattgcgagctgctttgactgtttattctcggagcgcctgcttctgccagatgtccctactttccttctatgcagagtgcctcccctccagcaaagtccctttctgttcaacccacagaacccctgtgtcagatgcgaccaaggaaaatacactgcaacaaatgagggatctccctctgtctcaggaagatttggatgtggctagacagaccccctcccctcagtcattccgccacctcaaagatgtggaatgctgagtttaattcaagacgtagcctcctcccagtaatttttaattgaattgtgttgaactagaaatgaagaagtggcacttcaccgtgtccatgcatttgttcctcacatgcaccctggacttgcccttctttcaacctgagatgttctttccttcagtgcttctctctttgcagcctgattcttctttttatcttgtatgctatgaaaggggttgttatgtgcaggggaccctcagaatactatgctccacagttgcaaagtgactggtgagggagaagtgaatagggtctaaggccaaaatcagtttatgcaaattgttctcaacaagcctttttctttatatgcctttaatttttttttttattacagctgcctttgttctcccaccctgacccagcaaccacctacccacttaactttgtgataatctaccacaaccgtcctctttccaatttgcaccacgttttttattaataatttaatttccaagacgggaaagatgtgtttatggctcgtgctctggaatggttctgtgtaaagttgggtaaaattatttaatctgttcacctcaatttcctcatcagtaaaatggccataatagtgcctacttcatgcagtagtaatgcttgcaaagctctcttagcacagagcctggcacatagcaaacattcatagataacagttgttgctgcagctactactactactgcattactattgcattactacagtatcatttccggtaattgcatttcccaaaggccatgcaacccctttcagtcccttaaacacctgctctaactttaatctctagaattctaatgcctaaatttcaatataaaatttctaaattttttttggatttaaaaaatcgagttatctagctgggcacggtaactcatgcctgtaatctcagcactttgggaggccgaggcaggaggaacgcttgagcccaggaatttaagaccagcccaggcaacgggcgaaactccgtttctacaaataatttaaaaattagccaggtttggtggcgcatgcctgtagtcccagctactcagaaggctgaggtgggaagaatcacctgagcctgggaggtcgagactacagtgagccatgattgggccctgcactccagcctgggagacagagcaggaccctgactcaaaaaaaaaaaaaaaaaaaatccaaaataacctatattcggatataaacgtgtttaaattttttttcttaaagagttgattgctttagacaatttattatgcccaaggatattttcttctttttcctgattcttcagttttctttattaaatttgccatttccaaatgaaacaaaacgaaatgtatatacttttccagaaacagctagttactgagtacttgtttcccaacacaatagcaaaacagaaaacaaagctcgctaaagactgcaaatttaaaatttactttagtaatacctataaaataatattttaaaatcatctttacttgttaaatagtaagcccataattgggatcacaagtcaata

SEQ ID NO: 587430 - DNA, 4001 bp, Homo sapiens
gaaggcgccctcgagcgtgctgagtgtgtgcacacgcttcccagccaaccggtcgcagtcacagcccacctggccatcagatcccatttcaccgaagacttggggctgaggtgaacgcacagattgcgggagctgccctgcggcgctggggtctcccaggttgaaccccggtgcgcaagcaccttcattcactcttttgaaaggggtaacattttggctaagctctcccccactaagtctgctccttccagcttcaacaaactttttgatcccgggaaggaaggaaagcgagggaggcgtctttaaggagcccagctaaggaaatgcgcggcacagttggctctgcggtgctgccttatttcccttagctcgcaggcgggccagtcccgaagcgctgcggaaagccgcggccgccgcgctgtgcggtctgccggagggaaatccgcgctccccgggccacaggagggagggaaccgccgccggcccaagtcccggagcgataaaacttctgctttctccgctccaagggtagaggccggttcgctctacccgggacacctggccagtttgggaaagggatcatttctccgtgtgatgttggcacttaaatgtgggtggccaggagggcagcaggggaagcgagggtagtggaagaagttcatcggctctttgggggtagaagggctgcctctctcgcagacaaggacctggaggccacaaatcccaactcagtagtggtgatgagagagtgggaccgtaatgtcttcgtagggtggcaccccggacatggtatttactatcccagcacgcagacgcctaaacacaaagtcaacttcagggatccgcaaaaccagaggctggcgatccctgagccagtctagctgctggtggccttttctcgcctctttcttcttccgcaactctttctactgtgactcagtattttctcttcttttaaatctcttcttttctccagttccctagctccgttcgtctggctcactgttttatctttgagccgggaccctccagcctgtcccccctcccagagctcccggccgcctcgtcttcccgggcagccgctccggcttttcccgctcccctcgccgccgccaccctctggccgccggcctcccaggctccaggaatcgcccagcaagatgcgggaggtaggcgctcgcaggcggcgtggcgaagccaagagtggccaggaagccggctttcctcccgcgccgccactgccagcgccggtgttcacgctccgttcggggccaggccggctcggcttgcaggactaggggctgagctgggagatgttgggggctactttatttttccttgcaaagagtggactgtggtaaaggagagggagagaaacgcctacgacccaggcagttcaggaactcgagtgccggctgccgggtgagcgttcgcctgactgcagcgatctgcttgcccgagggcgagccccagcgcgcagggcctgggcgacagatggggggacagggagagagaaaggcacggggtgcgcggggggggtgcacacggagagacagaccgtaagagcgagagacagcataataattgcgcggccgtgtcgttacctctgcgcggcgacattagcgtccaccactccgacattccggacccaggacctgaccgaatccatctccgcgcccagcgatttctctttcagagttggtcctcttcctaaagtatcttgaattccaaacatttaaaaagtctgatcctctactgtcgctttaaaagtaagagttacaacacagtcctgactgttcccaacgttgccagcaaatcgtctcctccaaagcaatccaagaaaagggatcaagtgcccaagtttgagtcttagaaaaaaaaaaaagataacccgtcctttgcttcactggcgaggtgcggactgatgtagtcaaagtttgggttcttatcctccgcaagttcagatctgccgcctcagccactccaccctaggtcgctcgcatccttccagctgcagtgctgcctcctgaaagtgatcacaatttagaagcatcacctgttctgggagaaactggaggaaattgatggctgcctaatctctccccttcctccaggtcccccctccctgctcctccccaccgttccaatttagaaaaaaaaaaaatccccaacaggatcagttgtaaaaagaaggggaagacctggagccgagaggaggcggtggctgcgagcgccacggagcccggctgcagccgcgcgcgggccccatgaatgggttactacggccctggctgcgggaggcggagctgcggcccgataaggagcctcatttgcatggacgcgcgggattggccggcgcctggcaagccgggccgacgtcctccggcggcgcgcgccacgctctgcgttgccgggactccgggaggtgaaaggggacagaaagctgcgggcgtcgagtcctagcacgaaccccgtgtgcttgcgcaggattggggggcccccacaccctgcactgacttagggtagcaggtctctgcgggctggggacgcaggggttcggcctggctgcgggaagcctccctggatcctgcctctagatgtaggcttttgtagcctgccgggaggcacgttcgttcccggggttcggatctgtgtgcatgcttgtgagcgtggccacatgtgcttatgttttgcgcaaacgtcccccagagcacccagctccctgaatggctccccaggtctcctggagttccatggtgatatcagatgttgtgtgcggcttgcacgttgctgagagtggagaacatatgaaagaaggcgggggatggggtggggcggacaagcgaggggcaagtgctgctcaaatacagtgctggggaaaacggtccaggacctaaggaaaacacccgcgggcgggcgggcgcgagcggcagtcgcacccgtgtggaggagaggttgctgacagatcgaggcgggctgagtgcgcgagcggccggggagtattcccgcgggtcctccggttccctccccacctctccgttcccgaagcccccggtagtgggcggggagggacgggggagtcgtggaaacttcgcccaccgcgcgcggtcgccgcggtgctggccgcgggctggtggccggcaggcggtggcagcagcctcaccgaacagctgaaaccctagacggttttttaactgcgcggggctgctcgcggtgcctattaaacatcctcctggctgggtgtcattttcttgcttctccttttgtattctgatctgcgcatagatctgctgctgctgaaatctagaacaccagcgcgaaaacagatttgaagacaatgaatgcaaatctgtgctcaaagaccatctgccgtggaggagacaatcagctgttcgtagttcgagcgattgcgccccagtctcccggtctcattacggggagggcatttgcgagcgcctggactgcgttcagggcactttctcccctcttgggtctcagatttgagagaccagatcccttaggtgtaggtgagcgctcgcaaatgaactgctagagtttgccgctagaggacacagcgccttgcaactggtttgcctaggctgacaggaagcttgcacttcaagaaaactcggctctctcgagaaagggaccggtgcgcgcctccacctccccaagggacaaaccgcggcaccacgctgcgtgcgcgggattgcgactaggaagtgctggtccgaactgcggagattcgcttgaaaacggatagggggttagggagtttgcggggcgggtgcacggaccgtctctgcacaggccccgggatccagggactggggtcattgatttgggggaaggtagagaaggtaaaccccccgcctctgggttgtgttgactgtggtaccccgaccccagagctctggcttggtcctccctgttggactggaaggggcgggagagccatacagggcgattgggaaatggatcgggtggctagtaaaagccaa

SEQ ID NO: 587431 - DNA, 4001 bp, Homo sapiens
ccaaccacgtcttttcttaaatgccactgcaggccagctccatggccagccctgcttgaggggctctggccgacctgcctgcccggcgcagcccctgtgcctcctgggtgactccagcacggcacaggctttctggaaccccagacaatacccacgccacacctcacacggcacccttggctgtcagcgaggtgggagagctggagacctgtggcaggctcctacaccagcacttagcataactcactgccaccagcttccaacacgctgatgtcaccttaacacactggcacaggatgatgacccacaaatcctcaatgccacatttcctgtcctcagcccccagaaggctgacgccagtgcacggcacagcccaggtactctttgtccatcatcaagcacgtgtgcccacctgtgctaaaccttgcagcctcacccagcaacccgggagcaaagcccagagggcctagtcctccagaggaggcgggaggcagcgggggctctgtcggctgggcgctcactctgccagcactgactgcgtgtgaaccctgcagcagcccaggggagatgctgctgtctcacaggattggcactgcgcccagaaagcctctacagaggcaggtctaggagcctggctgggcctgaggcatgtggtgagaaggcgaaggtgagcgtctacttcctcagaggacgctcgggggctccttccacacctgcccagcccctcagctgcatcccccacccccagaacggggctgggcacacacgggctccggaagtaaccaactgcctgcgagccagctgcttaaggctcatggggtccagatgacggggtgggcggagctgtagaaggaggctgctcaggtgagatggcctggcctgcctccctgggaggtgagccgcaggcagtgtcaacttaagaagcaccccgccctgtcgggcagggacaaccccaagtttagctacacagttcttctgctgccaggcggtccttcattctggaaaccaatcctgacgtctcatcaggtccccaacccactccgccccctttgccttcttccttccacttaaagcctctgaaagtactacttcttagcaacagcatccccgcccccttcagagactgcccgaccaccctatccaaatcaagagacagaaattttgacccagtcacagtacaggcttattcctttccgtgctcactagcgtctaagttccaaaagtgttgcgtccgtgcctatcccctccgtgctcagctgatgcgtgcagtaactggtgcttgacaaagacgtggtgtacgaaggtctgcaggccagagaaacagctggggcagatgtctggtctcccacggagacggcagcaaacacaggccttaggccccagcagcctggccgaggggcttccacgaccgggatgcgccgtgagacagtgctcccggcgcccccgtcccgcggacgccctccaagccggccacgtggcctccgtcgccccgcctctctgcgctcgccccaagtgccgcacttggcccacggcccctaagcccgcgctggcgcacttgtgcctcagtccctaacggcgcgagcttctggcgcagcccgggccgcccgccctcccggcccctcgggcgtctctgtcgcgcccgactccttccggcgggggccgcggtactcacacgccagccaaggacgcggcgaccaaggaggaggaatcggcggacgcgggaagactgatgaaagggagggccgcccgggccgcgcacgggaaatgaagcactgggctctaccaagagccacgggccgggggcccgggggggggacgcgacccttgcacacgccccgcctggccgccaggaccctcgacgcgccgtgccccgacacttcaaaggcagaattccgttggagatgaccgcggaggccgctcttccccggaggagtctgcacaagtgctgggaacgggcggcagcgcgcgcgccccccctgcgcttcgcggccagtggtgtcgccggtgggggcgggtccggcagccggcaagcgccgagtgacgcacgaggcggccagcgcgcaggcgcggggcggggccgggccgggctaggtcagcgcgcgtgcgcccgccaagctgcgggacaaaggggagggacccgtgcggccccgcccccgagtgccccgccccgagcggctgggcgtgtggctcccgcgacccgcgcggcccgggtcccccccgccgcagccatgtaccccgcgggccccccggccggcccggtaccgcgccgcggccgccgtcccctgcccgggccccccgcgcccgccccagcccccgtccccgctgcacggccgccgccccccgcgcccgggccgcggccccgcgtggccgtgaagatggccttccgcaaggcctactccatcaaggacaagctgcaggccatcgagcgcgtcaagggcggcgagcggcaggccagtgtgtgccgcgacttcggcgtgccgggcgggacgctgcgcggctggctcaaggacgagcccaagctgcgctggttcctggagcagctgggcggtgaggtgggcactcagcgcaagaagatgcggctggccaacgaggaggagatcgaccgcgccgtgtacgcctggttcctggcgctgcgccagcacggggtgccgctgtctggcccgctcatccaggcgcaggccgaggccttcgcgcgccagatctacgggcccgagtgcaccttcaaggccagccacggctggttctggcgctggcagaagcgccacggcatctccagccagcgcttctacggcgaggccgggcccccagccccgagccccgcgcccggcccgcccgtcaaggaggagcccgcgctgccctccggcgccggccccctgcccgaccgcgccccggccccgccgcccccggccgagggcggctacggggacgagcagatttacagcgccagcgtcaccggcctctactggaagctgcttccggagcaggctgcgcccccgggcgcaggggaccccggggcggggggctgtggccggcgctggcggggcgaccgcgtaacggtgctgctggccgcaaacctgaccggcagccacaagctgaagccgctggtcatcgggcggctgccggacccgcccagcctgcgccaccacaaccaggacaagttcccggcctcctaccgctacagccccgacgcctggctcagccgcccgctgctgcggggctggttctttgaggaatttgtcccaggcgtcaaacgctacctgcgccgaagctgcctgcagcagaaggccgtgctgctggtggcccacccgccctgcccaagcccagctgccagtatgcccgccctggacagcgaggatgcccccgtgcggtgcaggccggagcccctcggtcccccggaggagctgcagacaccggatggcgctgtgcgggtgctgttcctgtccaaaggcagcagccgggcacatatccccgcaccgctggagcagggcgtggtggccgccttcaaacagctgtacaagcgcgagctgctgcgactggctgtgtcctgcgccagcggctccccgctggacttcatgcgcagcttcatgctcaaggacatgctctacctggctggcctctcctgggacctggtgcaggcgggcagcattgagcgctgctggctgctgggcctgcgggctgccttcgagccccggcccggcgaggacagtgctgggcagccggcccaggccgaggaagccgccgagcacagcagggtgctcagcgacctcacccacctggcggctctggcctacaagtgcctggctccggaggaggttgcggagtggctgcacctggacgatgatgggggtccgcccgagggctgcagggaggaggtgggcccagccctgccccctgcagcgcctccggccccagccagtctgccctctgccatggggggcggagaggacgaggaggaggccaccgactatggagggacctcagtgccgactgccggggaggcc

SEQ ID NO: 587432 - DNA, 4001 bp, Homo sapiens
agagacggggtttcaccatgttggccaggatggtctcgatatcctgacctcatgatctgcctgcctcggcctcccaaagtgctgggatcaccagcatgagccaccacgcccagccgcctttggtctttttaagagaaaaaactccacagttccacattcccactcagccactttcctgtctgacccctggatattccagccccactgggaaacgccagcctgtcctgcatatctcagagcactcactgtagctacccaacccaccctgccccaggccaagccccgccccaaccacgtcttttcttaaatgccactgcaggccagctccatggccagccctgcttgaggggctctggccgacctgcctgcccggcgcagcccctgtgcctcctgggtgactccagcacggcacaggctttctggaaccccagacaatacccacgccacacctcacacggcacccttggctgtcagcgaggtgggagagctggagacctgtggcaggctcctacaccagcacttagcataactcactgccaccagcttccaacacgctgatgtcaccttaacacactggcacaggatgatgacccacaaatcctcaatgccacatttcctgtcctcagcccccagaaggctgacgccagtgcacggcacagcccaggtactctttgtccatcatcaagcacgtgtgcccacctgtgctaaaccttgcagcctcacccagcaacccgggagcaaagcccagagggcctagtcctccagaggaggcgggaggcagcgggggctctgtcggctgggcgctcactctgccagcactgactgcgtgtgaaccctgcagcagcccaggggagatgctgctgtctcacaggattggcactgcgcccagaaagcctctacagaggcaggtctaggagcctggctgggcctgaggcatgtggtgagaaggcgaaggtgagcgtctacttcctcagaggacgctcgggggctccttccacacctgcccagcccctcagctgcatcccccacccccagaacggggctgggcacacacgggctccggaagtaaccaactgcctgcgagccagctgcttaaggctcatggggtccagatgacggggtgggcggagctgtagaaggaggctgctcaggtgagatggcctggcctgcctccctgggaggtgagccgcaggcagtgtcaacttaagaagcaccccgccctgtcgggcagggacaaccccaagtttagctacacagttcttctgctgccaggcggtccttcattctggaaaccaatcctgacgtctcatcaggtccccaacccactccgccccctttgccttcttccttccacttaaagcctctgaaagtactacttcttagcaacagcatccccgcccccttcagagactgcccgaccaccctatccaaatcaagagacagaaattttgacccagtcacagtacaggcttattcctttccgtgctcactagcgtctaagttccaaaagtgttgcgtccgtgcctatcccctccgtgctcagctgatgcgtgcagtaactggtgcttgacaaagacgtggtgtacgaaggtctgcaggccagagaaacagctggggcagatgtctggtctcccacggagacggcagcaaacacaggccttaggccccagcagcctggccgaggggcttccacgaccgggatgcgccgtgagacagtgctcccggcgcccccgtcccgcggacgccctccaagccggccacgtggcctccgtcgccccgcctctctgcgctcgccccaagtgccgcacttggcccacggcccctaagcccgcgctggcgcacttgtgcctcagtccctaacggcgcgagcttctggcgcagcccgggccgcccgccctcccggcccctcgggcgtctctgtcgcgcccgactccttccggcgggggccgcggtactcacacgccagccaaggacgcggcgaccaaggaggaggaatcggcggacgcgggaagactgatgaaagggagggccgcccgggccgcgcacgggaaatgaagcactgggctctaccaagagccacgggccgggggcccgggggggggacgcgacccttgcacacgccccgcctggccgccaggaccctcgacgcgccgtgccccgacacttcaaaggcagaattccgttggagatgaccgcggaggccgctcttccccggaggagtctgcacaagtgctgggaacgggcggcagcgcgcgcgccccccctgcgcttcgcggccagtggtgtcgccggtgggggcgggtccggcagccggcaagcgccgagtgacgcacgaggcggccagcgcgcaggcgcggggcggggccgggccgggctaggtcagcgcgcgtgcgcccgccaagctgcgggacaaaggggagggacccgtgcggccccgcccccgagtgccccgccccgagcggctgggcgtgtggctcccgcgacccgcgcggcccgggtcccccccgccgcagccatgtaccccgcgggccccccggccggcccggtaccgcgccgcggccgccgtcccctgcccgggccccccgcgcccgccccagcccccgtccccgctgcacggccgccgccccccgcgcccgggccgcggccccgcgtggccgtgaagatggccttccgcaaggcctactccatcaaggacaagctgcaggccatcgagcgcgtcaagggcggcgagcggcaggccagtgtgtgccgcgacttcggcgtgccgggcgggacgctgcgcggctggctcaaggacgagcccaagctgcgctggttcctggagcagctgggcggtgaggtgggcactcagcgcaagaagatgcggctggccaacgaggaggagatcgaccgcgccgtgtacgcctggttcctggcgctgcgccagcacggggtgccgctgtctggcccgctcatccaggcgcaggccgaggccttcgcgcgccagatctacgggcccgagtgcaccttcaaggccagccacggctggttctggcgctggcagaagcgccacggcatctccagccagcgcttctacggcgaggccgggcccccagccccgagccccgcgcccggcccgcccgtcaaggaggagcccgcgctgccctccggcgccggccccctgcccgaccgcgccccggccccgccgcccccggccgagggcggctacggggacgagcagatttacagcgccagcgtcaccggcctctactggaagctgcttccggagcaggctgcgcccccgggcgcaggggaccccggggcggggggctgtggccggcgctggcggggcgaccgcgtaacggtgctgctggccgcaaacctgaccggcagccacaagctgaagccgctggtcatcgggcggctgccggacccgcccagcctgcgccaccacaaccaggacaagttcccggcctcctaccgctacagccccgacgcctggctcagccgcccgctgctgcggggctggttctttgaggaatttgtcccaggcgtcaaacgctacctgcgccgaagctgcctgcagcagaaggccgtgctgctggtggcccacccgccctgcccaagcccagctgccagtatgcccgccctggacagcgaggatgcccccgtgcggtgcaggccggagcccctcggtcccccggaggagctgcagacaccggatggcgctgtgcgggtgctgttcctgtccaaaggcagcagccgggcacatatccccgcaccgctggagcagggcgtggtggccgccttcaaacagctgtacaagcgcgagctgctgcgactggctgtgtcctgcgccagcggctccccgctggacttcatgcgcagcttcatgctcaaggacatgctctacctggctggcctctcctgggacctggtgcaggcgggcagcattgagcgctgctggctgctgggcctgcgggctgccttcgagccccggcccggcgaggacagtgctgggc

SEQ ID NO: 587433 - DNA, 4001 bp, Homo sapiens
ggttagccataagaaaacttttattgctaaacatttcttaaattctagaatacaatactaaatgaaacaagaaaattcaagaataggttttcatcttcttggaatgctgtgaatgtgtcctgcagaacatatctgtagaacagtgcatgaactagatgttctcttaagatctttcactcttctttgattctacaaaatttatccattgaatcttgatagctttattgtcttgcaactaaaacaaaatttaactttaggggaaagttcttccgttaaagaaaatttaaaattattataatgtccatgacgtataactatttctatagactttaactaataatcatctaagtttgtaagactcattgaaaattttttagtaaacaaaaaaatcaagagcagactttttcctgccatatttttacttacctttaaaaatatacactcaccttttgattgttcacagaatgattgtctgcaatgcattcaaacttaccgaacagagactaaatcaaattcaaacttacggaaagggacaaaatcagtattgtgtatagcagctattgcattgtttttgaatatttatcaaaaatgtttactagatgtttactagaagaatacctattctcccagaaatgaaagtgttttaagaaaaacaataacagaacaaaaccctcatcagagtatagtagtcataataatatcttaaattacaggatttttttcctaaacattttaagatgcgtacacacaccataatattcatttatatcaccatccactaagagagcatttcttaccaggtattaaatcagatactaatgataattagaatgcactagatcttacaatctctaaaactacatcaacatgtttattccttcttttttgagcgactcggttatttgggggattgttgcttctgtttcttcaagtggccagtagttttgcaattagcacacacaacttctaagtttgctcgacaggaaattatcttcctcatctaaaccatacccacggcttccttgctaaagtgcaattatgtttttcagtctgaatataaactcaaagtttcctatgaaattctaggaccaccctttcaaatgcgagattagagcaggtgccttcaaatagggctcatcttgtcacctgcaaagtctcctttatctttcaacaccaggggccactggaaagtgggagtctaaagttgggaacccattctttaccacgtgtttagttgtgctgaactctggtttccaaacaaatattgttctgaggcacagatgagatgacacaactcatctctccgaaagatgttgagaagttgagcaccgttttctcctatgggtctcttggtaagcttccagaacttggacctgcgggtgtatgtgcgagctataaagcagggtgagtgcacggtctaccttggtggtgctacttttcttgagaccagttggttttagcatttattttacacctcattgaggctaacatcacatgtttctatcaggtaaaagaagagggttggagaagcaagtaaatgcatgtgtgggagtgtaggtagcaccagaggcggaggcctgggttcctaagatcaaacgcaaggagctggcaccccgggattccctctctgacttctgcttaaggggccggggtggaggggcggtaggtagcccacagagtcccagcaggcgggaagcaggcacaacagcggaccttagcacggggtgggacccaggctcggtccaggagcctcggcctgtccagcactacattcttacttacaatgcttgcaatttttggttaaggtgtccgtcagcttctgcagtttcttgcggttcatgtctggcgctcagagaatcgggccgcggcgggggtctctgggcgcgcggctaccgagaccctcgcgggacccccgcgagccctggtgctgggtcaacgcggtgaggtctcagttactgatctcgtgcgcggccctaacagacggtgtagccaaggcaacggctcagcccgccgcggattggctcccaggctgcccgcgacgtagccaaagctacagctgggccccgcccatcggctcagcgactgctcgcgctgggttctcggtgcgcggtgccgccggcagggtcccagctggccgccttgagggctgtattctgactgttgacgttggagtttaaatgttcagttgttgctggcttttgagttcgcagcctctttgcttgattgcagtgtaaatcattaaaatctgaaatgtggtgtgcacgctgtatgagaggtgtttcgggtcgtgagcgtcacgcctcaagggaaggcccaagatcttggacatcttgggggctggagcagcgtcacaaaatagcaaggtgctgtccagaggacgatcttgccgggcctcccgtcagagggctagaagcttgctctttgggcggagccactgcttaggttttcagtcttggtgaggtaacaggaggcagtctgtcacctgaggtcttcgagcttttagttgtgtttctgagagcaaggggaaattggaatacagccacgggttgcctaaggagcgggacgcgttccgaggtcactaggagatttcatcactgtgtgcacatcacggtgcaccgacacaaacctagatggccttgcctactgcacgccaggctgtatggtacaacccattgcttctgggctgcacccctgcacagcaggtcacagcgcggaatgctgcaggcagctaaaacagagtgctaagcactctggggaaggtgcagtgttccagtacagtgttacatcttatgggaccactgtcctaatgttgtctgatgttgacttaaatggcgctatgtggcttgtgactgtagtttttttcttttcccactgccctcatctcacttccaaaagatggaggttgtctgtggaatctgaggaaagccacgaggaatttttatactgcttaaataggcattccccccaatgaaaacgggctgacaacaccacttgggtgtggggtacagcccaatcttgcttttccggaaaatatctcagcaaccttggtcctttacttatttgaaagacaagttctgtgccggcagacaaaggatattccttacatcttcagggtgggaggactttctgcttttcctgatcacagaggggatatcctctttcagctaaggcagcaataaaaaggggtggctcagccaggatcaccaaatctacagtattctccagagtgcctgctcgtttaacttcagaggggaaaatgacaaactatgttattgtacacatactggcatttttagactgaaggcagaaaaattctactaaccatgagtaataatcccaaatgaaataattccaatgtcgaggcctctggtttttctttactgtttcatttgtttgtggaatgaaggattgggatgctgtttgaaactagagcaaagggtgcttggtaaaggcatggactgtgttatcctaaagcaaatgtcctaacaacagttacccgatatgaattgatggtgattatgagtttgtaacagtagtatttttaaatagtgtttctacatatccccttgtctagaagagtgaaattcctgagaccatagagaacaaaagggaaagactggacatatttgaattatacttacctgtgacaccttattgatttctgttggatcacagagctgtagcaaatacttaattcctagagattgctgcactgctcacttcaagagacaaggaaccgaaagagtggttgtcagtaattactaagagacgctgtgggctccccacctgatgtactaggcctgtgttggggagcaggcctgcgctgttggtgagcacattggtggttatttctggtggcctggggagatcgcatacaccgggtgcttgctataggtaagctaattagttattccttcacgagtttaaggcctagagcccatcagccatgttcccttaaagttaaaaaaataataaaaagatgtaggggcaatatcacagat

SEQ ID NO: 587434 - DNA, 4001 bp, Homo sapiens
tccacagcacatttttattcagtcataaaaaatgtaccatgacaaatattaacaatgacagataaaacaaacatttcacttgtcttccagtcagggtgtgaaatctgcattcttaactatgtaaactccaccatggcccatcctaaaatcattttgcagaatgaactcaacatttgaaaagaaacgagtttactatatccactctgtgaagctagataaccctagaacataactaaaaattttatttcacaggataattctggcatgttaccaataaattctacttgaagcctcaactttcaataggtgcttacctcctcccctttggtttctcagaaaataaaagattagcatagtgctagtctcagatattcactgaataacgtgaacatgaatttagaagtactaaactggcaataacaatgaagatgattgtaaatgatattcctccagccaaaaggaataaaacagaaatttaaactggacatatttactggatgcgaagtccaagaacgtgagttaaggacacacagtagtgtgtgaagaaaacaaaatccacagtacccacacatgtatgaggagttaaaagtaatctctacatcaggactatgtaaagatttgccacaggaaaatctttaaatctcaaaaagatatttaaatatctttaatatcaatttaaatttaatatccttaaatatcaggaaaatatcaatctttataatatcaagaaataactcatcttttcccaccactagacgaaacgtgcattggagactgacctggaaattcagcgtcccagatggctacaaaacaaggacaactagaagtagttatgaattctaggaaatatattcacaagtgtgtaaagattctatagtattgaacacttagtcaaaggagtcctacttgaattctcaaatcaatgacaaagttgcttcctctctacccaagatcaggagcttccctagtttgcacatatccacattgaccagtggctataaagtcacactgcgattatctgggtcattttaaaataggtcattagcagtacttgtagtatcgcgtctgtctaaaaatcctccaacaccgagtgacttttaaactttggggtgccttggtaaccccagggacgcttattagacatgcagactccggggcccaagctccagactaattccatgggaatagggcgggtcccgaaaccggcatttttaatcatctgcccgggtgaatccgaagtgtggtccaaaagccacagtcgaggtgcctctgcctaacaagctccacagaaagctccgacttcagccgccccgacggcgatacggacgccgagttaggctgtcgggggtctgtctggcggccgcgggaagggactcggggccggcgcgtccactagcgacgtccggcccgaggtgagaagggactgacaatggtaccgcagttattttcaatatttccataaagtcccacgaagccgtgtggccgtgggaaaagggctttaactttgaaatcccacgggtcaggttaccaccagctctgccgcctcctaacagcgcgtccccgcagttcccttaacgttcgggcctcagtttcccgatccgtgcaacgggctcacgccatctccggaaggctaagccgaaacgaaactaactccgccgctcgcagacacttcctggctctgctcagcgcggcccagcctccccagccgcccgggaggagtacccggcccaagcgcgtcgcgcaggcagtcgcctcccaacgcccccggccctcggccggccactcacgggtaggcatggcgatctcgaccgcgctcgccgccgcaccgaggctcagcggggccgcgcagggagcgccgacggcaccatgacggccgttgctgggccgcggaggccggaacgaggcgaagggcgaagggcgaagggtggagggagcggacgcggaccccgcggtcacgcaaccaagcgggcgacagctaccgccgccagcccactcctcgccgggcggcgcgacggacgacccacgcccgttacgtcagcgcgccgccgccgtcccggccccgcccccgcggatggccgggctcggcccaggatcccttgtcgagcgggtggaatgggtggctggggacagccacgtagaacaacttcgggtgccttctattttccaagcctggtgacctgcgtggcattcgttttccttgatctctatttggagtgcatcactttacgtttgtgaggatgatggctttgagcgcacggagtacctgtgggctttttcttttgcaatcggtttaacttgcagtgcgttttgcatactctgaaagcatggtttatttgagatgcactaaggtcatttggggtgatggctgctcattttttgagagggcagaaaatgtaatttccttttgctcttgtgactttcagagcgaccttatccctcaggagttagtctcctctggagagggcagctctgtgcacttggctgagctactcttcttgactctgggtgtcattaataattgaggtatctaatagtcaccaagctgagcagacaccgggagccagagagctgagcaacgcacctacactatgctaggcgccgtgggctgcggacagcccatatggagatataaaagccaaccgcagaggtttaacacagccttcctcaaagtgggtcaaagtggtccaggatccttttgtgcttggatcccctggggacttgttgaaaagcagattcctaggtgctgagccaaatctacgaacacatatacagatgatttaaatacaatgataatactgagaacctttgtcctaaaaagtagggctaaccttctgattaagaaatgatattgtgcagtactgggaggagaagatgaagaacatgaagatcagagctaggaagcgctgaggagaaattagtcttggcttgaggtggacttggaagaaagcagaatttgaattagcaaagcctaggggagtcctaaaagaggctggggagaggatgaagggtaatttagagtgagtcatggcagctggggagaggagagtgtgtactgtacctataaaagagactgtccagctgggaacggtggctcacgcctgtaatcctaacactttgggagaccgaggtgggcggtgggcagatcacctgaggtcaggagttcgagatcagcctggccaacatggcgaaaccctgtctgtactgaaaatgcaaaaattaggcgggggtggtggcacatgcctatattctcactcagctacttgggaagctgaggaaggagaatcgcttgaacccaggagacggagtttgcagtgagccgagatcgggccactggactctagcctgggctacagagcaagactccatctcaaaaaaaaaaaaaaaaaaagagagactgtcccttgctaacagtaaagaccaaactacctagtgcttattcatgttttaatgccctgttgcatattttatcacctataaaatctttcatgcttccagttttctccctaagactttggcattatcttgattcctctctgctacagcacttttctcactgcatcctaaataaactgtcatgagtgcttgtgttttaccatgggcctatttgcttttcagaaaatggcaaaagccatattctgttcatgtttatgtatccttggctggcacacaggtgggggccagagtatattaattcaatatataaataaaggattttattcaagagtatgaaaacaaaaacaggtaaataaaactgataaacaactttacattcaaccttggaatttgtcttttaagaaactgttctgtgatttttacaaaaagcataacagtaacattaaattatcagaagcagggccttgcagggggaatggtgtggcagagaaactgtggaggtaggcagccaaatcggaaggccccaatacaggagagagtgttaggtgctcagtcttggtggtggctgtggaaaaagaaagaactgaatcttactttggaaaagaatc

SEQ ID NO: 587435 - DNA, 4001 bp, Homo sapiens
tccgtggctggctttcccgctgctttcaggctagcagccgggaggcactggaggggaaaagtggggatctgggggcccgatcctcaggcgcaggtggtgaccacgggggccagcgacacggggggcgccgaggatgcagagggtgcaccgcccttctccgccttcttctccttttgcttgaggtggatcttggcgtggcgcttgcgctcgtcgctgcgcgcaaacttgcgcccgcagaactcgcaggcaaagggcttctcgcccgtatgagtgcggatgtgagtggtgaggtggtcgctgcggctgaagctccgcatgcagatccggcactggaagggcttgtggcccgtgtggatgcgcaggtgccgggtcagctcgtccgaacggctgaaacggcggtcgcagccctcggccgggcacgcgtggggccgttcgtggagcggtgtcttgctaggccggttggggtacttgcggggccggatgggcttgagggtgagcggcggctggggcaggctgccaaagcccgggtggatctgcttgtctttgaatgccttgatggtctccagaggggtaatagggggcgggttgacccggatggggtccatgccctggaagggcttgtgctccggaatggagcccatgtcgttggggtggtggtagaggttgtagtcaggaatcatggggaagagattgctgtccaacgccggcttggccgattggtaatcctggggggaataggcgagcccgggattgccctgggggtcgtggaaagacacgggctctgagtagaggtcgccgcagttggagtaggggggtagcgcgggatacatggcctccacgtcaccctgcggtggctgcaccatgctggccgtggacgtctgcgtgctgagcgcccctgaagccgggggcacccccaagatgccggcgctcatgaggctaatgatgttgtcctggcaccagttggaaggggagtcgaaggcgaactttcccaagtaggtcacggtcttgttgccgggggctggctggaaggagccggagtaagagagttccgggttgggcttctcgttggtcagaccgatgtccattacattctctgcggagagcgggggagagaggggaggggtgagtgaagccgatccggctccgggccgcggcgcccaggtccttgcccaggtgcggagggtgcggccgggtggagtgcgtagcgcatggggtaagaggaacgctgagccccgcgcaaagcgggcggtgccgcgctcccgggcgcaacctggatatagcaaaatactacggatcggggtgtggagtggctgctgcacacacagcgcacaagccgcgcacacactcacgtaccacacacacacgcgcgcgcgcgcgagaagcattgttgttcttcccgaggtggggcgggcaggtagctgcagctacaggtagtttcagacccggagcgcgctgggctctcgctctccaccgcacacaactcggcctcttcccttggccctgtccgctccaggacgccgcgcctttccctccccggcgatgccccccacgcgcgctgctcccgggtcgccgacccagagcgctccgacgctttgtcctcggagcgtagaagggtgtcgccctcaaagggagctctcccttcacctaccccggccccagcctcctcgggcatgaaggagctttaggctcttgctggaggggaaaatcctagccccagctagggagggtggagagcggcggaaaaccggccggtgtctccatggcgggagaggccgcccttccccagctccccggccccgggatcgttccccgtggcaggccctcgccccgcgggtgaaccccctccttctccccgccgtccccacacccccacggctttgctgaacgccccggaaaggcagcgtcgcagtacctctcccaccgcggggactccacgccgcacatggctccatcccgggtgggaggctgagggagtaaggggggagagcgcgggtgaaaaagacgccgggctcctcccgggaagagggcgacagcaccacgccttgcgcgtagcccggcgatcgggccccctgcgtggtgagggagaaccccagagccgctcgcacctacctccctccggtcggcggctgcccccacccgggagaaccgaagcctctaccgtggcgtcgccaacctagccttctcgatcgaggagggcgggaggagtgggtgggaaaagcaactcgccccccgcaaaattcccagcgcgcccccatctctccatccatttatctatccacccatccacccatccatccatccatccatccatccatccatccatccatcaccaggtcgtcccctcctcctcttcctctccccttccttcctcgctgcctcgccgcctccccgccgcccttacctgtagccatctgattgtaatggactaccgagtcgctgctgccggagaagaggttgagcgcgctggggatctcctcggggtacagattgtcaggcagttggtttagcaaactgctcatggtcaccggcagcttctcggcgagtttgccggtcatagcactcccgagctgccgccgccgccgccaccgccgccaccgccgccgctcgctcctaacgcagcttccaggcaagcggcatccgagaggcgatccgtggtgcaggggaaaagcatgcgagagggaaagttcggggggaggggggagggaagaagggaagggatgggccaggagaggggatcttctcttttttggggggcgggagagggccccagggggtaatcctcttgggtgcctcagctggtgcggtatgaggctgggtcgtggggggggtggggcgtgtgcggggggtggggtgggggctgggctggggggggatctcggctcaagggggtcggacgcggcctcagtattgatctcacaaacagacacgcgcccgccgcccccccgccccccgatctgccaccgccaccgccaccgccaccgccgccgccgccgccgccgccgccgccgcctctgccgccgctgccgccgctgctaccaccaccaccagccccgccgcttcctagcaagctcactgctgcccaaaagctcccagccagggaactccaccagcctatttatctgagccccgggaaagctccgtgacgtagctgcccatatatggacagacaaagcccagccgaaggggcgcgacgtcacaatggaagctcctcacaatggaacattagaaagcaggaagcgggccgcagccaacgtgcggcgcccgcaccgctcgcggctcttgaaaaaaagagaaggggagaagaaacaagaagaatgcgagaagagagaggaaagaaggatacagctgcatgcaaagcgcaaagcgcgtagcgtggagtcgaaacaccagtaactcattgtgtgtgtttatttgaggtttgcgttaggagagcgcattggggagaggtgggcggtggggtggggttgtttgcaagtggtctccaacaccccagcagttagaaagagagttgaaaacatctggcgaaatccctttgcagcccgggaactgctggggaacccggaaggcgtgcgttgcgcccctgctacctcagcggctccagcgttcgggatcctatccgagattaagagaaagggagtgcttccctttgtggggggaaggaggggtgcgcgcagggttgggggggtgtttcaacttgtcagaattccttggtccaatatcccaagaacttttgtgccaacttcactctgattcgccgcccctgcccctccctgggcccctgacccggcgctgactctaggctgagcgcagtggcgaggagattcggagcaccccagcagttgcgccaaagacaagagccccatccatatggggtcgaggatgtgcggttttcgtggtgaagaggaaagaatgaagttgaagggatagataaacacgtgcactgaatccccagtaaattccctaacggttccaagcagcctctgtggccacaggatggcagg

SEQ ID NO: 587436 - DNA, 4001 bp, Homo sapiens
ggcgtggcgcttgcgctcgtcgctgcgcgcaaacttgcgcccgcagaactcgcaggcaaagggcttctcgcccgtatgagtgcggatgtgagtggtgaggtggtcgctgcggctgaagctccgcatgcagatccggcactggaagggcttgtggcccgtgtggatgcgcaggtgccgggtcagctcgtccgaacggctgaaacggcggtcgcagccctcggccgggcacgcgtggggccgttcgtggagcggtgtcttgctaggccggttggggtacttgcggggccggatgggcttgagggtgagcggcggctggggcaggctgccaaagcccgggtggatctgcttgtctttgaatgccttgatggtctccagaggggtaatagggggcgggttgacccggatggggtccatgccctggaagggcttgtgctccggaatggagcccatgtcgttggggtggtggtagaggttgtagtcaggaatcatggggaagagattgctgtccaacgccggcttggccgattggtaatcctggggggaataggcgagcccgggattgccctgggggtcgtggaaagacacgggctctgagtagaggtcgccgcagttggagtaggggggtagcgcgggatacatggcctccacgtcaccctgcggtggctgcaccatgctggccgtggacgtctgcgtgctgagcgcccctgaagccgggggcacccccaagatgccggcgctcatgaggctaatgatgttgtcctggcaccagttggaaggggagtcgaaggcgaactttcccaagtaggtcacggtcttgttgccgggggctggctggaaggagccggagtaagagagttccgggttgggcttctcgttggtcagaccgatgtccattacattctctgcggagagcgggggagagaggggaggggtgagtgaagccgatccggctccgggccgcggcgcccaggtccttgcccaggtgcggagggtgcggccgggtggagtgcgtagcgcatggggtaagaggaacgctgagccccgcgcaaagcgggcggtgccgcgctcccgggcgcaacctggatatagcaaaatactacggatcggggtgtggagtggctgctgcacacacagcgcacaagccgcgcacacactcacgtaccacacacacacgcgcgcgcgcgcgagaagcattgttgttcttcccgaggtggggcgggcaggtagctgcagctacaggtagtttcagacccggagcgcgctgggctctcgctctccaccgcacacaactcggcctcttcccttggccctgtccgctccaggacgccgcgcctttccctccccggcgatgccccccacgcgcgctgctcccgggtcgccgacccagagcgctccgacgctttgtcctcggagcgtagaagggtgtcgccctcaaagggagctctcccttcacctaccccggccccagcctcctcgggcatgaaggagctttaggctcttgctggaggggaaaatcctagccccagctagggagggtggagagcggcggaaaaccggccggtgtctccatggcgggagaggccgcccttccccagctccccggccccgggatcgttccccgtggcaggccctcgccccgcgggtgaaccccctccttctccccgccgtccccacacccccacggctttgctgaacgccccggaaaggcagcgtcgcagtacctctcccaccgcggggactccacgccgcacatggctccatcccgggtgggaggctgagggagtaaggggggagagcgcgggtgaaaaagacgccgggctcctcccgggaagagggcgacagcaccacgccttgcgcgtagcccggcgatcgggccccctgcgtggtgagggagaaccccagagccgctcgcacctacctccctccggtcggcggctgcccccacccgggagaaccgaagcctctaccgtggcgtcgccaacctagccttctcgatcgaggagggcgggaggagtgggtgggaaaagcaactcgccccccgcaaaattcccagcgcgcccccatctctccatccatttatctatccacccatccacccatccatccatccatccatccatccatccatccatccatcaccaggtcgtcccctcctcctcttcctctccccttccttcctcgctgcctcgccgcctccccgccgcccttacctgtagccatctgattgtaatggactaccgagtcgctgctgccggagaagaggttgagcgcgctggggatctcctcggggtacagattgtcaggcagttggtttagcaaactgctcatggtcaccggcagcttctcggcgagtttgccggtcatagcactcccgagctgccgccgccgccgccaccgccgccaccgccgccgctcgctcctaacgcagcttccaggcaagcggcatccgagaggcgatccgtggtgcaggggaaaagcatgcgagagggaaagttcggggggaggggggagggaagaagggaagggatgggccaggagaggggatcttctcttttttggggggcgggagagggccccagggggtaatcctcttgggtgcctcagctggtgcggtatgaggctgggtcgtggggggggtggggcgtgtgcggggggtggggtgggggctgggctggggggggatctcggctcaagggggtcggacgcggcctcagtattgatctcacaaacagacacgcgcccgccgcccccccgccccccgatctgccaccgccaccgccaccgccaccgccgccgccgccgccgccgccgccgccgcctctgccgccgctgccgccgctgctaccaccaccaccagccccgccgcttcctagcaagctcactgctgcccaaaagctcccagccagggaactccaccagcctatttatctgagccccgggaaagctccgtgacgtagctgcccatatatggacagacaaagcccagccgaaggggcgcgacgtcacaatggaagctcctcacaatggaacattagaaagcaggaagcgggccgcagccaacgtgcggcgcccgcaccgctcgcggctcttgaaaaaaagagaaggggagaagaaacaagaagaatgcgagaagagagaggaaagaaggatacagctgcatgcaaagcgcaaagcgcgtagcgtggagtcgaaacaccagtaactcattgtgtgtgtttatttgaggtttgcgttaggagagcgcattggggagaggtgggcggtggggtggggttgtttgcaagtggtctccaacaccccagcagttagaaagagagttgaaaacatctggcgaaatccctttgcagcccgggaactgctggggaacccggaaggcgtgcgttgcgcccctgctacctcagcggctccagcgttcgggatcctatccgagattaagagaaagggagtgcttccctttgtggggggaaggaggggtgcgcgcagggttgggggggtgtttcaacttgtcagaattccttggtccaatatcccaagaacttttgtgccaacttcactctgattcgccgcccctgcccctccctgggcccctgacccggcgctgactctaggctgagcgcagtggcgaggagattcggagcaccccagcagttgcgccaaagacaagagccccatccatatggggtcgaggatgtgcggttttcgtggtgaagaggaaagaatgaagttgaagggatagataaacacgtgcactgaatccccagtaaattccctaacggttccaagcagcctctgtggccacaggatggcaggagggcccagcaggcccgggcgcagtcgctgtctactgctgcctgcgaagggcccgccagagttccagaaggaggacgccgaacccacagtctctgagccactgggggcctcccctagtctctgccctccccctcgccttccacagggctgtccccattgctgcctgccggcgctccgcagtcaagggcggc

SEQ ID NO: 587437 - DNA, 4001 bp, Homo sapiens
ccaagatgccggcgctcatgaggctaatgatgttgtcctggcaccagttggaaggggagtcgaaggcgaactttcccaagtaggtcacggtcttgttgccgggggctggctggaaggagccggagtaagagagttccgggttgggcttctcgttggtcagaccgatgtccattacattctctgcggagagcgggggagagaggggaggggtgagtgaagccgatccggctccgggccgcggcgcccaggtccttgcccaggtgcggagggtgcggccgggtggagtgcgtagcgcatggggtaagaggaacgctgagccccgcgcaaagcgggcggtgccgcgctcccgggcgcaacctggatatagcaaaatactacggatcggggtgtggagtggctgctgcacacacagcgcacaagccgcgcacacactcacgtaccacacacacacgcgcgcgcgcgcgagaagcattgttgttcttcccgaggtggggcgggcaggtagctgcagctacaggtagtttcagacccggagcgcgctgggctctcgctctccaccgcacacaactcggcctcttcccttggccctgtccgctccaggacgccgcgcctttccctccccggcgatgccccccacgcgcgctgctcccgggtcgccgacccagagcgctccgacgctttgtcctcggagcgtagaagggtgtcgccctcaaagggagctctcccttcacctaccccggccccagcctcctcgggcatgaaggagctttaggctcttgctggaggggaaaatcctagccccagctagggagggtggagagcggcggaaaaccggccggtgtctccatggcgggagaggccgcccttccccagctccccggccccgggatcgttccccgtggcaggccctcgccccgcgggtgaaccccctccttctccccgccgtccccacacccccacggctttgctgaacgccccggaaaggcagcgtcgcagtacctctcccaccgcggggactccacgccgcacatggctccatcccgggtgggaggctgagggagtaaggggggagagcgcgggtgaaaaagacgccgggctcctcccgggaagagggcgacagcaccacgccttgcgcgtagcccggcgatcgggccccctgcgtggtgagggagaaccccagagccgctcgcacctacctccctccggtcggcggctgcccccacccgggagaaccgaagcctctaccgtggcgtcgccaacctagccttctcgatcgaggagggcgggaggagtgggtgggaaaagcaactcgccccccgcaaaattcccagcgcgcccccatctctccatccatttatctatccacccatccacccatccatccatccatccatccatccatccatccatccatcaccaggtcgtcccctcctcctcttcctctccccttccttcctcgctgcctcgccgcctccccgccgcccttacctgtagccatctgattgtaatggactaccgagtcgctgctgccggagaagaggttgagcgcgctggggatctcctcggggtacagattgtcaggcagttggtttagcaaactgctcatggtcaccggcagcttctcggcgagtttgccggtcatagcactcccgagctgccgccgccgccgccaccgccgccaccgccgccgctcgctcctaacgcagcttccaggcaagcggcatccgagaggcgatccgtggtgcaggggaaaagcatgcgagagggaaagttcggggggaggggggagggaagaagggaagggatgggccaggagaggggatcttctcttttttggggggcgggagagggccccagggggtaatcctcttgggtgcctcagctggtgcggtatgaggctgggtcgtggggggggtggggcgtgtgcggggggtggggtgggggctgggctggggggggatctcggctcaagggggtcggacgcggcctcagtattgatctcacaaacagacacgcgcccgccgcccccccgccccccgatctgccaccgccaccgccaccgccaccgccgccgccgccgccgccgccgccgccgcctctgccgccgctgccgccgctgctaccaccaccaccagccccgccgcttcctagcaagctcactgctgcccaaaagctcccagccagggaactccaccagcctatttatctgagccccgggaaagctccgtgacgtagctgcccatatatggacagacaaagcccagccgaaggggcgcgacgtcacaatggaagctcctcacaatggaacattagaaagcaggaagcgggccgcagccaacgtgcggcgcccgcaccgctcgcggctcttgaaaaaaagagaaggggagaagaaacaagaagaatgcgagaagagagaggaaagaaggatacagctgcatgcaaagcgcaaagcgcgtagcgtggagtcgaaacaccagtaactcattgtgtgtgtttatttgaggtttgcgttaggagagcgcattggggagaggtgggcggtggggtggggttgtttgcaagtggtctccaacaccccagcagttagaaagagagttgaaaacatctggcgaaatccctttgcagcccgggaactgctggggaacccggaaggcgtgcgttgcgcccctgctacctcagcggctccagcgttcgggatcctatccgagattaagagaaagggagtgcttccctttgtggggggaaggaggggtgcgcgcagggttgggggggtgtttcaacttgtcagaattccttggtccaatatcccaagaacttttgtgccaacttcactctgattcgccgcccctgcccctccctgggcccctgacccggcgctgactctaggctgagcgcagtggcgaggagattcggagcaccccagcagttgcgccaaagacaagagccccatccatatggggtcgaggatgtgcggttttcgtggtgaagaggaaagaatgaagttgaagggatagataaacacgtgcactgaatccccagtaaattccctaacggttccaagcagcctctgtggccacaggatggcaggagggcccagcaggcccgggcgcagtcgctgtctactgctgcctgcgaagggcccgccagagttccagaaggaggacgccgaacccacagtctctgagccactgggggcctcccctagtctctgccctccccctcgccttccacagggctgtccccattgctgcctgccggcgctccgcagtcaagggcggcctgtgtgccgacccggagcgctttcacctcccggagcggcagcagatcccgggggcggctgctgtgctccctggggcctgctcccgaggcgcgcgcagccggcccgcgggcgagggggaggagagggcgggagcatgggggtgcgaccccaaatcacatcggcttggcgggggaggattccctcctcggtggccgcgtgggcgcggtgaatccctcgtcccctcctggggagtcggggttgggggaacgtgcatttctcggggggagtgggagtgttgacaaggaagaagagaggatccccgggcctcacgccgtgggagggccacgcgggccggggacgtgtgggaggaactcccgagctgcacgttgtggtggaggtggatgacaacctcgctcccctcccctcccctccactcagtggagggctggggaccggagggcccggcctccccccatcttctccagttcttaggaaaggagggattcccgcctcccgcgagccccctctctccacccccgccgcctctcccgccaggctccccactcctatactagggagccacagcgccccccgggctgtcctccgccagcgcggctcagggagggagagcgctgcagcggtcccgcgctccggtcagaatcagggcaggctgcgcctcccgcccccggctccctcccttagggggggcgcgcggccggtcggggggcgtgggcggcggtgt

SEQ ID NO: 587438 - DNA, 4001 bp, Homo sapiens
ctcctcctcagcctactcaatatgaagacaatgaagaccttcatgatgatgtacttccacttactaaaaagtaaatgtattttctcttccttataatttaagaccattttattttctctagcttactttattgtaataatacagtatagaacacatacaacacaggactgtccatgttctcagtaagccttcctgtcagcattaggatatattaagttttgggggagtcaaaacttataacggatttttgactgcgagagctcagcgttcctaacccctgtactgtccaagagtcaaatgtacttagaaattgctaattaaatactccagcatctgtcttcctcttggtgtattacagctatcttaccaacattttctccaaagaggtgggtattgggcagtttttcccactgattctcaactgcctgcagttcatagttttcgtctagccctatgaaaatctaattcacatttacatattcctcctttccttctgtgtgccataaaaaaaatgaaattataaagaacacaaaaatatataaagttcagctagttcagaagtacttctacaagcagctggtaaaggctttcaaaatatagcatttttactagatcttttgtcctcacttttccagaaaagaaaacaatgcagatgcgaatgttttactcaaggtctaaaatacaggtgtaaaaagaagaatcaaagcaaaaatatatcaagagaaagttttacatgacaagacattcttggacatttactgaaaatgatcttagccgttacctaacgtcaacaactttagagttgtctatgtttagaaaaggtgcatatgaatatgaggattatacctgtctaacgagccacaacacctggacgctggtttttgggacgtttttgttttattgctttttgtcttttgctacacaaaatccactccccaaatctagagttccctaagtagacttatattgtagtctgcttccagaaacagaactcacttatttttctgaaaaaattcgaattccttcatcactgcaaattactttgcattattaaaatgcatcaatttcccaataaactcacggtataactaatgtcaattttcttttagccaaaactttcaagtccaataaaacttttaggactgacatatgctttaaaatgaagttccagaattacacatttattcatgatatcttgagtagataattgaatattaacgaccaattcaaaccacatgaagtcagtacaatatatccactggaaaacacatttaaagattggagggattttttctgggggggggggcgggggagcgccgtccccatctgacgaaatatgctgttctagaaagtcctacttaaccaagacaagaaaacgcaaagaactcacaacttcatggaaattaaagcgctagatacttattttaagtgtaagagaatcactccaaaagactcgacatgcaaaaacccacagccaagcccaggcttcccacagttcccaaaagaaaaatcaaaagctctaacagcactccaggttgcttttacaagccagcctgtgaagctctaacgttctctagcgaaaccagcgaatcgccaacttccgagaagaaatgatgcgaaaatccctcccgcactgacacctcagtaagtgaaagagacttcttttctctctccgtaacctccctcctcctcactgccgaatagtgcggtgcttcttaactgagacgacgctaaactaccagaagatccttagtgtccgtccaggaaccaaactcgcgaccgcctcgcacgtgtcaggcctaggactacagacaccacctttcggccttgctcagcacctcatccgcccccacgccttccttgcgcccaaagaccccctcacctcctttacagagagaaattcaagaagcggaaagactagatgccgatccaaaaagtgcgcgatgcgagtagtcaagtcgtactccgccatcttgccaaagaaaagggagtctgtgctcactaaaactttattggtagcgccgacaaacgaacagacagatcctgtactgcgcatgtgctgtggtaaaactggcctaaagaaaggggcggggtttaccctggagagcagaggacaacgacgcatgcgcgcgggttgtcccaccctttgcgttagggcgcgagtgacggaaacagatccctctatttgtaggtttgtcggtatcctctttctaatgctggccttcgattaccagtcagtggcttgcagtctattccgttaataactattgaaagctcagaattgattgctgaggcaatgtgactgcattgggatgcggcaaaggacaacatgaggaggcccctgctttccaggaagttacatacagggaagaatatctaggctttttcatttggcatacgctaatcattttgtaagcgattgttaaagtgagggtgggtttttagacagaaaataagtgaaacaaatttcagatatagtaagagccataatttggtggagatggttgggttggacctatttaattaggatggttagagaaaactcagataggaattaaggaaattagagaaaagtctgatagagtaacaagttagctgagagctgtggtaagagaaggaggtgattaaaactagagccagggtaaaaacatgattgttggaacgtacagcaaaaacaatgaccatgagacaggaagggacttagtgtgtgcgtttcaaaaattgaatggcctgtgtgtactggggagtaaggttaaagagtttgacaagggtcaggtcatgattatggtaaggaatatggggtttttttctaagtactctgcagtgtcctttgctagttacttctcatcttttaggccttttcattttgaagagccccagggatcttggacctcttctccatctagaccaatgccctaaatggtaacgtcctttgcatgcagtctgcacattgacaactcccaaattatagccgcaaaactgactattagtcccagactcaaatgtacccagcatttcaacgtgagcttgtcccaaaccaagtttccccatgtagcttaccaaacctgctccagctgcactcttcacctcggtgaatggccactccatctgtacagttccccagactcaaaaccttagagtcatcattgactttttctcttacactgtgcatgaaatctaccaaaaaaccttttaactctaatctttacggcatattcagacccaatcagttcacaccacctccgaagtttcaactctagtgcacaccaccactatctcctgctttgattttgggaatcacctcgtcactaatcaccttgcttcccctcttcctcctgtgctttattcttcataaagcagccagagtgaagttttaaaagtcaaattatgcttaaaggtctccaaggcttgctatctcatttagagtaaaagatgtagtaggtattataagtgacctaacaagccagtagatcatctggacccattacctctctgacctcatctcctaaatgttcccctcttgctcacttgactccaaccacacagatttcccttcagttcctcagctactcccatcctgctttcatcttgtcctgttatatttgctattacctctacccggaatgttcttctcccagttatctgcatagctctttccctgtctccttcatattttgctcaaatgtcatctgctcaatgagaccttccctgaccagtctatttaaaaatgtaactaacctgcctacaagaacttctcatcttgctttcctgctttattttttttgttttacagtattttacttattttatttacttttggtcttccctgactattgtattaattccacaagatcagggattttgtcattattttaaatataataactgcttctcgaaagtctaaacaatgcccagtatatagttggcactcaataaatatttttgaatgtgtatatgagtaaaagaaggaggtaggcctttggagagtgatgtaaagttta

SEQ ID NO: 587439 - DNA, 4001 bp, Homo sapiens
atctccaaatagatttatgccaccgacctgttgcctttttcaactctggaaactaagtgattcaaagagtgctgttgtgacatagcaaatttaataagaaatatgtttctaagaaataaacatttcccaagtgcataagtggtacttattttaacaagtgtaatctaagtccacccactaactttagagatttgcaatctctaaagatacgtcatttattcctgaacacacatctgcctcccatgagccagggaaagccacagtgccagtacacaggccagatagtactccattttcttttttttttttggacggaggctcgctctattgcccaggctggagtgcagtggcacaatctcggctcactgcaacctccgcctcccaggttcaagcgattctcccgcctcagcctcctgagtagctgagattacaggcgcgtgccaacatgcccggctaattttgtgtttttagtagagacggggtttcaccatgttggtcaggctggtctcgaactcctgacctcctgatccgcccgcctcggcctcccaaagtgctgggattacagccgtgagccaccacgcccggcctgcattttcaaagtattacacaagtgacatttagaacaaaacattccaaagttaatctcttgcctgcatctttcaaactctgctaaccacagacattaaactcataataataatcataattaacattaagtgattacactgtactacaggtcaccacataaactttttcatttaatccaaacaactctatgatacagatacttctcattcccacttgacagatgaggaaagcaaagcctggaaaggctaacttgccttaaagtcacagagctggttaagtggaagagcctagaagactgaatgagctcttaaccaccaggctacactcttgtatccagtttaactaagtcagttcaacagattcaattatatgctgcgtttaaattatcaacagtttccacttaaaaatacctgcttgcaattacaattttcacatgaatttaaaagtactttcttattacaaatatctaagatctgcattaataggaaataacctttaaaaaaatcaaaggaagagaggatgctttttaaaaagagggcaggaaggatacttttaaaactagaacgtcatataaatgcattttgcttcgaaacaacagaaataaaatttctcattctagattttcctcttcccagctaagtccatttccttatcaagaatttccttggatgtcctagttcatgaaccttaactactaaatacatttaaggcccttctctttgatattcttttatgtttttcagaatgaacactacaaaagagtattctaaattatacggtttcagataaagcgccgaagtacaggctcaaaagagtggctacaaagtacatctccacttggaacgttatagatgtcagatcccagcagggaatcagtggagtttccttactctctccttcccagagccctactaggtccctaaatccttctcgacaccttcgttagctgctggtctccaggagtctttcttcaaatccccccaccggtcatctcaaaacaagaccccaggaacctgtcactcacacccctattctcagtccccttcctgaagccccaactgtcccgttagaagacaagagaaggctgtcgaagctcctgaacaaaaagtgaagatgaaagagaaacgtactagggaaaaactttggcccagccacaccaagcccaagggggagaatgctagaaagtacgtctggtgggacggggctgggaactgcgctccccacgtgggccagaggaaaaagaacagcactcacaaggccatctatctgcacttgcttcacggctgaatctcccgagccgcctttgcctttgcctttccctgctgcgccggcggtggagctggaagaggtggcagtagagccggtaccttccttgcgggacgccatctttccaagcagacaggaagaaagagaaacgtgagttaccggaagcggaagtacaagtctcgcgtgacgtcactcgcaggccggcgttcgaggggcggagacggaaggagaagccaaaattgggccccgcctccctcctgttttccagttttaccttctttccaggcggtatcctttgtgcatgcctactgtacattttcgacctctttccgatggaatgatctaagatgaaagtaaactttttaaatgtttaatcattcaccactaggcaaaccgtcataatagcattacagttcgcattatttctgtagtgtctcttatgtaaaaatgctttcatttctgatcttgcaatgaagtgctgtactaactcgcattatgcatattagaaaactgataagtgatttgtccgacattattctgttaattagcgatgagccagtattgcacagcttgttttacgtaattttagatagctgcttgtaaccacttagattatatagaaattaagacatagaaacttttatcagaattaccagaaatagtagccttttgctattagcttcatgtagagatttacctgagtaaagtaccaaagaagttatctgaggtattgttgaaggatgatacagaatatattttctaaaaatcacgctgatttatgacacattactctgaaatacacatctcaagtccttaaaagaatatatgacaactgtaagaagccattttagataagtaatttgaaacattcttttctacttccaaatgacttttttcctatcccttatttttgaaatgtttattcaataaatatgtatacagaactgatgaaataattaaatcaataaacggcatatcctgccctgaagttttttgttgttttgtcattgggatctggtgttatatttcaatctgggaggagaaatagttacatgttacaaattcttaacactacaaaatgaaaagttaatatccactcatttcaagtgtatatgaaatatttattaaaatacaccaaaccctaggtcacacagaaagtccacaaatttagaggttttaaaggttgatcctggtaaaattacactagaaattggtaacagaacattcacaaaaagaagaaagaaaatctcgcatggaagaaccagactggaggtttttgcctaccactaggtagctggaatgatgagcattagaaaacagtgaggctacttataaacaataatacatttatttattgctttatcctacaacatacataacacagttttgtttcagaattacaataccaatatcctcatagcagtaaaactacaaagtaaagtttaaaatattttgcaatttttttgtccttgaaaatatccaactaaggttttgcagccacgtgtgctaaacatactacaatgggttattttcatctgtcctgagacagttcatgtgggccctctttatgaaatacactagatgtaagaggtacaactgagagagagagagagagagggccagagaatatgaagaatttgaattagaaatcaatatgatcaccttgacaagaaagggcccagaagcattgacatttccgtcacttcggttcctaatttcattcctatctcactggctacctcctttattctcagttcccattgctgatttttctaccccttttcaacctttaaatattgaagagcaccaaatttagactttgaacatcttctttcccctatttttgttctcttttatggtgacctcatccaagctttacaaagagatacactcaaaataatgtaaataaatcaatatattatttaaaatgttcaaataacccagaagaatgaagaaaaagaaaagagagaaatgaaaacagagagaatgaataaaaaataacttaaatggcaatcttaagcccaaatatattaatagttatgttaattttttttttttttttgagacagagtctccctgtgtcacccaggctggagtgcaatggtgtgatcttggctcactgcaacctccgcctcccaggttcaagc

SEQ ID NO: 587440 - DNA, 4001 bp, Homo sapiens
ttagagatagggtctcgctctgtcacccaggctggagtgcagtggtcaatcatagctcactacagcctccaactcctgggctcaagcgatcctctggcctcagcctctgtagtagctaggacaacattttgttgttgttttgtttgtttctttgtagagatggagtctcactatgttgcccaggctggtcttgaactcctggcctcaagcaattctcctgccttggctccccaaaatgctggcattacaggtgtgaaccttggtacccgggccagaagtgcctataaacagtatcctggcttccaatttgacccaacaatccagcaataaagagtgcaaaaaagggctacctgcgccttcaggccggcctcagggcccaccctgaacaaatccagcagacacttacaccctcatttgaaagaactccaaaattgtcaggaattgtcctggtagaccattgtgacagagacaaaggagaacagcatggactacaaaagacccagcaagggaaagaggatgagtcgggaatggcaacaagagcccctgcgagcttttccttggctcatttctaatagaaaaggaagcatttctcccttctctgcctggttgctatttcttgtccaatctgggaaaacggtgtgacaatgggcaacagacacgtgttcaagctctggggcctcaatgccgggctctgtagaataagacggcagggctggacaagatccctaaccgttctaacagtgtatgttttggatcaaacagcagaggacctcggatctggccgcgctcgctgctggtgggacagctgcctgagaaaataagcatgtggcccccgcccgccacctagccaagcgccaggatctgtcgcgttttctagtagtatggaaagcagcgtggaggagaatgaagggagaggagcaaaaaggggtgggggcagtgcgacaatgagaggggaggagagagccacgaggatttatttcatcatgcaaacaggcgcgtaggtttcatcagcgtctgtgcgctggggctccggggctgggagggaatgccaggttcctgagggcagcccgaggctggcccccccacccgtgccagctcagcttcctcttcctcatcctctcccagggaggtcacacggtgcctcctcctctccccggacagaagaacgtgtttttctgcacagccctggccgtggcgccagggtcccccccgcggagatcccactcgcgtaaatggggaacgtgccacaggtgcccgggaggcgctgctggagcaggcaagcacccccagatccgaacctcagtcagagcgcgcgagtccaacacaaaactcggcgtgcttcgggaaggaaaaagggccctgcaggaatcgtttatcccaacagataatacccatcccataaaaacaccaggccaggcctctcctggatcgtgggccaccctaactccgccctctcccgcttcgggagcgcccccaacacccacaaggggcagcacagctcggcatgtggctgtcctggaggcgtgcgtgtttgttaggtgtcagctgtctgacacctaacagaaagaggaaacaaacggggcagtttgtaactcgggtctggaagacgcactcagaggggaagcgggcggccacttccatgaccctcgctgtctctccgatgccccttttccgttctttccaatcacggcgcccttgagcctggacacccggtccaatccgcgattcccgatcctcccgcccgcccaggagccggcaagcggcgtcgccaagcccgcgcctacctcccggggtggtgctgaagagcgtgccgccgggggtcgtgctgtagtccccgggcgggagctgcacgccgtcgccgagcaccacccggcgagtggcggggatggcccggcttggggtctggctgcagctgctgcccccggacatggtctcctgtgcgctgcacccgcgaacctctcgctgccctcccgcgcctccagcctcgctccgcctcgccccgtgccgccccgccccaggacgccccttccgcctctcccgccccacgcccctgggatttgtagtccgcgccgcagccccacccagctccaggacgctgcttccacgtgggatcccccgccgccccccgacccactcccgtctgctcacgggctcttccgcacgggcgctggcgccgccccgcagcgactgcccctccgtccggggtccctccccgccacgctggcagggacggatatggggatggcgggcgggatagctcgcctaaattaatccttggctgggttgggggcggcgactcaggaccgcgcggagatccgagctgacccggcccactgcaggaaggcccggtttctgcattaggacatcaggcctggtgtacccttcggcactccctgtttcgtgccttagttcctcagatgagaaaatggggattgagtagttatgctcaccgccccccgccccgcttcaatttcttgaccttgatgggggtgggggtggaggggctaacaattccgttcccggcctttagagagggtgtgggaggaggagtgaaccaaccagcggcgtcctgggagctaaatttagagctgggggcgcagaggtgggtggtggggaagggcgttggagaggagtaagagtgtcgaagaggtttcccgatagcccctgaattgagtccaacgtccacctgaggtttagtaggtactccttggatggatggatggatggatggatggatggatggatggatggatgttcaaggggagagagaaaaatgcaagaaggaccgaggatggaaaagcttgttgggtttgagaagttcttagcattatgggcacatattgtggggaagagggtgaagaggggagggcagtttaaaagggaaattgggtggtgcacctgtaatcccagctactcaggaagctgaggctggaggatgcttgagcccaggggtttgaggctccagtgagctgtgatcacaccactgcactccaccctttgtgacagagaccctatctctaaaaaaatatataataattttttaaaaaggaaattggggtcaggtcgttgagtttttcaaattatgccaaagtgcttggactttgtcttagaagggcaggagatatcagagatcttttaagcagggggatgacatgatttgagttgttttttggaaggataactagtagccagtggagtttcagaatgggccaaggagggcaaggcctgagatagggagacctgttgagtttggtctcacttttgagggaaactttaggcctacagtggctaagacagtagccaccagctacaggtgcacattgagcactccaaatgtgaccagtccaaactgtcacaagtttaacatacacaccatatttcaaagacttagtgtgaagaaaatcatgtaaaatacctgaataatttgtttctatattgattgtatgttgaactgataatattttgagtatactgggttaagaaaaatacattataaaaattaattttgggccaggcgcagtggctcacgcctgtaatcccaacacgttgggaggccgaggcaggcggatcatgaggtcaagagatcgagaccatcctggacaacatggtgaaaccctgtctctactaaaaatataaaaaaaattagctgggcatggtggcgcatgcctgtagtcccagctactcgggaggctgaggcaggagaattgcttgaacctgggaggcagaggttgcagtgagctgaaatcatgccactgcactccagcctggcgtcagagcaagactctgtctcaaaagaaaaaaaaataaatttcggctgggtgcagtggctcacgcctgtaatcccaccactttgggaggcctaggcgggtggatcatgaggtcaggagttcaagaccagcctggccaagatggtgaaaccctgtctctactaaaaatacaaaaaaacaaaacaaacaaacaaacaaacaaaaacaacagaccgggcacagtggcgggtgcct

SEQ ID NO: 587441 - DNA, 4001 bp, Homo sapiens
ataaagaacagattacaggggaccctggccactaggcaaaggcattgaaatggaatgcaacagacagtgaagaattgcatattctcaactttggaaataaaaagttgaaagtaacgtttaaggaaggtaagaatattatcggtacaaagaatgattcagaaagtgaaaaagaatacatataatatggatactactcaaatggctcttgaaaggcaacattgttttaaaaaacccacaaaatctaagacaggatccagtcccaatgcctactggctgtgtggtaacggaaaagatcgacaattttttttctttttctttttctttttgagacagagtcttgctcggtcacccaggctggagtgcagtggtgcgatctcggctcactgcaacctccacctcccaggttcaagtgattctcccgcctctgcctcagcctcagcctcagcctcccaagtagctgggattagattacaggcacctgccaccacgcccggctaatttttgtgtttttagtagagacagggtttcaccacgttggtcaggctggtctccaattcctgacctcaagtgatccacccgccttggcctcccaaagtgctgggattaccggcatgagccaccgcgcctggccaagatcaacaacttttgagtgcccatttccttgtctgtaaaattggggtaatacatccaaatttcacaaaaccattctaagactcaaataaataatgtatatgaaagctgaaataccattcaaatattagttagtgatgaaggtgggttaggaggttggcggccagaatgaagaggaataaactatatcaagaagtaatttctaagtaagaatcaacatgacttggtgacagaagaaactaaaagaatcctggtagattgagaaggagcaagttagagtgagataacaaattaatttagggcatgcaaatatgacaagacttaatctaaggtaacttggacacttagaattgttgcttggaagaaagaaaaataacagttaatgtcaagaagcatagggattaacgatgtatttatttttcattttatgttttttgaggtcacagatacagcctgaccagccagctccatatctaagtataattttggtctgggaaagttacttaactctttgaatctcagcttcttcatctgtaaaatggaaatgataccgacttcaaaatacaagctcaataaatggtagctattattctgacaacaattaccatgattagaccagctggtcaaatgaaataggaacagaacctgtgagatacagaaataggaacagaacctgtgagagaatatttcaaatttgaatccgtcctgttgaaaaaccaaaggtggaattgttcattgctaactcatgatgtaataaaaatgggaataattgcatgcacaactcttacactgaatccaaggataattaaggtttttttaatatcttaaaataaggctttaaaagaaactctctaacacgtcaaatgtgtcgtgaaacaaatcttaacaaatgaaaagtcctacaacccgttaaatcgacgttaactcctcggagggcatatattggaataatggtttccctgccattcaaacaagacaccacgtgactgccaaagaggaagagaggaagggtagggtgcttcaaaaagcaaaacaggaaaaacgagaaggctcggggaccagaatggacacactgaccctaggtggcggggcgactggactgggtagcggattctcgcggtaaaagttcggttcagcatttgattgcctgggcgttcgcccctttcggaccacccctttcccccatctccttcccctttcgcacctttccgcttctgcctcatttctgcgccgccgtagcagagccaccagagataaaaatgcagccacaaactcagaccacggggaaagctgacagccacaaaacaatcccgcctgtcgtaaaatgtcggtcaatgtatcgtaaagctcttcccggaagccgacgtgcacaaagccacgccccgccccgtgttgcaactaacagggtagcaggcggcccgtgaggcccctaggctgcgatcctgccccgggtctcagggatggaggatgggaacgtctgaacggagtggcatcttggggttagaaagctcgacctgggcagtacagctatgggacagagttcctggatagaggctgcgccaggaagcctaagtgaaagggtggaagtggatggtctctcatgggggggagtgggagcccagggtcgtcacatccggggagggtgggtgggaacgcgaatgggcgagaccacggaggaggaaccctcccatgttgtggaaactaactgagggcctggaagagaccaggcgggaatcgagtaagaatccgaggtgcaggctttgggaccaggtggtcaccttggtcttagatgaatggcacatatgatcggtaaccatcgtgaaagctgtggatgtctcttgtggaaggaaaataacatctcgggaccctaaactctgccaaagaaaaaagttaagcttagggccgggcgcagtggctcacacatgtaatactagcactatgcccatctcaggaggccaaggccagcagatcatctgaggtctggcattcaagaccaccctggtcaacatggtgaaaccctgtctctactaaaaatacaaaaattagccaggcgtggtggtgcacgcctgtaatcccagctacttgggaggctaaggcaggagaatctcttgaacccggaagtggaggttgcagtgagtggagatcattctctgttgtccagcctagacgacagagcgagaccctgtctcaacaacaacaacaacaacaaaaagttaagcttgtgaactgagtcacgcaaaaactgccttccttctgttcctaaacagctgcaaagacagaagcccacatatctccctaggtggcctcccagaggagttgctcacagggaaattccttgtgagtggcagagtctttaccttacaacacttctgttgaattccaccctgaccatgcaaatttacagtaggtaggggacaaggacaagactagaaatcacccttcagtccaccccaagaaaaatgcatatttgactccttcctctatgtttactttgtcttctgtaaaaggcagatttactgagtgtgaaatgaatgcatagttgttcctctttccccttctgtctgctctttccctttaaatattgaagtcctcaaaaccctctttggaaaaaccacaggccacagattccatgataacttatgtctctttttcctgggtgtgtcctcaaccttggcagaataaacctccagactgagacctgtctcagacactgtttggtttacgttctccagaaaaatacacaggcacaaaattttgcaaaatttggaggcaggacttgggatgttttcctgaaacccatctatgatctcctttgtccatgggctggagattaagaacctctcccattaataaagacaggaatatgtaccctactagaattgaggcaacaacgaggctttgaccccactatgacactgaaactggccttgctaagctttgtaacttcccagcctgccaagttcagtggtatttgtctgacctcattgtcatcctataccaatgaacataagttctcctctgtaaaccgaaaataattctcagcccagggcattccaaagttaaactgaaaaactagctcaggccatgatgggaagtggggttggacatgcctccttattccctcctcctttttagaattcaggagctgctaaccagtgttaacatcaacacagagaccttaaggctgatagagcacagaaccgactcttaaagtctgataagaaacatttacggccgggcgcggtggctcatgcctgtaatcccagcactttgggaggccgaggtgggcggatcacaaggtcaggagatcaagaccatcctggctaacatgatgaaaccccgtctccactaaaaatacaaaaaattagccg

SEQ ID NO: 587442 - DNA, 4001 bp, Homo sapiens
caaaaagttaagcttgtgaactgagtcacgcaaaaactgccttccttctgttcctaaacagctgcaaagacagaagcccacatatctccctaggtggcctcccagaggagttgctcacagggaaattccttgtgagtggcagagtctttaccttacaacacttctgttgaattccaccctgaccatgcaaatttacagtaggtaggggacaaggacaagactagaaatcacccttcagtccaccccaagaaaaatgcatatttgactccttcctctatgtttactttgtcttctgtaaaaggcagatttactgagtgtgaaatgaatgcatagttgttcctctttccccttctgtctgctctttccctttaaatattgaagtcctcaaaaccctctttggaaaaaccacaggccacagattccatgataacttatgtctctttttcctgggtgtgtcctcaaccttggcagaataaacctccagactgagacctgtctcagacactgtttggtttacgttctccagaaaaatacacaggcacaaaattttgcaaaatttggaggcaggacttgggatgttttcctgaaacccatctatgatctcctttgtccatgggctggagattaagaacctctcccattaataaagacaggaatatgtaccctactagaattgaggcaacaacgaggctttgaccccactatgacactgaaactggccttgctaagctttgtaacttcccagcctgccaagttcagtggtatttgtctgacctcattgtcatcctataccaatgaacataagttctcctctgtaaaccgaaaataattctcagcccagggcattccaaagttaaactgaaaaactagctcaggccatgatgggaagtggggttggacatgcctccttattccctcctcctttttagaattcaggagctgctaaccagtgttaacatcaacacagagaccttaaggctgatagagcacagaaccgactcttaaagtctgataagaaacatttacggccgggcgcggtggctcatgcctgtaatcccagcactttgggaggccgaggtgggcggatcacaaggtcaggagatcaagaccatcctggctaacatgatgaaaccccgtctccactaaaaatacaaaaaattagccgggcgtggtggtgggcccctgtagtcccagctacttgggaggctgaggcaggagaatggcgtgaacccgggaggcagagcttgcagtgagccgagattgcaccactgcactccagcctgggcgacacagtgagactccggctcaaaaaaaaaaaaaaaaaaaaggaaacatttacaatctattctctctgaagcctgctacctggaggcttcctctgcatgataaaaccttagtctccacaactctgtgtcttaacccagacattcctttctgttcatttcaggtctatagataataactctttcaaccaattgccagtcagagaaaactgaatctgcctgtgacctgaaagtgttgccccctgaccccacatcaatgctttgagttgtcccacctttctggttgttctctgtgggatatgcgtgaggggagaagaaaagacacatacacaatacctttaagggtaaacgacctttatcccatgtaaatggcaatgcagatataataagcaaattgcaatgggaagggtagaagggaaagtatatgtgtatacacacacacacacacacacacacacacacacacccacccatcagactatggaggatttatcacaagaccaagaagcaacagcctgggttccagacttggacactacactcaccagactatggaggattcaccaccagaccgggaagcaacatcctgggctccagagttgggcactacactcaccagactatggaggattcaccaccagaccaggaagcaacagcctgggctccagagttggccactcctccttgcacagatgaggataggtctcctgaagcttcggctgggcctgggaccctagctctttttgtaacaagttgtttggcatgaggcccagtcacaagggcccttcacaaccaggctcaaggaacacaaaaaggtcaacttgtttttgctattgtctattgtttttcaataactaatgtataggaatagattgaaatagagatttctctgaaacagcgctggatgaaagcctcaagggactcacaaaacttgttccaggacttggtgactattgtttgtgtccaggttcaattgaattcagatttaatatttaacttttcctccatgctggaccaaaccaatatacatcttacatgtagtaatgtcttataactccctaaaatgtataaaatcaagctgtaacctgaccaccttggacacatgttctcaggatcccctggggctctgtcacagaccatgtgaggtaggaagtgggactctgttctggaggcagagtttggacactggatcaagttgaggactagctgaaacagggcaggggtggaagcaactttccataagatgcccaccagtatgccatgtcagtttactattgccgtggcaacacctgaacattaccctcccctttccatggcaatgacctgatgacctggaagttaccatcctcattcttgacatttctgcgtaaattgccccttaatttgaatacagttaaaagtgggtataaatatgactgcagaactgcctctgagctgctcttctgggcactgcctgtgagtagccctgctcggcaaggagcagtccctctgctgcagctgtgcactgctgcttcaatgcaagttgctatttaacaccatcagctcacccttgaattgtttcctgggcaaagccaagaaccctcccaggcaaagccccaattttggagcttgcctgtcttgcctcagttggtcaatcatggctcagaataaatctcttcaagtattttacagagtttgactctttttgtcaactcttccatgaacatcttttatgacagggccctccaactctcttggtttctcttctctttcttttgtgaactctgtctctgcctcacctcagaatactagtgttccatgggggtcactcagccttgtctctccaaggtgatccccagagcaccacgtgtttgctcccaggtttccagtccaaccccaacttttcccctatttgatatcttgttagatttgggtgtctaataggcatctcaaacttaacatgtcccaaacagaactctattattactccagatctgctcttccttatctaatggcaccatcctctacctcttccctgttttatctcagagaggggagggagataggtggttaaaggtataattttaaataggggttacagtaggccttattgacaatgtgatatttgagctaatacttgatgtgtagatatgtgggaaagagtatttctggctaagataatggttagtgcaaaggtcctaggtgaaggtcaggcgcagtggctcacgcctgtaatcccagcactttgggaggctgaggcaggcagatcacaaggtcaagagatcaagaccatcctggccaacatggtgaaaccctgtctctactgaaaatacaaaaattagctgggcatggtggcacgcgcctgcactcccagctacgcgggaggctgaggcaggagaattgggaggtggcagttgcagtgagcctagatctcacaccactgcactctagcctggtgacagagcgagactccatctcaaaaaagaaaaaaagtcctaggtgagaggatgtctggggtgttcaaggagactgaggaggctgacatcacgggagcagtgggtgaggcaatgtgaaagagaggtcagaggagtggcgcatgggacagggggcagtgcagctcatgtaacaccttgtgggccattgaaaagcctttggcttttaccctaattgagatggggagccactggtgtttttagcagagaattgaatggatctgatctgtaatttaaaagcatgtct

SEQ ID NO: 587443 - DNA, 4001 bp, Homo sapiens
attttattgtttgggttttttttttcaattttggtgggggatgaggaaagggaagggggtagtagagtggtcaagtaaggcttttttgtagtaggtgagctttgtggggaattgataaatgataaagtttaatgggggcaagagtgaggcaaggagggaagaacactcccagtggaaggactagcatgtgccagctttaagaagcagcatggcaatttagggtattcaacaaaggccagcataggcagctcacaaagtgagagggagaagggctcaagataaagctggagacatgggcaaccgccagatcatacagaggaaggacataatcatattagcactagctaatagtaacacatccttttatatagtacttaacagtttacaaagcactttaaaatgttttctttgttcctacaaatttgtgtagtagttattatttattattccaaattaattacatcaatcctctttagaatgaccacagggtaaggtccaattactcagttaaatcaccttgtctgttggtagtatacagctactcgtccctcaggattttatatatgctactatcatctaggaaacctataatgaacataccttcataatagcattttctaaaaattatgtaatatttaaaacattttttaaaaagcattaaaaataacatccatttatctacgactcagcttacggaagataccctgacacaagccttttaaaactgtgtgtttacaggtttgttttctccattagattgtgacttccttggaagtggggactgtgtgttgacagagccaagattttgcagtaagaaatcaacactgttgtttaatataatggaatccctcaattcaggtataaatactgagattcacaacgtgctagaggccataaagtcaataaatcatttaattcagttcaagtacaaagaaattttgctttatttgtaacggatttacaactttataataactgatatatttattcacgataaaacagaaaatacaactttcggtccacatgttttcaggtcattattaaaacatcccaagaaggcattcgttaagcaaattagctactgaagtctcctgtattatgttaaatgctgggaatatgaattccaattacacaaattccacgccttaatgaaactcaagtttcttaagcacacagaattgatccaaggtttggctgttcccagatttaaagaacatatcccactctagatcaactaaggatagggaaaagtgaccatcacacgtaagcacttacgtagcccagagttaattagttatttttcccttcagaaaagaaactactagtagggagtaagaaagaagttgtgttgtgtgtgtaaatgtgttttgagaaggagtgggacagagactagactaaaaggaaaagaaactggaaacccgggtttaagaagaaaactaaatgtagagtggcatatgagaatcacatttgttcacgcatcttttacacagcttttctgcacagagctgtaatccttacacaccacttagtaaagggccttacaggccctgtgtttcttggctccaaagaagcttcagtaaccacctattccgcctcttccgcaccgcccagcaaccagttagcgtgcgacaaccccagccccaagtccctcccgcccgcctcataaataaaagcggccccgggacgctggactggcgcggaggagggcaggtcaaccgaggagcagacaccgtgggaaacgctgcagagtacgcgtccgggccaagggaagggtcagcctcagcctccacctcagcttggcccgtacagtgagggctctggtaccaaaaagacaccagagaacccagctccccgaaagcagcgggtactcccgaacggcttcccagcgcttttagtctttccgcacccgcccccacccgaagttaccttcccaagtgacatcgtaaagctctgagaccttcgccatcttcccagaacctagaggcagcggggtgagagggcggggagacgcagtcacgtgacccgccaccgggcggtggagagttacgtagctttttctcattggccaagagagcagagggggcggtatccgccacgcacgtgcacgcggctctgcggaggggctttcggggaagggggcggagcgagctgggcggagcgagctggacggtggacggagctaggtgggcggtgcgtggcgctcccgcaatctcaggataccctggctgctggcggggctacggtgctggctcggggtgaggtgtgtgtgtgtgttgacgtggatttttaacaaatgctgggtttttagtgtccgtcaatcctggcttttcagttttttctacctaggcttgttcattctcttcacactcccttaagtacccttattctcttcatggccggccgcagtgcagccttctgcacgaatcccttatttgtccccaactttcctccttccgtaatgggatttgctttccgttcactttttaatcgactaaacggataaactccaaagttttgagagactaagtgggattcttcctttgcgctctgaagttcccttgaatgccctcgcgctagcttatacccttcattaacgctcgtcgtgcctgtcattgcttcatccatgtctgcatgccacactaggtttcaaactgtcgcgagtatgtaagtacttataaggaatgaatgtacgaatgagaccttcacagttcctgaacttcgctcctcattactcctgggtggatgggggagcctcctttcccaccagactaattgcttttaggaaactttggacgtcatctcctagacttaaggagaaatgtctggacaggaagtaaaaaatttgaggatgataagcgtatatttagtatttgaagcaatggggacatgagattgtagaggaaatatgtaagctgagaaaaaactaaaaatcactgcaatgcagccgaaagttattggtcagtaaagaaggggcagttgatttgagaagtagaaataatactatcccacaagtcaaaagagtggagggttttttttctcagctttattgaggtgtaatggacaaaaattgtgtatatttaaggtatacaaagtaatgattagatgtaaatatacactgtgaaatgattaccacaagcaagctaattaacacatctatcaccgtacatatttcctgtgtgtgtgtgtgtgtgtgtgtgttgagaacacttaaaaatctctcagcaaacttcaaagtatacaatacagaattataactgtagtcaccatgctgtacattcgatctccagaacatattcatcttacaaccaaaagtttgtactatttgaccaacatctctccattcctcacctgtcggctccagtcaaccgcagaggtttttttgtttgtttgtttaaaaaaaggaaaaaaaccatcaaaccatagaccccagagaagtcacttaacaacagagaagactagtgaatgtatatacttggattcaattctgaatgagctggcattctttctaaacagactttttaaaaatctttcattcaaaaagttaaaaaatactcagaaattcacatattttaatgctccagtaaagcaacctggtgcaataggaagaacaagaactcccagatctgaatccaggctctacctttcagtagctgggtgactttcagcttatttctctctaaacatcaaaaaggctcatatataaaaatctaataatatgtgtgtaaaaagaaaatagctaccttgtgttgttaatcaagataaaaacagatgctgcagctaaagcccctgcgtggcactctcatggaggtaccatcctatgtctagaaatactgtttatatgctgatcagtcccaaactgataaaccttcccaaaacccagtctggttgcttgacgtactcagatagctagctgatacgcatctcaaagttaacatatcccacacagaactgcggattcctgctgtcaccttccgcattcccaccttgtttttccctgtcat

SEQ ID NO: 587444 - DNA, 4001 bp, Homo sapiens
tgacttgcccaacaccacacagcaagttacaggactccagggtaccagcctaggattttaatgactgttttccaaaagaagtcacctttaaaaataatgagtgactcaattttacattcattaaggaaacagcatttaattctttcaatctcagttttagccagagtaatatattaagaggaaacagaaaaaaaaagttccctttagtgttcattgaaaagaaccagcagttggctctcaagttgctagctttcccacatgaccatgctaaggatctgattcccctgtctgttcagtcacagtcagtgttaatgggagtgaaaaagaggcctttgaagagagcatttgctgcaaataaaaacagcattctctagctcagtgatccactgtcctctgcctccccaacagaagacgactcattttgtccatttggctccctggggctgcaagttttgtgatctattttctcactcttaaccccgccacaccccacttcaattcactaattcacttctaatattattctttcaacctactggcatgattcaaaagtaacttaattgatgtaaggaagatttagtattccatcaatgtatgtgtcctaacccggttgataataaaatttcaagctggctaaacagaggcaagtgatggtctttcataacaatcagatcaagacatacagagaaacacaaaattcacaggaagacagacaaacatgctggaatgtcaggaaaagtccagaaaatattgttccctagagtgcccattacttaaaatgtaattttttatttctaaaaccatcagcagctccaatttccaggaaattaaccaactcattgcttaagacctggtcagttaagccccctctgtctgcacaaggagctcctttataagaacactgtatgggaacactacttatggtgtagtgtattgtaaaaagaaactctttcactttggttctattatttaagtcaaggtacactattaaaacttacctttcctttgccataaggacacacaatgaggacaaatcaatcctgaaaactctttaaacacctcctctcttttatgtttttccaattttaagtaaatcttaaagtcctaaatttctgaagtttcataaagatagctcactgccttttttacttccattcctttttcctacatcagaactttctagtggcaaatactacatcctatatcatgtgacagcaaatcagatttgggtagctccaatattaaaccaacacctgttctcaccacttctactttagccttgtctgtgaacaagagttttaattgtatcctaacatttacaaatttgagtacaaaaatggaaatagccagttatgaaacaatcataaatgttctctaatgaaaaccacactctcccacctgaattatacacataggtggttttacccagagaaatttaggactaacttagttatactgcaagattgtattaaaaataaatattttaataagcttacattgattaccccgtatgtaatatttttaaaaaattgaaaatgcaaatagttttgacacttacctgtaggaggaccttcctcccatccttctgctctcttaattcgatgtgcagtgaatcctaagcagatattgactccaacggcaaaagtgaacagggatattatctaagagaataaagagaccaagttgtcaaatacagctggagaagactaaatcaaattacacaaaggtgattcaaatggcttcaatatcaacacccaatcctaccacttccaaaatgcataataaggtgctatcttaatttgcacaacaaaaaggaaaatgccaatcagtcactgattctgaagatcaagcatgtcccccgtcattcctccgttctcccacctgacacgactggaacgagctcctccttgccatgtcgaggattcttggaaagccttttgcagcgtgttctctttgccttcacggagtgcactgctttgaggctctgggtttagtctattaactataagcaatcccacctgggaggttgacagactcctctgatttgtccagagcttgattacatcacagggtgttcacaaatcgcagctctgagcctaagaggcttaagctatcatcccccttatccccgcccccttacaggtccctcccctaacccacagacactttcatgtggtatcctctggcaacaggagggtttgttacattgccgtggcccataacagtgcatgttcattttcctttcctcacaaaaacatggtttgtcaaaaagaaaccaaatgcatttcatccgataaaaatgaaaacagggctgtgcaagggctttccaccagctttaagcttttaaggtttacaatgcagtcattcaatggcgtcaacctcaccactttatttttttaagcaaggaaagttttatcatttataaacctaataacgttcctgtctttcccatctatttattttgctggcagtttgagcgaccctgtccctagtatcacattctcagctacttctgcctccttgaaagtttctcatgatgaaatttcgcaaaattgtaactaacataaaagataacattattttccccatgctgtggttcaagtttagagaagtaacttttatcaaaatactggaaatgccagccacgcagcataaagtccttctgccctgggaggacggacaaaataacttcagtctctgcctcttcttcccgtaaagactgtcagcttgtttcgggcggggcggaggagggggcggtttttgagaggcagatgggtgggggaaggggatggcatgggaagctttattagcaattgaatttaggaaggaaatctcaatggcagcaagaattgaaatgtcaagaattgtttccctagttatttcttggttaaatgtagccaccaaatactgtgtcctttgaggctattgtgggtactaaagtttctttactaagcaatttggcaaccagcacactttcaaaagaaaaaatcaagggctctaaatctgaaagttgtttaaatattacatgccttcaggattcaaatgagggaaaaagatttgtttttggcctcttcctcagcaggtccagtgaccatcttttcttccgcagcacatgtgttcgtgcgtaaacaaatacgagacttaccatgcaacaaattagtaacagagtagtggctctgctcaaataaaacatgatagcacaaaagcaaaaacttgtttatagggggttgtacagtaggcctgggtttcattacagattcttagaatctagtaatatctaattgaaaaaaagaaaatacacatactgccaaactgttaattgcctttctaaaatccttttagttttgcactgttgcaaagaggacaggcttatacatttttatatgtaagcctcttgcttttgtctgtatgccatactgaacaaatttggagtagggtatttagcaaggcttataaaagatgttaactccatgaaagattttcctataatttatgttaaatttcaagatacaagccagacatgatagaggaaaacaataaaccccaaagaaaaatatcaaggcaatcctgttatttcattatatgccacagtgctctaaatgttctaaaaacaaaaacagcctcttcttttgccttgccagagtctaacaacttttgactttgtctgatatttgattgtataaacctagctagaagacaatgagggttcccttggaaaaaaagttagggttcaggagctgaacatcatccatttatttttctcttatatgcagactagctgggcagggggaaaagctgtaatagccaagttgatctgcttgttacccaatatccaaaagagttgacctcagccactatttctttgtttttttgtttttgtttgtttatttgtttattttgagatggagtttcactcttgttgcccaggctggagtgcaatggctcgatctcggctcactgcagcctccacctcccgggttcaagtgattcctgtctcagcc

SEQ ID NO: 587445 - DNA, 4001 bp, Homo sapiens
gaagccctgttactgcaagctcaactagtccaactctagggttgaaatcttctaatgcaaactctaataccaccctccaaattctccaggtctaagacgggtaccaccaatccccattgacctggattacctggttctcagctttgattcccacatccggtgttgacaatcttctatcattctccaagccagtcgattcttcctcagatatccctcatatctaagatgaccacagcaggcaccactacctcaagacagatctcttggcgactcacccaccttctgccttcactgtgcacgccacactttacaagcaactctttgtaaaacacggccttcaaaatatgatcagctaagaaccttctggaaggccatggatcaacaccaagtttcctgtgtggcacctgaaaccttttatccatcaactggtccaccttatctcaccaacctatcctctcatcagtcccagataccatctctcagctccagtgcagcaggtctctctcttctctcccacacaagctgtctccatgcctgcctcaggcatttactaacagcacttcctccgagccaccaccgtgtcctcctctcaagactacacttctttcaaggcacaagtcaacatgtttctttgtcaagatttaacctgttacacatcctgatgttttcttacaattggaatcgtctctttattcatgagtagtctattttaaataaacatgctgagtaaatacgtagagaatataaatccttagataaatgttcatttttgtctccttcctagactatatcctcaagggcctcagtcacacatttcctattagaggtagaagaatataagccatagattcaacatgcaacaactacaagacctctgttaaggtaaacagagaaataaacgattcaactacacgaattagtgttccattttataattctactatgtcaaacagaattaacaaacctgatacaaaaacatcaaatatatggtaacacaaataatataactcttttaggcctctctaaagctggataatttggtattttcatcacaaaaaggagacaacaaagactgcaatgcgaaattagcctgggctttgagtgtctaatttagaattcttccattacctctagtttaccttctagcctgaaagttcctgaatcataaaggatctctttagtttccttcgtgataagtgttctctgaaaacgctctgcactagggttcatctaactggggtctgaagcaccctaagggttctgggacacattctagaccatgagagaattgttcctttaaaaggggtccgcgcattactcaagttcagaaacaatgctgtgcatcatcactttactgcccaataagctccatttttccaagaagaaatctaacatgaaatctggcaaaagcaaagcaaagcgaaaacgacaagacgagcgaatgtcatcatttaaagcggcaggcagggccggctgggtcccgggtgcagcatccctgctgcccggtcaagctccgcccattcgagggggggatcccgagcggtcacccgaggcgcgcgaccgccaggtgtcccctgccaggggctgggggagcgcgccggccgccagggctcacaggggttggtcccggggcgctcggatgtggccgcgcggcaggggaggcgggaaccggtccgcggggctaagcaggcggctgtgggggcctggggcagagaggctcgtccgcggcccgctcgccgcgccgccggcccccgcactccaacccactcgccggccccttcggccgcccgccctcccctcacccacgctcggaaggcaacctcacctgcttggccggccggggaccccgggagcgggggaccaccagtgggcagcatcacggccagccggcttcctggaggccgcgctcctttcctggagccgcacccccgcccggcccccgccggcaacacgtcaccgcctgcgcccggagcgcgcccgctggcggcgggagcgcgcacgccgaggggcgcgttgagcgctggggggcggagcctgatgcgggatgattggcgtccgagcgctgggctgttccgtggacccgcgcggccacgccagtgtgctgtgcacgggaaatgtggacgtgggagcacggaggcacccagtactgtggcgtggtgctcgtctggtcgtcagcgagcctcagcgtacttaggacaccgcagtttatctttccttagcgctcctaacggttatggaaaatagcgcttgaaaacctggtaaggactaggcattgttgctcaactcttgacatttacacctttgccggtaactctccctgtttcacagatggggaaacggaggctcacacttattcagtctctcttgagatccacctgattcgtgagaggtagagccaggatttcattcttgcccgtcgatggcatatgttagtgcctatgttgggggaggcagactgccccagccctccccaacacacgcaatggttatgagaagaaataaagcgaagggtgttcctgagattgaccccatgacctacacttagtacaaggctaagctctcttagctctctggcttagcaataaactgctttgaagacacagaactttgcacttgagagccggaagagaccttgggaatcccgggttccatcctttcttccaccttgtatacaggtgaatgcactgtggcccagagataggaagtgaccagcaatccagccactttaaaagatttttaaaaacaagagccctagaaacgtctactccattccatttatcaagtaaaacaagcatagacagaactggcagttctacatcttaacacagaatccttcttggtccagcacccgcctgggtcacctcctcttcctggattcagctactgttaacggaagaaaccatgaagcctcagaaggttagagccaaagggactctactgtgtagccccaatcaccttcttttacagttaagagcctggaacccagagaggttgagtgacttggccaagaccccctggaggcagaggagagcagaaccaatgtttcagactcccacatgacttgcgcatcagtgtcttttttttgacaatctgttgctataagaaattactcgtttggataattttcacactagaaaaccctgtgacccaaggctagcattgagaagctaaagctggccactgacatactgtgattttaaggacagtctccttcgaaattatctgcctttcaaaatctttgccattggagacactggttggggttatgttagtcttccttaaggagggctctactaaaatgccagactaggccgggcatggtggctcatgcctgtaatcccagcactttgggagtccaaggcaggtggattgcctgaaattaggagttcaagaccagcctgaccaacatggtgaaaccccatctctattaaaaatacaaacactagctggacatagtggcttttttgtgcctgtaatcccagctactcaggaggctgagacaggagaattgcttgaacccgggaggtggaggttgcagtgagccgagatcacgccaatggactccagcctgagcaacagagtgagactccatctcagagagagagagaagaaaagccagactagtaagtattatcacaccatccatatttcctgataatttatatgtaataattgtctgataagagctaggaaagaaaaatataggaaagtatggaaacgtgtaacttggcatattacattctagagctgcagtgacaaattgccctaaactgggtggcttaaagcaagataatttattgtcttccagttctagatggtagaagcctgaaatgaaggtgtcagcagggctgtgctctctctaaagatctagaggaggatccttctttgcctcttcctagcttctggtggctactggccatccttggccttcctcagcttgtagatgcatcactttggtctctgcccctgttgtcacatggtattatctctgtgtgtctgtg

SEQ ID NO: 587446 - DNA, 4001 bp, Homo sapiens
acttttataatctcaattgtaattctttccagtgacatgtttcatttcttgtttagattcttacaagctaactattaaaggcggtgaaatgtaatttattaacacaatctattacttaccgttctctttctccagtttctatcaacttttggttaatcgctgctctcatctgcgcatctttgttcatcttgctaacctggacatcaacatgtactttcagatatagaacatttacaaagcattttctgctaaatcctctaggcaggcatcctaacatgtttaccattctattaactgaaggggtgatacatttcaagtgtgttaataatatcattactctttattaaacacttatgtgcttggcactgggctaatgcagtgtgggtttgcttttttttaaacatcacatttaattcccagaacgtattgttacatatttatattaataaaataatctgtattttactgatgaggaaactgaggcacagagatagaaagtggaaaggcaaaatttgaactcaagtactttgaccctaggagctccaaaactgaacataactgccgatcacttctgcagagactgcatccaaaaattgggagaagtcatacatactaaacatcaaaaaaagattaaatactattagtaaaaaaataaaattaccaggccgggcacagtgggtcacacctgtaatcccagcactttgggaggcccaggcaggtggatcacgaggtcaggagttcaagaccagcctgaccaagatggtgaaaccccgtctctactaaaaatagaaaaataagctgggcttggtggcaggtgtctgtaatcccagctactcaggaggctgaggcaggagaatcgcttgaacccaggagacagaggttgcagtgagccgacattgcgctgctgcactccagcctgggtgacagggcaagactctgtctcaaaaaaaaaaaaaaaaattaattaatcaaaaaaaataaaattactagataaggctctaagtgttttgctttactcttcactaggatgaacccacaattacaactgctaaacctaagtgtgtggatgtgtgtgtttacacacacactgctggtgggataagaagaaaacaaatctcaaactaattcctaacttacaaagtcctcaattgtcagtaaaaacagacaacccaaaccaaaatgatgttgaaagaagaggaaagttaggttttgaaagcgttaaagccacttaaaagtttaaattaaataaaacttggcgtaaactaacgttttcccacctaatctgtcactaacttgagattacttttgttgtcttccatctggcctattgaaaattcagactggcaatgagttaccagagttgattttttttttcttttttgagaggaacagggaaaaggagaagttgagtgagaactaggaaatgcttgcttttgtaattggaggctaacattttcaaaataactacaaggtctagtcagtaccactcctggaatattgaacttgatctcgtcttggctcctaaaatacggatagtgaccttggacaagtcacttaattcttaaaggcctcagttttctcactggtaaaacaagggcgctagggtatccctcccagttcagacattcttagggaaaatagaacagggcggagacagcgggagaggcgggagaggaggagccagaaaacaaagcgaggactggtttcaggccaactccggtagcacgccctgtcggagagccctacaggcccgcgagcgcgggtcggggacgctaacgaaagacagtacatcgaaaggagcctgggctgggcccgggtcccggccctgaggaccacgggcatagctcaccaccatcaccgcgggcgagggccgtcccttcccagcgacgaaatgacccttgcgctgaggaccgttacctaccacactcttcggctgcccggacttagaccctcagtagctcgggcacctaagcacacagaaagctagaacacgcatttccggggcggggtctcgccaccctgcctataatgtgagaatttaaccagcgcgggccgcctcctggttgctagggcctctgggtaacagagttcagaccttgccgtcgcgcgcgcgttaagtaccaggagaactacatagcccagcatgcaacagtctcaactttttcacggacactacatttcccagaaggcagttcgcaccgcagtgttttctgggatgggaaccacgccgcttcccagtctctgtgcgaggcgtgaagcgcggacctttcaacaagggctttattaattctcacgctgcggccctggaaagcgatggaggtggcggctaattgctccctacgggtgaagagacctctgttggatccccgcttcgagggttacaagctctctcttgagccgctgccttgttaccagctggagcttgacgcaggtgggaagcggcggcgcccttcgtactccgttcctttcccctttcggctgcctccggcctgacccttcccgcaatttctttctttctgactggcaagcgaagccaccgtggcggcttgcgtggactcacggaggccgctgcttctggggaatgatgcccatcccagaacccggtgggagccgccttcgcgcgctcttcggtaacgggaccctgggccccctccgtcagcagcccagcctctgaggtctgaggtctgagggctggcgtgcgggtagtgcctggggctctggctgctgtgtgtccacagcctggcttctgtttcgggggacgctgagaacattccttcctcctggagcatcgcttgtgaacgtgtgcgttgagaaaccacacctccttggaggacccccagttcctgtttcctctgaccgagagccgtttcttagaagagaaactacattccagtcatagcatttttaattactcagttcctggcacattaagaactctggtagagaacatctctagaagatagtgaggaaaagtggatttactcccacactgctactccttgctttatctgtagctggtagaatatccttactcttgtttttacaacttaacggcattttcgttatgatagagcccagagatctgcattttaaaattcacacccctgctgattctgatgcatgttttcagagatcacactttgagaaatagtgatctacagttaattataataacagacattaaagtataaaataagtttatgctaattgatttattaaattcagaaatatttaccgagtacctgttttgtgttacgtcctgataatatcaaaatgaacaagacaccttccgtaacaaaagaggactattagctagttaggaagaaaattgtaaacagataattgtaaaacaatatgggaaggcagtgatagggatatgtacaaaatacaatggtagtacttgaatatctttcctaaactagtctggggatctgggaaggcgtcttggaggagttaatatctaagttgagctttgaagggtaggttaagagttgactaggatgagagaggataagcttgatttttctttttatttttttccttttcctctttgccaccgtgtttcttccagtcaccccatgtcagtagatggtatcaccatgtttagttagtgcattagaaagtgaagccaaaattcagtgtctcaaaacaagaagcagttattattgctcacaagtctacgggtcagctgagtggttcttctagtcctagttgggctcattgatgcatccttgttcagtaatggatctgctgggaagctctgctcatttggctggacttcctcatatgtttggagggtgggggtagggtctcagactataagcttgtttaagattctttcacatggtctcctcttgacttttctccgtgtggtctcttatcctttagccgactagactagcccaggttggtaccaagagacacttgtgccagagtcatttggggtttatttcttttagccactgtctgcttggtagcaagtccggtcagctccacatttt

SEQ ID NO: 587447 - DNA, 4001 bp, Homo sapiens
agttcccctctggaggacactacaacggcagggccccttctttgcccctatccagcaggaagtagctagagtggtcatcacccagttcccagtagcaggtggggtgtcctgttatgagggaggattgagaggtgaggccagctggacttcctaggtcgagtggggacttggggaactttcctgtcttacaagagaattgtaaaatgcaccaatcagcgctctgtaaaacgcacaatcagcagcattctaaaagtagccaatcacggggaggattgaaaaaagggcactctgataggacagaaatggaacatgggagaggacaataagggaataaaagctggccaccccagccagtagcggcaacctgctggggtccccttccatgctgtggaagctttgtgctttcgctgttcacgataaaccttgctatcactcactctttgggtctgcgccatctttacgagtgtaacactcactgcgaaggtccacagctccattcttgaagtcagcaagaccacgaacccaccgacaggaaccaactctggacacaactatagcctccaactcctgggctcaggcaatccttctgccttagcctcccaagtagctggggctacatgcatgcactaatgtctagctaattttatttttatttttggagagacagggtcttgctctttcacccaggctggtcttgaactctcagcctcaagtgatcctcccaccttagcttcccaaagcacagagattacatgcctttccctcaagctacttgccatctcatcttccttactatattaaaagcaaaggctccggacatggactactggggttggatttctggctctgctctttaacagctatgtgatttggacagctggtttctttctgtgcctcagtttcctcatatgtaaaaggaggatatgaacaatggcttccatgcctggccttctttttcactttataaataagtatacttctctcctttctgaatgtgggaataatacattgtttataaatttagaagttggaaactacaaaaaaaaaaaacacaaaaaaaagagagagagaaagaaaatcattacattattcctaatctcatttgatgtactttggcctatttctttcaggcacttttctgcatgtaccttttttccatagctgaaaccatattgtataaatagcttcagattctggtggggtggttttttcatgtagtagaacaggtgttttcccaagtccctgagctctcactctgcacaccccatctaccatttcccagtgatgtggctttgggcggttgctgcagtttgctattacacaagtaagcatgcaacccacacctggggagagaactttcttctctcctgaatctcggctcgcatctttaagcgccaccccattagacaggaggcagcagaagcacaaagctccatgagtaactcctctcccttttggaaaagttcacagaaagcaattttggagaccttggcaacgtttaattatgaacatttagaaagacaacggatctcctcatatgcactgggacttcagggccaggtcttcagtttcatgattcgcatgattcgcagggctccggcacaggagcaatctgaaagctgggctgcaagcccagcgcggtctgcctcctgaggccccgacccactgcggcggcggcgctgggcccccttacctgggcagcgccagggcctcctccgtgcggccgaggacgccgaacaccgctggcagcgccagcaccccgtcaaggtcgaagacggccgcgcgcagcgtcatggcggcgggtctgcagcctagcacccggacacgcagctaacctgggagatgcgcgaaggccagggcgcatgacccgcccagcttggcccggctctgccccgcccctgccctggccccgcctcctccccacacccccttaacgggactccgccctctgcccgggttaaggctggactctggccgggaaagaggcagggggaggggcacaggaaagggagtcagagggagaggaagaggaggccgggaaggcggggaccccaggctagaatctcgcctctggatgtaacgctttctactgtctcaaaggaaagtccaaagtctcttatgccccctccccacgcccctgcagtagctgcttgaagaggcaaacccaggcccgggccttcctggacggactgacagctccctgcgaacttgctggacttggaatgcctgggaaagaggccacagactctgtgtgtgtgtgtgtgtgtgtgtgtgtgtgtgtgtgtgtgtgtgtgtgtgtgtgtcagcacatccagtgacttctacattcagaacataagaccgtgttggggggcgggggaggggcatatccagtgacttttctagattcagaacgaaggatcacagatccctcactatcctgaccactcctctaggcacgctcttctttgccaaggcaaatgtgtttctagaataaaatatgatgttccagctatcgtgtgccagcccagaatacttcgatttcaatctcttgtggaatgaagcttagaagaactaaatgtaggctattattttccttttgtacatgctacttgtaataattctgtcttaaaatgtgcgaggtttgtttttaatcaccgatttccacactattggctcgtttatgttcctagaaaaactaaaactttggctgggagttcttgagctgttgtagtgcagctccatgaattaaaaaccgtgtctttggtggagaccaaacagagtgagtgaggtctccaacagtggagaatttactcttgaatgtgtctctgtggatttatccaagataccctccaccacggagcttcaagaaccttgtgaggggttgtcagatacctcactgtaactgggaggtctacaacagtctctggatctagcaatcaacaacaggattgaccagagccgtgggtttcctctgggctgtttgcccttagcaagctatgctgttgcttccttctctagcttggtaacctcttccaggctcctgcctggagcagttattagtgttttctgagattcttgccaaagaagcagagagtggccaacactgccaaatgttacaggaagaactgaaaaaaaagctgtccaattttggacttggatgacaccggatgtttcagaacactttttgtgggccctttatggtagaaactggattactctggatttgaagactgaaagataggcagagaagggagtacagcaagctagtttctcatgaagttagttgatctcaaaggtataattgaattttaaaaaatagaaagaaaattgcagcctgacctatatagtatgaaacctgttaaatctccagattgggcatggtggcacacacctgtaatcccagcactttggggctgaggtgggagaattgcttgaggccaggagtttgagacaagcctgggcaacaaagcaagacattctctctataaaaaataaaaataaaatattagctaggcatggtggtgcatgccagtagtctctgctattcaggaggctgaggtgggacgatcactttagcccaggaagtggaggctgcagtgagccatgattgtgccactgcactccatccagcctgggtgacacagcaagactctacctccaaaaaaaaaaaagaaagaaattaaatctccaacttagagtttcctttgggctccagacttgccaacttcttactcaacatcttactcaacgtcaatatccaacttcttactgaacatcttctcttgagtgtctaacaggcatctcaaatttatcatggctaaaacagaactctctctgcatttctacttcccacgcctgttcctcctagtgtgttccctatcttacaaactggcatccccattgactcagtggctcagtcccgagaccacggagttgcttccagatccttggctcccagccaaaccatatgttcgtgtttctagcggtggcctgctgattgaggcagagatagcagcttc

SEQ ID NO: 587448 - DNA, 4001 bp, Homo sapiens
caccttcagtccctgtatttttaacctcctcctcaaatttgtttcctccaggatcaaggccatcaagctacagatggtcttacaaatggaaccccaaatgagcttaactcacaacttctaccgaggactgctagactgacccactggccctttgactggcctagagagttcccctctggaggacactacaacggcagggccccttctttgcccctatccagcaggaagtagctagagtggtcatcacccagttcccagtagcaggtggggtgtcctgttatgagggaggattgagaggtgaggccagctggacttcctaggtcgagtggggacttggggaactttcctgtcttacaagagaattgtaaaatgcaccaatcagcgctctgtaaaacgcacaatcagcagcattctaaaagtagccaatcacggggaggattgaaaaaagggcactctgataggacagaaatggaacatgggagaggacaataagggaataaaagctggccaccccagccagtagcggcaacctgctggggtccccttccatgctgtggaagctttgtgctttcgctgttcacgataaaccttgctatcactcactctttgggtctgcgccatctttacgagtgtaacactcactgcgaaggtccacagctccattcttgaagtcagcaagaccacgaacccaccgacaggaaccaactctggacacaactatagcctccaactcctgggctcaggcaatccttctgccttagcctcccaagtagctggggctacatgcatgcactaatgtctagctaattttatttttatttttggagagacagggtcttgctctttcacccaggctggtcttgaactctcagcctcaagtgatcctcccaccttagcttcccaaagcacagagattacatgcctttccctcaagctacttgccatctcatcttccttactatattaaaagcaaaggctccggacatggactactggggttggatttctggctctgctctttaacagctatgtgatttggacagctggtttctttctgtgcctcagtttcctcatatgtaaaaggaggatatgaacaatggcttccatgcctggccttctttttcactttataaataagtatacttctctcctttctgaatgtgggaataatacattgtttataaatttagaagttggaaactacaaaaaaaaaaaacacaaaaaaaagagagagagaaagaaaatcattacattattcctaatctcatttgatgtactttggcctatttctttcaggcacttttctgcatgtaccttttttccatagctgaaaccatattgtataaatagcttcagattctggtggggtggttttttcatgtagtagaacaggtgttttcccaagtccctgagctctcactctgcacaccccatctaccatttcccagtgatgtggctttgggcggttgctgcagtttgctattacacaagtaagcatgcaacccacacctggggagagaactttcttctctcctgaatctcggctcgcatctttaagcgccaccccattagacaggaggcagcagaagcacaaagctccatgagtaactcctctcccttttggaaaagttcacagaaagcaattttggagaccttggcaacgtttaattatgaacatttagaaagacaacggatctcctcatatgcactgggacttcagggccaggtcttcagtttcatgattcgcatgattcgcagggctccggcacaggagcaatctgaaagctgggctgcaagcccagcgcggtctgcctcctgaggccccgacccactgcggcggcggcgctgggcccccttacctgggcagcgccagggcctcctccgtgcggccgaggacgccgaacaccgctggcagcgccagcaccccgtcaaggtcgaagacggccgcgcgcagcgtcatggcggcgggtctgcagcctagcacccggacacgcagctaacctgggagatgcgcgaaggccagggcgcatgacccgcccagcttggcccggctctgccccgcccctgccctggccccgcctcctccccacacccccttaacgggactccgccctctgcccgggttaaggctggactctggccgggaaagaggcagggggaggggcacaggaaagggagtcagagggagaggaagaggaggccgggaaggcggggaccccaggctagaatctcgcctctggatgtaacgctttctactgtctcaaaggaaagtccaaagtctcttatgccccctccccacgcccctgcagtagctgcttgaagaggcaaacccaggcccgggccttcctggacggactgacagctccctgcgaacttgctggacttggaatgcctgggaaagaggccacagactctgtgtgtgtgtgtgtgtgtgtgtgtgtgtgtgtgtgtgtgtgtgtgtgtgtgtgtcagcacatccagtgacttctacattcagaacataagaccgtgttggggggcgggggaggggcatatccagtgacttttctagattcagaacgaaggatcacagatccctcactatcctgaccactcctctaggcacgctcttctttgccaaggcaaatgtgtttctagaataaaatatgatgttccagctatcgtgtgccagcccagaatacttcgatttcaatctcttgtggaatgaagcttagaagaactaaatgtaggctattattttccttttgtacatgctacttgtaataattctgtcttaaaatgtgcgaggtttgtttttaatcaccgatttccacactattggctcgtttatgttcctagaaaaactaaaactttggctgggagttcttgagctgttgtagtgcagctccatgaattaaaaaccgtgtctttggtggagaccaaacagagtgagtgaggtctccaacagtggagaatttactcttgaatgtgtctctgtggatttatccaagataccctccaccacggagcttcaagaaccttgtgaggggttgtcagatacctcactgtaactgggaggtctacaacagtctctggatctagcaatcaacaacaggattgaccagagccgtgggtttcctctgggctgtttgcccttagcaagctatgctgttgcttccttctctagcttggtaacctcttccaggctcctgcctggagcagttattagtgttttctgagattcttgccaaagaagcagagagtggccaacactgccaaatgttacaggaagaactgaaaaaaaagctgtccaattttggacttggatgacaccggatgtttcagaacactttttgtgggccctttatggtagaaactggattactctggatttgaagactgaaagataggcagagaagggagtacagcaagctagtttctcatgaagttagttgatctcaaaggtataattgaattttaaaaaatagaaagaaaattgcagcctgacctatatagtatgaaacctgttaaatctccagattgggcatggtggcacacacctgtaatcccagcactttggggctgaggtgggagaattgcttgaggccaggagtttgagacaagcctgggcaacaaagcaagacattctctctataaaaaataaaaataaaatattagctaggcatggtggtgcatgccagtagtctctgctattcaggaggctgaggtgggacgatcactttagcccaggaagtggaggctgcagtgagccatgattgtgccactgcactccatccagcctgggtgacacagcaagactctacctccaaaaaaaaaaaagaaagaaattaaatctccaacttagagtttcctttgggctccagacttgccaacttcttactcaacatcttactcaacgtcaatatccaacttcttactgaacatcttctcttgagtgtctaacaggcatctcaaatttatcatggctaaaacagaactctctctgcatttctacttcccac

SEQ ID NO: 587449 - DNA, 4001 bp, Homo sapiens
gatctgcttctggggggtacatgagacggcaggacaggccagcttctccttcgtccacctgcttcctcctcccttcccttcctgaggccatcctgagaccactcccggttacccctgcctcagacagactctgcttctgggaacccagcctgggcgcttttgtgtccacctctactggcacctgcctcccctagggctgggccctctccagcacgcctcgttccaggaccctccaggatctgtgagcctaaggcagccactcactatggcatccaggccagacgaggggcttctagggggtcagggccctgccctgtcccctgacatccggccagggatggcggtgaggaaatgagaggagcacctgatttcccagcaagggggaggggcagtgcgggccagggtggggcagggccagcgagggcggggcagggccagtgagggtggggacagcaccttgggcgggcccctgacctgcgcacaggccgccagcccagacaggccgcgtgctaagcgggcctcgtaagctcaggcaagtggctcaagttccccaaacaaagaggagatccagggaggaaggctggagacagggcgcttgggagcagggagtcgggggcaggcttgccctgcgtgtgtgagtgtgcctgccagtgcatgccccgcaccatgcgtgagatgcggcctgtggctggctgcaccactccctatctcttcctgaccttgggcctggtatgaacccctctgggccctgccccttccctgggccctgccccttcccaggcttggcaggaggaaggcccgggagtgggtgtcttgactccatgtggggcctgggagggcagctggacagagggtccggagcgagggggggcagggggtgcagcttcgagtgtgggggcatctggaggaggtggctgctgcctaggagagcacggggtcagggttagggtgatggggtggggaggaggccgagcagatttccccggagcctgaggcacaaagggcccctcctgtggattccccacttcaggtggcccccaggccccaagtggtggagggccgttcctgaggagggtgggtctgcatctcttgggtgaggtcactgtctgtcaccagactgcccggcaggcccccaccgcagcctgggacaaaggttggggaggctgcagccgcctgcctgagtcaggtcaggacagaccctggcagctgcctgggcccacacaggaggcagcagccttagcttctgcccggctgtgtgcccttgtgggaagaccccacccacctgcaacctgcaccatgatcagagatcagtggccccaataacaagcttggcacagtgcagcgggggcccagggcagggaagcagagccctgggcccaagtgatgaacagggcccttcctgcctctgcctcccacgggtctccaggcgaccgtgtgaccgcttacctgacccggagtggccacccctgggaccgctcacccaacagcaggcagcttccccggatccgtgacgcctccctcccggcaatgttgccaggagtcacccctctcaatttgtcggcctagctgcctcctggcctgggcgttccccaccctgcagagcgtgccccgggcggtcctcgctgcagggaaaaccgctgggcctgcgagacccccgcccctggccgcctctcccgtgagggctcggggccggcgcctcctcttcaccggcgcccgggactcaggggcgccacttcggactcggagctcaaattgcccagggcgggaaacctgcccggccagagcccaagaccccgctggccgccgcgcccctaccctggcctcggcgtgcggctccagcggggatccggtttccttcggcggccgccgccccgcccggccccgagcccgcacccgcacccgccgcacctgcccgcacccgccgcacctgcccgcacccgccgcacccgccgcacccgccgcacccgccgcacctgcccgctcgccgctcggtccgcagtgtctccgcgcgcccgctccgcccgcatttcaagccccacaggccccgcccccgtctagggcggcgcccaggtcggggccccgacgcggggcggggcggggcgggcaggtgccggaaaccccgcgcggcccgggcctggcgcttgcaccccgggcaaggggcggcggctgggcagccgggaccctcccctcgtccccagcagggagtcaccgcgaaggaacgcagggcgggcgcggaggcgtcctgtgcccttcagaacagctttttttttttgggaaaggagtttggagtgaaacgcggaccggccagagcggcggtttctatccccacaagccactaatgcggtgcgggctggtgtccctgcctccagccccgaccccaccttgtctgctcagcttcctggggacgctgcttcacgtcgtgtgtctgctgggtccaggggtcttcaaggctctccttggcaggcccccctgcccccatgacgttgtaagagctgggatgtcctgcctggagcagtgccaggcctcaccccccggtctggctcctccacctgggcacagagaatgttccctgtcaccctgggagtacctggtcccctctctgaagcccatcctggcacccaccttccaaggctggggcatgccagagacactgggcatggaggctcacagcctcgggggctggcctgggggcagcctcagcctggcacgggaaccttccatggatcttctggagggccctccccttggctgccccgatatcccaggtgggcagggccacggaagtacagggcccaaagcccctcctcctctgtccccaaggcccctcctcctctgtcccgtagtcctggaggtcctgagggctcaggtgctccccacccccacaagtgcccccttctcccaagctccagcccccacctctgcctgagtcattcttgaccagaaaatcatccagagccagccagccacctccaatgcacaccatgagggtaattgcaggcgcccacgcaggtgcaggagggacaggttaggccttcaggggttagggtgcttgggaccactgccctggctctgctctcacccacccaccaggtccacactcacacctgctcacccaggctgcctggaccctgtccacacctgccacactggccgcacagcatggctgctgccgactgcggggccctgaccccagaggagctctggtggaacccgcatttccccaaggcactgccaggccaaccgcatccatccccagccctgctcaccggatgcctggacactgtctgtgtggtcttgctgggaggcatggtggtgctggctatggcctgtggcctggagcacaccccagagccacttcttcctgcggtgagccattgcaggcagcgcccctgccaggccacaaaacctgggtgtatgccagcccctcgctgcaagaagggggtgttaggctggccagaccaagccttcttgtgtgcccagggacgggccacatgcctgtctgctcctcacccctccggtataggcaggtggcacagagctggccctgctccgctgcacccatttctgcccgtcacccctccagtataggcaggtggcacggagctggccctgctccgctgcacccatttctgcccgtcacccccctggtataggcaggtggcatggagctggccctgctctgctgcacccactggcatctgtcccctggctcctctccctcggctttgtcttcctgtgactccagatcccctgccctgtggtggcccccagcccagtgacctctggggacacctctgggggcagacttgggtgcctgccctactccccaggtccctgggccactcccagtcagggcttctgggagccaccacctccccaggggctccagtccagtgcttcagcccagcagtccccggagccacaggccactcctccagcccccaggcctgggcctataccacctacacagcaaggaagggcatcagggagggtgtcaggag

SEQ ID NO: 587450 - DNA, 4001 bp, Homo sapiens
gaggcacgagaatcacttgaatccgggaggcgggaggttgcagtaagctgagaccatgccattgcactccagactgggcaacaagaacgaaactccgtctccaaaaaaaaaaaaaaaaaagtatcattactattattttttgagacagggtctcactctgtcacccaggttggagtgcagtggcacgatcacagctcactgcagcctccacccatgggctcaggtgatcctccccactgagcctccccagtagctgggactacgggagagggcaactacgaccggctttttgtaaaaaaaaaaaaaaaaaaaaaaaaaagtatcactataaagagcatgcaacagtaagtttttaacaattactaccgtcactaaagccaatttggaacagagacctaggccttaagtagctgtaaaagtgtcaagactttcaaatataaagaagcatattcaaacacacttcttttactaaaaataaacttcgaaatttattttaaaacccacttacaggatgagattgacaacgtatctcaggctgaagagggaggcaggtggaagagtggttctttacaagagaagggatgtgcaagtactctttgaaataacaaccttagaaggagaaagataattgcaaggatccaaaggaagtgcacacagggcaaaaggaacatacagagatccttaacgagaccttctttccaatgtcaaagaacacaaggcagcgaggggcactgggaacaaaagggaaaaaactgtgtgagatgcaattaccaagggaggcaggcacccgaccccgcagagcagcaaatggaagtgactcaggaggggaataagccaaattcatgttattgaaaagctcattctagctgccagatggaaactgactgtggacggaaggagcaagagttaggaggcctcttgcaaatacgcactttatgaagctttacgaagtgttcaacatgtttattattaggaaaagatcaattttagtattcaatcacttacaatccgcagcgctagtcaacaattaacattcgttaaataagttttaagactgttctacaactttgccactgtaactaagttcaaccgatgagatgtcaaaatgattcattcaatcttatactatggttatatgagacaccagttaatgagcaaaagcagctaagacgaagctccacttaacaggtacagagacagggatgctggtgagtgctttttaaattttttctttttttaaaaacaggcatgaagtgacatacctagcgtatatggtgagattttaaaaacataaagccttgcaaactacccataacggctacatggagtgacaacagcaaccgtgaacacagaattaagtttaaagcaaaactccctcttagaacctgttaacccactgtagacagaactggtcttgacgatttcctccctcccagagagtgattcggccctgagggggctccaagacacccacccgaggataaagccagggagctgggcaccgaggaagaggctggggtccaagggcgcacagctgcaccttctgcgggacacctgagaagaaaggggtgccgagggcgctttggggacggggcagctggcgccaacagccaggcgcgggtcgactcctcacctcgggactgggacgcggcggctcctccccgccctccggccgcggcgactccagcagcgcgagagccacggcctcgccggcaggctctttactctgtggatcctccatgccggctgtcacgccagaggagagttgctggagccggacacttgctaactctcactctgcagagcccgaaagcctcgcctttctccgttgaaaaattaccgggctcgcgttcccgcggcggcggccacacaaactccagcggccacctcccacttccgggagcgtgtggcgtccacacgccgggcaggcgcagtgagccggcgtgcgcggaacgccagcgccgcagtccacagggggagggaggacgaacaagagggaggcgcgccggtgagaagacggggcgtggccggccgtaggcggagctagcgcgggttgaagttgcgcaaggatctagtccagtcactggagggtagcaccggcacgtgtgttcccgtcagtgtttcctgagaaggaaaaaagtagggtgagtgggaagatatcatagagaaagatgttttcgaccataaaaaataataaaacaattcacattttccataaggagtttcctaaaacttccactctgggcaagaaaagaaaatgggtcgggacttagtgtcccactataaacaattagaaaacggaacaaaatataggagacacctattcagacattggacaacggacagctgtggactgttttacctgagagaaaagaaataaaaggagccgtatatcatcctgcccttttgcccagaggcgatttccagtctgtggtgcgatgaaaggaaatcatatggaaacctaggatctcctgggttgaaaagacagagattggagttgacgaaattggggtaggccaagtcggttggaatttgtagggcagaattctggagaggagggaattacatggaaaaagagcttcagaaatctgcttaggagtaccttgaatctttaactgaataaaaaacgtgaaactccacaaggccaggaaagaacaattactggggagcagtacaccaaacaatggtgagaggtcacacagaactgggaatcatttgagctcccagcaaccagagtgaagagattattgaataccatggaacacgcaatagaaacctcagatgtgaaactgccattgcaaaattatcattgagacagtgaaagagatcagacctaaccaactccatcttgcttttaacctccaggctatccttattcattcctaggcgtaggccaaactaacactgggaggaacttagtgtatagcttatagtttaaaacaaaggtgatagccctttctcaaaataaaccctcttcttgagactagactgcttttgtaggactagtaaattagccgaaagattagaaattatgatttaggactcatgcagctgaaggctacaagattctaaccctctccaaattgctcctggggataatatcactattgtaaaatctaagatcagtgcttgagatattttgcaggccctgcacttgatggatcagctggcacctcccagattgataaactgactcacctgatcttggataaactagctcatctgattttgtgtcccccacgggaggaactgactcagtgcaagaggacagcatcgactccctatgatttcatctcctacccaaccagtcaccactcccatctcactggcttctcacccacccaattatccttaaaaactctgatccccaaatgctcagggagactgatttgattaataaaactcaggtctcctgcactgccagctctgcatgaattgctctttattgcaattcccctgtcttgataaatcgactctgtctaggcagtaggcaagatgaaccttttgggtggttacgaaagtgtcatgccttagtgagatataataaccgtagactgcaggacccagaacataaactactgtagattcttcaaaagccttaaaacaagccctgaaaggatcaaactgctctgtaagtaacctaattacctgtaagaacaaattctaaaactctctgaaagactacagtaaaatccaggattcaacaacattaaattcaaaatgtgagacatccagtcaaaaattgaaagacacgcagcacttggggatgctgaggcgggaggattgcttgagcccaggagtttgaggctgcagtgacctatgattgcaccaccacaacccagcctgggtgacagggtaagactctgtctcaaaagagagagagagagaccaagtggtaagaaaatatctcacgaagttcatagaaacaaaccccaaaatgataaaaatgatggaattaacagacaaggattttaaacacctgttatgaatatgctcaaaga

SEQ ID NO: 587451 - DNA, 4001 bp, Homo sapiens
ggggtctgctccaggagaggcacacctgcgtcttgtggcacctgcctcctctcccaccatcaacaacagcgcccaacccccacctgcaaccaccccatgaccctgagctggaccttgggaaaacagacatccctgcaaggggacacgccaagctccatcccctcctcctgcggcaccttcccctaacttcactcgttgcaagccacgcagaagggaaatgctctgaagaagacacacactccagtttcctgctccatcaggtcacaaatgctgggaagttttattccagctaaatcctcccttcagtgcctctcagagcctaagtgccactcagccgatgggctcttcaggtgatcttgaggaagacacacagaaaactaatattttctttcccacctacattttataaacttttgggatttattaatctatccttccaaccacaatgtccttaaacaacgtaaatttacttgaccattctgtcacatatccaataggaaaaaaaggctgtttcgagggaaggtgattagtgaatgactaaaacaattaacagctttcattcactttaatttggtgaatggagaaaggttttttttttaagttgattaggtacattacagatgctataataatttcttgcatagagaagagcatttattccaggcttagaagagtgcaaacatttgaaggaatgtaagagaagagtgtgttgtggtttaaaacaaggagaaaacctgcagtagcaagaagccccccaccaagaaggcaggcacagctttgcaggcagctgaccgtcaggtctgctcctaagaacctcgacactgaattcacagcctgccagccctgcttccaggagagggtcatgaacaaggtatttctggtgctcattaacatacgtgaatgtccattttagagcctagcatgtgactgcttaaaaactcttaggtcatttttaacctgtgagctgatcaggtgacaattccctggtcctgaaggagagggggaagcccacgtgcagtgtgtccctgaaaaggaagacttgagaccatatttttctccacattctgcctcactgagaaattttttctttttaagcaattgttttataactatagtttgccattatcttttcatttcaaagggaaaaacatgattatcagttttaaacatagagaaggaaaaaaattcatcagcgcctgaattaatccaagtaacacgagattcatgtcaaaaaccgccactcttttcattatgatgatgattacacggtgagggtaatgagctggggtttgcaggaagcaggagcacgctttattttctaacacttccgttctaaggcacggccaggttaaccaattctatttattctcctcctgtctttggtactaatgctatcacagaatttaataagcactaggatgcgccccacaccttaggtccactgaaggtaaacaccatgacctccgtctctcagatgaggacacagtggctctgggaggttctgctgtacttttcggtgaggctgccggagccggctgcagccccaccccggagccctgggctaggacccctctgaagagctgagcggctcctactcactcaccaacaggggctctgctaagaacacgaatccctggctgggctcgcctccgcccaggaccccagacaccaggtggggcctggcagggccggcccgaccagcagccatgcaagcaacaacacgggcgaggggtgggccgcggtccggggtaagagcgggggatgggtagggactggggtggaggtggggagtcggtctgggtttggggtggggcctggaaaggggccggggtcggggtcccgagtcaacaccgcggtctgagccgagagccgggtctggggtctgggcaggcctccgcaccgcacccacctaccgtgcttcctgtgcgccgccatgcgggaccctgccgcggacctcagaccacggcgcgcggtcctgagctgagcgccgtgccttccgggttccgccctcctgggtccgcccacaacagcaggaatgcccaatccgaatacgggaccccgccacgggcggtcagtcaactacatcacggccgtagattggctgatatcgagtctgtaggcgtgtcgcgaggctccagacccgcctctgggagccccgctgtggagcatgcgcggagggagggctgcgggggcggcggtgcgggctcttggggacctgaggacgctgtgagagcgctggcggcgactgctctacgcggtggcggaactctgggggcgaacgctagggagggcgttgtggagaagaggggaacggagggccccagaggagaggcgcccacccccaaccccacgggtgcacctgcggatccccagtccccgcttcgcccccaggcacccgccggacacagggaatggccagggcagtgcccccggccccaaggcacctgcaggatacagggagtggctagggcggtgtccccggtccccgggcacctgcgagacacggatagtggccctggctgtgaccccagcccccaggcacctggaggatatagggagtggccagggcggtgacccctagcccctaggcacctgctggatacaaggagtgggcagggcggtgtccccggcccccaggcacctgcaggatacaaggaatggccagggcggtgtccctggcccccaggcacctacaggatacagggaatggccagccggtccccagacacctgctggacacatgagtggccagggcggtgaccccaacccccaggcacctgctggacacagggcatggccagggcggtgtccctggcccccaggcacctgtgggacacagggagtggtcagggcagcggcccccacgtcaccccggcttgccagaccccttcttgtctccctgtccagctccaagggcctctgccctcccgctccaccccctcaggaccctcctccttgaattcgtttcttccaaaacatttcccaggtgtgtgccaggcgctgttcctcatgtgggctgtctcaggagaggaacccacggagatgggtgttttggaggaaaatgaagctggtagggcctaactgtagagtgatgggcgcgggcttgaggtaggtgagggagcaagactgggggtgcccagggaaagagagcccacaggagggaaacgatgtcccaggagaacggctgccctgtttgagtttggggaccagaagcaagggcaggataaggggagctcagatcaggaggaaaggagacccagacccaggcagggtctgcagggagcctgataactttgcatgttccaagaagcagggtggaaagttgttacacgatgtagagcaaaggggtgaaatgatctgatgcattttctttctttttggggtagacagggtctcactctggcccaggctggagtgcagtggtgccatcacagctcactacagcctccagctcctggcctccagcaatcctcccacctcagcctcccaatgtgtgggattacatgcatgagccactgtgcatggcctgatgtacattttaaagaagtcatttagcgttgtgatgactagagttgcatggaaggaagtgtggagatttcatctgctgcaataagagatgctgacagctcacatccaagtggtggcactggaggttctgggtgggggggctagttggattgtggacatgttttaaggtaaagccaaagagattttccgattgatcaaactgggctgtgacagaaaaggagaaatgtagaatggctgtaaatttttcgtttggaaactggaaggctggagttgcactgaggaggtggagagccttctggggatcttcgtttggtggtagtgtgcagttttagacaggtcaagtttgaggtgctcataagatgagtaagcatatgaggtcatgaagggagcaggcgtgaactttagaaagtggtccaaggaataagccccgaggggctctggcctttgagaggtggggagatgagggggcccaa

SEQ ID NO: 587452 - DNA, 4001 bp, Homo sapiens
atttttaaagataaagttattcattattttctgagaggattaaaaactgcattccacctactgaatacttttgccccaaagttacattccctgaaatacatgttttaatcagtttaaaactatgtaatggtgactcagtactctgcttgttaaaccaggatgctactcctaggataactgaagcacagcatggggtagagaagtcagaataataaaatgtatcttcctgaagcatctgttttccctcggcttttcatattgaaacccacaaaaatctatcatagaacagaatgcaaaactctacttaatttcataacataaaacacgaaacatcgaaacatcggagaaactccttgctctgtcctcttgttgcaggtatggaagctctgggttctttaggagaaaagttagtgagcactgtgcattagaaatgaatttttccatcttttcacattgttgtcagtgagaaggggtttacttttataatgcttttaattttttgtttacttcctgacttgtcattgctttccgttatctatggaaactagaaataaattctcatacaccacaaaaataacagcaacacaacatatttctgactaggacacagcggctgagctttgaaaagcattcctcaccgtctggtgcgctctaccaacaacatcagaggaagacatttctgttactgcaataacacaaggtgctaagagaaaatctgtgaaaaggaattcactccagtacaaaatccccgctaaagttcgccttgcagaagactgtaaactagcttgacggagtttgcttaacctccatagcattgtccaaaattttagccattcaaaatctaagaaaagtgagtcggctgtaaaaccctgtcattctctaattcatgtaactgcgtttatacttttcacagtacttatcactgtcagaaacgatcttagccaattgtttcacgtgtttcttttctgtctcttctatcttcaatctctacaaacagggtcacttgtatctccagcatctagccaagcactggggtattatatagcagatgctcaaaatgtccttgttgagtttcttcagcaagagtcagtgatgaccacttttgatcacacatacttctcaactgatacttaagccgaagataggggaaagtgtgtctgacctattcagagtgcagggacccatttgatggagtgaatgctcctctggattctccgcatcttttgccatctttgatgctgaaacgctaatgggagggtaaatggggaaaagtcttttttgttggtgttttagtagagacgggggagcggaagatctcgctttgttacccaggtttttctcgaacttctggtctcaagagatcgtcccgcctcagcctcccaaagtgctgagattgcagtcgtcagccaccgcccccagccttggtagaaggccttgataggacatttctcctgtgtttaaggcaatgccgaggctaaccgccttagggcctcaacaccaactccccgagatcccatcagcggacagggtgaatccagcgcccggcctcgggccccgcgcgtctcgcagcgagcgccgcggagcgcaccagggccgccgcacccgcggtcacagcagcgccgctccagatttggaaggaaatcgcgctttgtcccgggttctgctcgcatcctccgggacaaggcccggctcctgccaggcggggtggccacgggacacaccctttggacctcctggggagttagcccacccgagtccccagcccgggcgcgggcggcgccggtaccctgctcaccgctggggaacctgctgctgtcgccggccttgttgagggcgctgctggagcagcccattgcggggagcgcagacacctgtctcagccctgcgcgggtgtcggcccggaaccgggaaccgaaggcaactgcacccgtagccgcggaagtttctccagctctgcagcccggctcccttgggcgtagagcgcaagcgcgcagcggggctaatggtagggggtgcgcacctggaggaggaagggagctggcaggaggtggaaggagcctgggagcgcaaagcggaagagagcgggagggccaggacgcagaggagggcagggaggagtagagcccaggagacaggaggggagacggtggagggtatggcacagtaagagaggaaaagcccctaaagcagggatagggaggatgtcagggggcgagggcgaagcgctgggaggtatcatctgactcatcactaaatagccagggaggcgaggcggccttgggactaggggctattgattggtagactagatgtgcgatgacagtcttattttcttacataactacaattaccacaaggaagtttaactttgatacagtacgatttaatccaccctccatgttccctttttgccaattgtccaatccaggactgcacgttgcatttagttgtgtctctctttagtttgctttaatctgaagtagttcctccagtcttgctttgtcgttatgactttgacatttattaagagaatagatttttttttttttttgaaaccgagtctctctctgttgcccaggctggagtgtagtggcgcaatctcggctcactgcaacctctgcctcccgggttcaagcgattctccagcctcagcctccagagcagctgggattacaggcgcctgccaccgtgcccagctaatttttgtaattttagtagagacggggtttcaccatattggtcaggctggtttcgaactcctgacctcaggtgatccacccgcttcggcctctcaaagtgctgggattacaggcatgagccactgcgctcggcctttttttttttttttttttttccggagatggagtctcactgtgtcaccaagactggagtgtagtggcgagatctcagctcactgcaacctccacctccctggttcaagaaactctccctgcttcagcctcctgagtagctggaattacaggcatgcgccaccacgtctggctattttttgtattttttagtagagacggcgtttcaccatgttggccaggctggtcttgaactcctgatcgcaggtgatccgcccgcgtgggactcccaaagtgctgggattacacatgtcagccaccgcacccggtgagaacaggctttttttttttttaatttgagacacggtttcattcttgttgcccaggctggagtgcaatggcacaatctcagctcaccacaactttcgcctcctgggttcaagcaattctcctgcctaagcctcctgagtagctgggattacatgcatgcgccaccacaccctgctaatcttgtatttttagtagagatggggtttcttcatgttggtaaggctggtctcgaactcccgacctcaggtgatccgcctgcgtcagcctcccaaagtgctgggattacaggcatgagccatcgcgcctggccaggcctttttttagagagaaagaggctgggcgcggtggctcatgcctgtaattccagcactttgagaggctgaggcaggagaatctcttgaacccgggaggtgcagttttcagtgagccaagcctgccctccagcctgggtgacagagcaagattccatccaaaaaaaatttttttatagagacaggagtcttgccatgttgcccaggctggtcttgaactccttacctcaggggatcctcttccctttgcctccccaaagtgctgggattacaggcatgagacagtgtgcctgtgattttctaattacattattccttctatattgattagctgccattctactacaaagtaaggaagtgcttttccttccccccatttattcacttacatcagtgagcactcatgaagtctcacactatccaatgtagtatgttaccatctgtgagagtttgctaggggtgctataataaagtaccacagactggatggcttgaagtacagacatgtatttcctcatagttcttgagattagaagtcaaagatcaagat

SEQ ID NO: 587453 - DNA, 4001 bp, Homo sapiens
tcctgggctcaggtgatcctcccatctaagcctcctgagtagctaggactacgtgtgtgtgacaccacagccggccaattaaaattttattttttattttatttttttagagatagggtctcactatgtgacccaggctggctgaaatgttaattttaaaagagcatcccaaattagcagagtaggctaccttctcaagttgccatcaagaactggtactcagctggcttttgtaaaggtaacctagcagtgtagagctaagactgccagagggatgtagagctaagactgccagagggatgtagagctaagactgccagaggaatgtaggagaaaacagtattttagggatgatcaatgaggagcaccagtttcctttagattttgtctctaaatctatatacacatttattaatcaccacccatggcatcatcttggactactaagtgaagttctaaatttacatatatatgtgtgtgtgtgtattctctttcccgtggttactgacataaaaagctccatctgaaaaggctcccctattcaaggaaatataaatagagatgttcagcagaatctgctaggaaagcaatgaccaggaaagggagctatttaacaggaagttgccggcttctccctgtctctgccttacctgtaatataccccaatatgtccctcttctatcttgtgcacagctgagaagagagatgcacaaaagaaactggaagccacagccacaactgctcccaactgagccatcagtgagcctttatcctagggaaaagacacgggaaaatgtgtgtggtccaacgtgcaggagaaaaggccacaacagcgagaggacctcaccaagctgagctccctgcgagtgactcatatccagcctggtgtcgtgtgaacacaaggctagatctacaactcgcttcctcctcgttctcagtcaacgttcccctttctttaactgtaaaattagagcccccaccgcactgaggaagcactggctccggatacagccgttgctcaagggagaacccgtgccagctgggtagggttcagaacacagccttgtcttcctgtgaacacgaatgtgctgtcactgaacctttcctaccagtagtagggaagagaggcagctgcagtactttggcccaaattacagaggatgccaaatgacaggcagttgtggctatgtaattctggtcagagtctcccactcctaattgcctgcagtttcaaaggaaaccattatttactcctttcagatgctggagtggcagagccagcaggcgagcagagtttcaaggtaggattcgttggcctcgcatccaccttcccagttattcctttggccctaaacaggacagggctctgaacaagcctgaagccacactcccccccatatactttggcactttgcacctgacagatccccaagcccgtggtcagagagaaaggcaatgtcccaaactgcgagcctctaggctcctaggtccaaccgcgttcaggcaccaggacgcggaggagtgggatcctgaacgctgaatgatctggaactatggtgactgactgcaaagttcagctgtgcgtgcgtgggcccgtgagcgcagggcgtggattctgcctcccaggtctaacgtaaccggggcgcggacatctgcgaggcgcttattttaccgtggcggcctccggctaccgatctgcagttgcgtcctttcctgccagtgcccttccctccccgaggtcactcgcgccccttccccgccccgttccgagagagggtcaagcgccctggtctggggctgcggctccaatagcctccgctcggtccccctgcggctcgcaaggagaggacgcgacagaaaagggtttctgtctctctccaggagcgggccggctgagggagagaagctgctgggactgaggttcccgaaagtgacgggtcagccccgaccctgagcggcagctaggcccagcgcgcgcacgaaggggcgggggccgcgtaccaggctgtccctgcaggcgctccgtactcgtccgagcccacgagcaagaaaaccgtcacacccctcagcacgcgacttccttccgggccgtcgcttcgatgacgccatcaattcacgcgagaagaccacacccccgccccgcgctcgctctgcgccccgcccctcgcgctcccagcggtcaatggccgtagctggccgccagggatcgcccgcgacttggtcggtgcggtcctggacctcggtcttgggtatccgtcctggggctggggatgagggcggtgttggtgggagctccccgagagcgagcggcaggacgcgcatgccccggagtactgagacccagggcgaacctttccaaggcgttgactttggggattgctccggatttccttctgcattaggccgaacctggttcgttttggtttttttagagacaaggtctcgctcttttgcccaggctggagtgcagtggcacgatcatagctcactacagcctcgaactcctgggcttaagcgatcctcccacctcaccctgctgagtagctgggaccacaggcgcacgccacgacacttgacaattttatttttagtaaagacagggtcttggtatttctggtctcaaactctggcttcaagcaatcctcctgcctcggcctcccaaactgctgggattacaggcatgagccaccatgcgcggcctttttttttttctctccttgataaggtactggcgagttgcaactgtttgctttcctatagcacagctgaaatgaaacagtcttttcaatgtacagattagcatcattacctcaccaatcaaaaatccctaccttgagttgttctttatatttttctgggagctttggcccttgggatcctgcaacgccacaaagtatattaacaaggaattattattctaattttaatgaacggaatctaagaagttcagcgaggttcaagggtaaaagccaaggaaagtttcctttgtgtttccttaatatcttgagttcactgctttttaaactcctgccacagtgcacaggggctagtgcacttcgtctttctagataaactgtacgttcccgggagagcagagactgactttccttccgcacccccggggcttaggtgcccagtaaaaacagactgaaggcaacgtgggaccaggcccggaatccagagtttgtgtctcctagtctaagggcctcacgttgtcctccacctgccctattcaccagcatcacattggggcatttctaattcagccactgaggttattaatattttgtttgcaggagagaaagagtccacttaattatagccttcagtaaaagaaaaacttttacaccgggaagatggcaagctggtggtgttagacagatttaagactcaggaaaagggaagtgtggttttttccaggcatgcctgcttgggattggcccgtttacctttcctgcgtttgctctgggtgttgggatgtttcagcattacatggtgaaacccatacgagggttacatggtgctgtctgggagctctgtgcccatctccataaatgaaggcctttcatctccctactctgtccctgcatcccccaccccaaacagacacagctggccaatctctcgatcaatcctatcagaacttgagttttttctctccctgttcagtgatataacctcagctgggcatgcttatttaatagtttatttaataattgagtaagaaaaatggaaatattagggttcatcaacccatgaaatgggggctagcctgcagcatcaagtatttaaattacttgtaatttaagaatttcctttaaccaacctctggcaacccgtctcccctccccttcccacaaatatgtatattattatgtgtcaattaaaaataataaaaacacaaaaatttcctcacattaaactttggagtgaattgtggctagaagttttgggattttgttcttaggagtcattttaccagacctgagttatttagttgt

SEQ ID NO: 587454 - DNA, 4001 bp, Homo sapiens
atttttttagagatagggtctcactatgtgacccaggctggctgaaatgttaattttaaaagagcatcccaaattagcagagtaggctaccttctcaagttgccatcaagaactggtactcagctggcttttgtaaaggtaacctagcagtgtagagctaagactgccagagggatgtagagctaagactgccagagggatgtagagctaagactgccagaggaatgtaggagaaaacagtattttagggatgatcaatgaggagcaccagtttcctttagattttgtctctaaatctatatacacatttattaatcaccacccatggcatcatcttggactactaagtgaagttctaaatttacatatatatgtgtgtgtgtgtattctctttcccgtggttactgacataaaaagctccatctgaaaaggctcccctattcaaggaaatataaatagagatgttcagcagaatctgctaggaaagcaatgaccaggaaagggagctatttaacaggaagttgccggcttctccctgtctctgccttacctgtaatataccccaatatgtccctcttctatcttgtgcacagctgagaagagagatgcacaaaagaaactggaagccacagccacaactgctcccaactgagccatcagtgagcctttatcctagggaaaagacacgggaaaatgtgtgtggtccaacgtgcaggagaaaaggccacaacagcgagaggacctcaccaagctgagctccctgcgagtgactcatatccagcctggtgtcgtgtgaacacaaggctagatctacaactcgcttcctcctcgttctcagtcaacgttcccctttctttaactgtaaaattagagcccccaccgcactgaggaagcactggctccggatacagccgttgctcaagggagaacccgtgccagctgggtagggttcagaacacagccttgtcttcctgtgaacacgaatgtgctgtcactgaacctttcctaccagtagtagggaagagaggcagctgcagtactttggcccaaattacagaggatgccaaatgacaggcagttgtggctatgtaattctggtcagagtctcccactcctaattgcctgcagtttcaaaggaaaccattatttactcctttcagatgctggagtggcagagccagcaggcgagcagagtttcaaggtaggattcgttggcctcgcatccaccttcccagttattcctttggccctaaacaggacagggctctgaacaagcctgaagccacactcccccccatatactttggcactttgcacctgacagatccccaagcccgtggtcagagagaaaggcaatgtcccaaactgcgagcctctaggctcctaggtccaaccgcgttcaggcaccaggacgcggaggagtgggatcctgaacgctgaatgatctggaactatggtgactgactgcaaagttcagctgtgcgtgcgtgggcccgtgagcgcagggcgtggattctgcctcccaggtctaacgtaaccggggcgcggacatctgcgaggcgcttattttaccgtggcggcctccggctaccgatctgcagttgcgtcctttcctgccagtgcccttccctccccgaggtcactcgcgccccttccccgccccgttccgagagagggtcaagcgccctggtctggggctgcggctccaatagcctccgctcggtccccctgcggctcgcaaggagaggacgcgacagaaaagggtttctgtctctctccaggagcgggccggctgagggagagaagctgctgggactgaggttcccgaaagtgacgggtcagccccgaccctgagcggcagctaggcccagcgcgcgcacgaaggggcgggggccgcgtaccaggctgtccctgcaggcgctccgtactcgtccgagcccacgagcaagaaaaccgtcacacccctcagcacgcgacttccttccgggccgtcgcttcgatgacgccatcaattcacgcgagaagaccacacccccgccccgcgctcgctctgcgccccgcccctcgcgctcccagcggtcaatggccgtagctggccgccagggatcgcccgcgacttggtcggtgcggtcctggacctcggtcttgggtatccgtcctggggctggggatgagggcggtgttggtgggagctccccgagagcgagcggcaggacgcgcatgccccggagtactgagacccagggcgaacctttccaaggcgttgactttggggattgctccggatttccttctgcattaggccgaacctggttcgttttggtttttttagagacaaggtctcgctcttttgcccaggctggagtgcagtggcacgatcatagctcactacagcctcgaactcctgggcttaagcgatcctcccacctcaccctgctgagtagctgggaccacaggcgcacgccacgacacttgacaattttatttttagtaaagacagggtcttggtatttctggtctcaaactctggcttcaagcaatcctcctgcctcggcctcccaaactgctgggattacaggcatgagccaccatgcgcggcctttttttttttctctccttgataaggtactggcgagttgcaactgtttgctttcctatagcacagctgaaatgaaacagtcttttcaatgtacagattagcatcattacctcaccaatcaaaaatccctaccttgagttgttctttatatttttctgggagctttggcccttgggatcctgcaacgccacaaagtatattaacaaggaattattattctaattttaatgaacggaatctaagaagttcagcgaggttcaagggtaaaagccaaggaaagtttcctttgtgtttccttaatatcttgagttcactgctttttaaactcctgccacagtgcacaggggctagtgcacttcgtctttctagataaactgtacgttcccgggagagcagagactgactttccttccgcacccccggggcttaggtgcccagtaaaaacagactgaaggcaacgtgggaccaggcccggaatccagagtttgtgtctcctagtctaagggcctcacgttgtcctccacctgccctattcaccagcatcacattggggcatttctaattcagccactgaggttattaatattttgtttgcaggagagaaagagtccacttaattatagccttcagtaaaagaaaaacttttacaccgggaagatggcaagctggtggtgttagacagatttaagactcaggaaaagggaagtgtggttttttccaggcatgcctgcttgggattggcccgtttacctttcctgcgtttgctctgggtgttgggatgtttcagcattacatggtgaaacccatacgagggttacatggtgctgtctgggagctctgtgcccatctccataaatgaaggcctttcatctccctactctgtccctgcatcccccaccccaaacagacacagctggccaatctctcgatcaatcctatcagaacttgagttttttctctccctgttcagtgatataacctcagctgggcatgcttatttaatagtttatttaataattgagtaagaaaaatggaaatattagggttcatcaacccatgaaatgggggctagcctgcagcatcaagtatttaaattacttgtaatttaagaatttcctttaaccaacctctggcaacccgtctcccctccccttcccacaaatatgtatattattatgtgtcaattaaaaataataaaaacacaaaaatttcctcacattaaactttggagtgaattgtggctagaagttttgggattttgttcttaggagtcattttaccagacctgagttatttagttgtggacgtgcctaaaggcagggggatggacttcgtgatgtgctagtacatgatgatctagtacttctgaaaatctctttcttaagagacctgtgatttttat

SEQ ID NO: 587455 - DNA, 4001 bp, Homo sapiens
ttaaatggtgagccttgatttgctgatggcagtctatttatttcagttgttttgagcgcacttaaaacaaaatgctcttgttgagagcaatgcaggttttcttcatttttatcactgttttgataaaaacagtgctttttattaggtgatggaaacagattttcagtgaagtgtaaaaggctataaaaagaaacaaagtccattgataagattattttgcgtcaaaatttacataaatctactgctaagtaagctctacttgtaggtcatattaaaaacaatacatgtaccccccatacacacaattttctattagtttaacagtaggattctcaaattctgtctttatcaaataaaacattcaaatatcttcccaaagagttcatgaaaacaaatactatatacaaagaagctatgatagacatatatgcatgtatgttttaaaatcgatttctatgtgttggccatatataaattatagctcatatattttgctctattgtttacaagccccctataataactgtctgtaatgaactgaccccctggggcttttcctgggtagagtaattaatatctgagtacacagtctttctagaattgtttccagacaagcatctactgtatgcaaaacactgtaaaatattataggggaacagaaaggaaaaaggtaatagctgatttggtatatttcctagctatagaaaacagctttcttcaatgtgctgcttctatgtcaaaagaaaaaaacaaaaactaaaaaacagctttgattcccttgaaaaggactaaataattcattatgaaaacttaatgtatttccaagctagaattagaatataggttatcaggttatcactgtagccacaaggagtaggctagtggaagaacgaaaattttagaaaataggagagaacaagagagacaagaaggtggatttttctaagagtttctattcacaggctgagattcacctgtcacacttcaaagaatcctgcttcctcttccttggagtaagagctgccattttctttattgaattcctaaaagaaatgacaataaccacattcatcaaaatattaaaaatcgctttatcaaaattataccccctttaattagtctatttcacaccaagttaaaaccctattttctgggaggtcttcctcgacattgctctccttccacccctccaagggttacacgcgcttgttctgcttccatggcaccctgtatttccctaatagtccatttaagacattttcttgtttccccatctcaacagccttcaatgaaggcagagaccgtctgtaacttttcatcagagcccagcaagaaaacgggtgaagcacagtcctctgccattttcctagctgatgagcccggagcaagccgtttgcttccctttttataaaaatctcttgaagtcgtaaggctgctgaaaacaaatgctagaatgcacgagcaggcggctacgtggctcgtcagaattcatttccttccccttccctgggatcagggaaattccccccaaagcagcacacaagcgttatttcaaagctattaatgaatgaacaaactgaaaggccagggtctctgggaattcaggtcgagctgcggcttaaggggggacccctctggggctaagcgaggaaaggtaggagaggaaagcgtcccgaccctgaacccggtcagggaaacaaacaaacaaacaaaccctaaacccaaaacaaggaaacgccggcgtcgggaagagggaaacccggcgcctgtgagcgcggagaacgagtcagtggcttcttcggtctcgggcctgcggacctgccgagcgccgagcaaaagctctttccccgtgacattcgcccccacgttccacagggtctcccgctcgcctcagccttccacagccccccgcctcggcctactccagaggttacctgcgcctcagagcccggcgagctctcctcagcctagccagccgctccgtgagcgtcttcaaataatcgcgcgccaggctaggaggaagccgctgcgttccgattggccacggctcagcgcttccaggggctggctcggtgattggtggagcaccagcccttgccccgcccaccctggtggctgtttccaagattctcgcgccctggtgaggtgaaaaatctctgagggaaaccacgccacccacaatcccctgcagcaacgccggactccgttcccggggccttgtttaggtgcattctgggaattgtagttctcggtccagttgaagttgagatacattctggggtcacggggtaagaaatttttgtaaaatggcctctccagcctggcgacagagcaagactccgtctcaaaaataaataaataaataaataaataaaggcctctccaagattctcgatgcacttatttttcacatttgaagcttcattgtcagtttcactttttttattagtaactttaggtttctatttatttttcaaattaaaatataaaacttaacacctgctatgtgccaggcattcttagatgctttacatgttttgtttcatttacttcttaccacaatctgtaaggcattaatatctattgccattcccattttacaaataatacaacggagaacccaaaacaattgctatttacagaacagagctaaattcttactttggaaaaccagaaagttcctaaaacggttattgttagctattgttactatctttgtgtcaccagctcctggtacagtgtttctggcacatttttagtttcaaataagtttagagttttatgtttattttttcaaatttaattttcacaaatttgtatgtcatccttgagcaggggccatgttaaagttctctgtatcattccaattttagtatacatgctgtcaaagcaagcatgtaaataaatttcgttaagtgacgccctcaatttcatagaatgaagtcagtgacagtgatgtaagagtgtcagtttaaaaggaaaaggctgaggcaaaaaaaaaaagaatgtagagtttgcttgagttaaagcggggacagctgcccagaagattccaacccccctccccccaccgccctccaccagcaggcttggatatgagctctgtctggcctttgctacaagcaggtttttaaagacgaagaaggggggcaggaagtgggctgatacacaactgtcaagcattctcattgatgtatagaaactacaagcatcagtgattggctagacattgttaaactatagggtgtgggtcatgtcatagtgtcttgtgtggcagtgttaggttagtaggtagctacctgtggcagaagcaggtagtttcagtagatgaatacatagctcaagggggtggtagaacatgatggggtcttatcttaatgcctctccagacctagtaatttaaagggactcacattcctcagataaaagtgctttctcaagagaaataatcagggcaaagccaagtgctgtaggagctttacatgaatatgattattcctactttatagcaggaggacctctgaggttcagaggtttgggatggcaggccttcgatttaagccagaacaaagtccaatccccaagaggcatattgtcctggtgagtatcagaaacaactcgtttgtgtgctatgttctaaacccttggcgcccattaacttatttaaccctaaaaaatatcctgtgagttagctgctctagtatcatcttcatttcgctgctgaggaaagtgaagcacagacaggttaactaacgtgcccaagatgcccagcctctttcccttaacccacaaatcactgaaccaaactccttgccactacacttcgcctcgccaggattaaaaatggcgcccacggccggcgttatgacgcgccccgacgtccgccggaagtgcacggaggagttccgggggccaggcggccgccgcgagtctggtatcctgagcttcgtgagttgagcgctgctgctccgcggtggagtcaccgcaccgctcccgggatc

SEQ ID NO: 587456 - DNA, 4001 bp, Homo sapiens
ttcctcgaggtagggaagctttccaatcaatccgcagttcgcgcccaggagaaacttgtcaatgcattctcccttctgtttttacaaaaaaaattcattcaagacttaagtcagatgtctcatttcatcagcaggttgcctgcagattacatcattccctagtgttactttttatatgtttggatgtgccaggcttaagaaagatgccagcttctaataaacaaatacgggtattgggtatacagatctggaaagtcttggatgaatacaccccaggaaggatagctttctcctataactcgaagctcgtgtgctagggcagaggtcgtgagaacgcagagcattcatctgtgcacaggtgtttagcgccccgccctacccgatccggcacccgtcagcaccccggaacagccggtttttaggtcacctcagtcctaataaggggattccatcagttccgcagtgacacaacgggcagccttgcacgttcggacctgaaaaacctccctggcagtgggaccaaggccactaaagaaataatgacggaccgagcctttcgttgggagttcagaagcctgaaaccaggcaggcaccttcaggttccaacccacagtgctacttcttgcacacccgccgggcccacctgcacgtctacgccacagcgccccctgcccgaaggctgtgggcccaaaccccgcaggggagcggcgcgtctggggtctggacctggagatgggggcgctaggattcaaactccgcacgtcaatcaattggcaaaatggagctgactctccggctccagtaactactcaggaagcaactcgaaaactagtgaatgtcggtcccaaaccctgggggctgggagatgaagagaagcagcgacccccgcccaaacggtgcgccccggccctcaggctgggctcccacccacgcggccgggcaggcgtctcgccaccctgctccgggaacacgcgtgggccgccctgagagggcgtagggtgcggtggggttgggcccaggctggggtgggtggcgtgacccggggttgtcacctgtcggagggcttggtccagctgcgacgccgaggacaggctttcgacgtctattttagtttcttctttgcagtcctccgtcagttccaactgatccggtctaactagcacttcgtgcaactgtcccacctccgaaggtagagaagcacgggtcagtttcccccaatttcggagcctctttctgcaccctcctccctcgctcccctgctggggcggcccgcgcctctcttggggtccggacgcagaatcaaagctctcgactcgccatcggttccggtgcgttcctgccccccgccccaccccccacccgataggtcggaaaagccctggaagtggaccccggggcctccgagaccccacctcgtctcggcggagcgtcccccgacgggcaaagaacccggctcggtagcgccggcctctccacctgagctaagttgcggaggactgaaatggctccaaggcagttggccaataagtttggttttactctagcttccctaggcctcgggtccagactcacaagtgggcaaacaagagcacttatttacttacctccacccccctccccgcccaaacctctaccacaaacttcttgccccattccttgcatttagacgaaaatgtggagaaataccttcttgttggccagatccacgactttccagaacagcaggatcaactccttctcatccgagcctagcttggccccggtggccccagcagtgatcccaaaaagcaccaccaagtaatccggagaggccgtcatgacgataggtggggagggggagagggggggtcgggaggcggtaaggtggtgtggaagtgagaacgaaaaaacctgtgctaaaccctcttctaagagaaaaagaaagagcgcccaccccccttccttgctactgctagtgcaaaaggcggtaaccaaccacccaagcccacacctggtcggtgctccacgcccagggcaggaaggggggtgggaaggagggcgcaggaggcctgccctttttgtattcagttgcccgggcgtctatgcaaaaagcctggagcaaggctgccccccccgggaggcacgcaatggctgaaagcttttctgttttgggatgtggctttacctgcccgccccttccccctcccccacgtggtgcaggtaagagacacctggcggcgccggcccattggctccttcaaaccacgacgtggcagcggtgggggaggaggccgcttcgggagggggaggaaggggcgggagacaatggctggatgaatggagaggcgagggcaggggaggaggagggggagacgtgaggggcagggaagaggcggttgacacccagagggtagacgaggccagacggggaaagggctcagagaggtaaagggctcggagtcgctggggggaggggttcccactggaggtaactgagaggtgcaggggggctcggagaataccggctgcagggaacgaagccgaaggttctgaacggtcaagcgaaaaggccaggtgcagggaggcgaaaggaggccagaggtgaggcccggggcgcggagctgcccagggcgcggcgcaggcggaggacgaactgctgagggagggacctgccaaccgcagccaggaggtggcgggggcaactgcagatccccggaaaagcagctcctgagccaacacaactttcagtgcaaacagcaggagaaatcctgcgagcccccccttctccgggccggagcccgggtgcacgctcgtcccaaacccgccgcgctgcccaccttccggagaggaaccccgcgcgcggcagagccggacgccaggggctggacgcccaaccacctagtcactccccaggacgcagttatcgcgcgcaaagcagctgggggaccccgcaaggaaactcaggcacaatggagcccgcttctttttctgtcaactctgaatgctatgtctggtttggtcctggctgctagttcgaagctggaacatcctccagagctggggcccatttccttttatttgccttgggccccaaatgaaaagcatctatccgcatgcctaataaaaattttcttaaatcgggccacgcaggctttttcccaggttctgcgccctgaccccattccctctgctcatgcttttggcattgtattggagtgtgttgacttgaccaagctcccaaacaacctccctgctccacctcagcttggtctgcccagaggctcgtaccccaaccatcaccccccagccaccagatcggtggcagtatgttgttgggtcttgttgacattttagagagaaaagcgccagaggtgaagttttctcgggttttatatctcaaagcgatttgttcttgggaacagaattctgtctgaagtattaataattcggctctaggtgtccagccccgttcatattcatgatgtgaaacgggcaaccatgcacctatccctgcagaacccactccgggtacaaatccggtaacctttcaagacgcgtgtcaagggaagctggagacctggctttcccagtgggggttcagctcccgggaggggggagaggagcccgaggcccgcgccgtctcgtttcctggtaggagaaggtgcaggcggaggcggggcctcccgtgatacaggtggcagctctcgtcccctgagagcgggcgaaggccagggtcccacactcgcagcgctgcgacggcgctcgggacctccctcgtccactgcttgagttccagaggtgggtgcttccctgtcctgaacttcagagtgcggagtcataaatgggttccggctggcttactgcagtagcctcgctcctccccagccccggtaactccgagctacccgtccaggccctcgggcgtcgcgggggcagggactgggcgcggaacgaggcagggagggacctggaaaaaccacccagattgcattgcagtgggcgaggccgcctggaggagccgg

SEQ ID NO: 587457 - DNA, 4001 bp, Homo sapiens
acatgggtggctgggtggtcagtcccccagcaagatagaggcctcacgcacatgctgccggaccactcgatctaagagggtgtgcacatctcgggcagcctgggcagcagcctccaacacccgctccaggtggtcctcgtgcagccgggcatccatctcaagcagcgcaatctgtcctgaggctggcagcagggccagggccagctgggggccaccagctgcttcctccacatggctgaggtccgccagggctgtgccgtccacgaagccagctgagcacgcacacacaaagtctctcatgggtatcccggcatccagcactgccagcgtggctgcattcacacaagctgcataggtcccaccatctgcctgtagcacctgcagggaacccagggtgtcagtctatcagactccctccccaaccccatcacacccttccctccctggattgacggctgcagctggctcacctgcacatagatatcaatctgggagcgtgggtgcagctgtgtgaggatggctgcttcgaaagtctggcggagctgcaggcccatctcacaggacttacggtccccatgtggccgtcgcttgcgctcacctgtgctgaaggtcgctgaactatattgacagttcactagggccctgtccggcagggctcgagcccgggagccccggatctggaagaggacagacacatgagccaggcccactccttccagctcacactccactgtcctctgtgggtctgcctctccctccactttcaatgcctcagcaaggggcaactgcgttacctccaaaacaaagccccctgttttgcgctctctgtcttgcatgtgtcgccctctggcaccttttaattggcttccttgtgtccatccttgccccattccctgccaacccaagtttacaaacatcaacgctgcttctgtctcacctacacactcaaatcctaactaccttacaaaggtttcacattacatatgaaataagatcccaaatcatttccctactctacaaaaccctaagtcctcacctccccgggaaccctcaacctgatttggagttatcccctctttccccaccagcagtctttctgctctgcataagtgccttgcttgttttcaccaccgtggtcttcgcccttctggttccctccgcctggaaagcagagctcccacactcatgcgctaagcaaacactctttcaataccttcgctggccaggcagttacagcgctggaagcacagtaatgaaaccagatagttttatgtaaagttcctttctttaggaagcttatgttccagcgaggaaacaaaggggaaaatgcttaagcaaaataggcatttgagattgtaggtgcacaaaacaaagggtttattgtagggcgagaagtaccgcgtggataataaggtcgtctgggaaggagtgacgtcggagtagagctgaaaggagagggagcgagtgggggagtgcctagcacgttgaagagccgcaaagaggaaggagggcgcagggacagaggccgatgagaaaggcaggaccaccgcgcagcacactaaggacttgcgtttactccgagtgagatgcggtgctgagcatcggctgtgtagactgaggcgcgccggccgttgcccctcaagtccccgagccagcgctcagcccggctgccccgcagctcccacggccacacgattccccatcccgcgcgcccactcgcctcgtgcgggccgtagaccacagccagtgccttggtgttgccctgctcaatgtaggccgagccgtcagcctgcgcgaacacgcccatccgcgcctggatcttgcgcagctccccggcgcgccgcccgtccacccggtagccctggtccgacaagagctccagccccgccatgctgcccggccgccaggtccgctctctgcctacttctctgagccgcgggagaactacagctcccggcggctccgaccgcccggaatctacggtttccggaggtccgccatcacttccggttccggggaactacagctctccgcggccctgacctccgtggatctgcggtttccggcgttccgctgtcacttcctgtcctggtgaactggagttcaccgcggccccgacctccccggatctacggtttccggcggtccggctctacttctgtctccggggaactgcggcggcgctatcggggaagcagcggctgggcccgcagccgttcccggagctgtgccacgggtgccaggaggtgggcgcccgccgaaggaggaattgcccagtcacgccctcgtgaccagtggtgcctgcattcagcccttccccgcgccccaagtgtgaaagtggaaggatgaacccagtggggtgcgacactgacaggagaaggcattgagcggtcctaggaaagtgaccaggctggtgtcccaggatggtccacacctggcacctctccagtcctctcatgccctccctttacaccgagcttccacactgcagtcaggtgggcctcccttttccctttgaggatgcagatttcctcatcctttccagagaggggttgtatgtctgtttatctcttgccacttaacctcagcggcttcaaataataaaaatcattctattattatgtgctgcaatctggggttatctaggctcagctagatagtttgcacttaggatctctcctacagttgctgccagatggtagctggggctgcagccatcctaaagctttctccctcacatctttggtggctgatgctggtggcgggccaggacctcatctgtgcctgtcaggcagcacacctacatgtggcttctccatgcaaccagggcttccttgcagtatggcaactgggttccaagggtagccttccaggacaacaaggtggacaacatgtgcatggtatttttaggacctaacctcagaagtcacatagtgtccctcctgccacactctgtgggtcaaggcagtcagacagatctgcccaggcttaagggatgaggacagggaccccacccttcagtgggaggagtgtcaatattagactgtaggaagagcaggcgggctagggaaatgtggtctgctgcaggggcccaagttcagttgtcacagcatcccctccaaggtggttaagctctcctgaaagactgaggcatgagagtgagtgagcaagccacaaccctgctgctgcagctggtctgaggccatgatgggtcaccaccctctgccacttgccaccccggattccccaccctctgctctacagccactctgcttattgtggagcccttttcccctttcagtctgagctcttactgtccctgttcttactgagtcatcgtttttttcgtttgtttctttgttttgttttgttttttgagatggagtcttactctgcacccaggctagagtgccgtggcacaatgtcagcgcactgcaccctccacctccagggttcaagtgattcttctatctcagcctcccaagtagctgggaaggtgggattacaggcacctgccactatgcctggctaaggttttttttttttttttggagatggagtctcactgtcacccaggctggagtgcagtggcacaatctcagctcactgcaacctccacctcctgggttcaaacgattctcctacctcagcctcccaggtagctgggattacaggcatgcaccaccatgccctgctaactttttttttgtagttttagtagagatggggtttcaccatgttgaccaggctgatcttgaactcctgacctcaggtgatccacctgcctcggcctcccgccaccacgcatggccattactgggttgtccactgacagtccttgccgcatgcgggaagactagacgcccagggagctctgtggactgcccaccccagttgtgtagcattgaccgtagcaactcaggacaatgaggacgatgttggtcttcagcctaaggtgtccaaagtgggccagtgatagccgctacttcaagatcagtgga

SEQ ID NO: 587458 - DNA, 4001 bp, Homo sapiens
gcaggtttcctaagcaagagggagatactgtcacctacttggctcgagaaggtgctccaggcttttcagtttgcccgaggagctccaactctctgtccccagcctctagctgcacacccgaaccggatttgctcagttccaggctcaaaggggaaagaggactgagggctcatccgccctcaccccatcccccaacttcacacctggaccaaggccggcagagcccaaggctgactcccaaagacacgccagcccagacacttacttctcatactcggtgttgtctctgtcacagcgagaatccttgtgcttttgccagtctttgccatgcttgcaggtggtgaggagcacaacgtcctccccgttatggacgtgatataaggcattcctggtgtctgatcctatccctgtcaggtacctcttccccttgaataccagcatgtacttcctgagaggagggatggtgttgaacttcaaaaaccccctctcccctcctgtcctgggatgatccttagaaaagaggggaatagaaacatcaaagttgggtcggaagttttcagtactgatgctggctttggccagcatcgcctggccgatgtcaaaccccacgtcctcggtgtagtcaggccaagtgccggaatataaattaaaaattaaatgattcctaccattgttccacaagtggagactctgcactttggatctcaaattgtgcacatactgaggtgacaactggtctctgtctaaagtatccagactcaggacaaagaggcacgcctggctggggtccgaggtgtagaacctggagccctcgatggccgctagaatgttttggtaactttcggcgattttctcccctttttgctgtgggtatacgtagactttgaagccgtttttcttgcaaagggtgaaatcgaagcaggactccatgcggcacttcttgcctttgtagatgctggagttggcatctcgcttctgccggggggaaatgtgcacgctggaatcctcgttttccaattgatcccaaggaacgaaggggcgcagagcgtccgggaagcggggccagaaatgatccggactggggtggtgcaagccattcctaccgctgtgttcttctctccggctgtggctcctcgatgccctaaactgcaagcctccgaaataaaacaaaagggcgagacaagagccagctgagagcaggatgaaatagcgttttttggcctgcatgtgtcctgcctgggtcaagaggattgtaaataaacacaagaatcacccaagtttcccaatcaacactttcagctccagtccgccatcttcccgcctgtaaagacttcaaactctccgctcccaccttctctggatgcctttccccaagccgtggactgatccagcgcatgtgggcgatttctttaactttctccccttcggtctttcatctttgggttgcacaatgcacgggagagagcggggctgaatatctcgcacccagggcgggcgagcagcggactgtaattttcttgcatgcaacaagacggaggaaaagaaagagagaggggagaaaaaaaaagctcccgatacccaatcaatggcaagacgaagtgattgccttgcctctcggattcctctcggcagcgtggaaaatgagccccgggaaggcaacttcaactcatccaccactctccgtgcagagcactccggttccaacaagtcagccgatcccgggttcagccggctagtgcatcttgcagctggggcgccgtaacctcacaaatccctgcatctctctttattcccttctgcagcggctccaagactccggcggtgtttactcctgcgctcgcggggccggcccccgggacgcgcggcggcccggctggaggcggcggcggcggcggcgctgggtggcggcggcggcgcgtcctccccgcgggcagtgccggccccgagcagcgcttcgcaggcccccgcgcgaacgctgccgaccgccgcgttcggtcgccgaatgttacccggttctgaatgttacacttacacattccattcccgacacgacagcgctgacctcatccatccacgcagcccgcgctgccattggccgagcgtcacgtccggggggggcggtgcttccgctgcgcccattcataacccccggccgcgggccgaggcgccggcgcggcgttgggggcgtagggggcgcagggagccggggctcccgggttgcaagctgccggcgggctgccgggcaggtggagcgcgggacggcccggtgcgagccccgcggcccctcggcgcgcccaggcccggatctcggcctgcgccgtgccggggaccagaggcgcctgcggaaacgcggcggccggggaaggaggcaccggcaggggccccgtgccgcgcggccccgggcgccctggagaatctggcctcctgggctgcctgccggaacgcctagagaaagatgctttgaaggagggaagcagggaggaaaggaagacttcatagaaagcgaccgccgatccgaaagctgcctctcccagccctccttccactctccgagacccagtatttcaattttctgctaagcattaaaacaatctccccttactcctcctctacatagcacatttttttaaaccaaagaaacaccccaatgcccaacaataaagaggaattattacaatcaagaggaattgttgcaattcttcatgcctgcctctgtgctaagagtgtaagacggctatcctaaatcctcattatctacttaggccgccttgcctgagccccctctgtctattatgaagaaagcttccaagagatccaatcacagagaaaaaataaattttctaatggctgcagggaaaccagttaatttaagcttgccccagtcctcaaagtgatgttattctcttggtggtggtggtggtggtggtggtgttaaagatatctcttaaggacatatgactggtagaattgccaactgtcccagctatagaaggaacacttgcatcaggaaaactaccttatgtacaattagtgccaaatagttggtccttccctcactgacctcccactccttggcccaagctcctgccactcccagtggaagaacttcattagataactcaggtaaccgaggagcagtcccgctaaagatcctccaggtccacaaagatgtgctaggctcccaaacagtatctctggtcaaagtcaaactccctggcctcagatcctgaacactgctttacagaaaacacctcccaccctctggcctagctaaagtctcagggctcgggcaagctagacagttgcctagggcagccggctgtttagtgattgtttattatgggagtgactgagagctaggagcagacacttcccggcttccctcaggctgcaaaaaccccagcggggtgtggatgaagggcagggttataacaaggcagtatgaaatgatagagtggaaagtttcagacctctgttgtttcagatttgttttaataaagcagggaaggggcatgggtgggacattactatacattcgtgaagcctctccctatttctgacctgccaaagatgagacagcttttccagatttgacttgaaccccctgcacaatgtagagaggcctgggacaggaataaggattcagtcatcttccaaatacagtgacaatgatgcagataaaggcagtgattgaaaccacatgtgacccaaagctccccccagcccaagttgctaagaacaacagttcaaggcaggaggccttctcttctgatcagggtgcagattatctcagccctgtgaagtggggctgtgggactggaggtgctctctctctctctctctctctctctctctctctctctctctctctctctctatatatatatatatatatatatatatatatatgctggagtgcagtggcaggatctcggctcactagaaactctgcctcccagattcaagtgatttgcctccctcagcctccggagtagctggga

SEQ ID NO: 587459 - DNA, 4001 bp, Homo sapiens
tctggacttgccctctctcctagaaatacatttcccatgctcggcctggcccgacttacttctctccaaactgttcccttaaaatctttttactccgaggtcaaaactcttgaggcctaatcactgaaagatcccaactacacaccaagtattaacagggttttcccccactagaaaagcgagaagtggagggatacagacatacgcctgtcaatcattttttaggtaggtatgcccctcacatctctggacattaagcacgtttccggaagtctgaagagccacaattctgactcttccagaaagcacttaggctcgattctctcttgctcgtgagttcttatgattcctccggctccccacaagcaaacgaatgggaaattcccacaggataaggtatttttaacacatcaaataacagtttaagaaaacggtttttctttcatcacaaaatatttcaaagtccctctgctaaatagcaagtcgctgagaaggcttcgcttcgctccagactctgtgccccgcagttactatcccagcacacaggtcacagcgatagtcactgtatcagaatgcaggactcactgccgaacaaaatacagaaaactgcagagtctgcatggctgcaacacacaaagcctttaaaaacaaaagaaagcacggggagctctgccagtaaaaatgaagctacctaaattggacaaagaataggacaaagtgacaagaaatgctaaagacgactcttaagtaaatcacatatgggggaaataatggacatgttgtggtgttctgcgcttcctcctccaccaaaggagtcgaaccaagaggacttgatgaagcttttagagtttttaaaaagggaagaaaaatccaggttgcggggaagggcgggggtggggtggtgcgggtggcgggggaggggcaaaatccacaaaatttaagtcttctgagagccaaacagattttattaataaaaggagccgaagctctcgctcaatgtggggaagagaaagcagcacccatcagcagccgggcagccctggctcgcctccgaggggctcggaataggtgctgtccccgtcgctgggctcggagctccgccgcgcacacacgccccgcgcacccctgtccggtccagcccgtgcagcgcgaggccggctctaggggagctgggcctgggagccagggtcctgcagcacctggaccctcggacaggaagcggctcctctgactgtggctcctgaaaggaggcgagcccggcaaaaagagccagcggggagggcagcaggcgactgcgtgtagaagcggggggcagatgtgggaaggtgtgctcgggaaggggtgggggtagtccggagctgcgcctccgccgacagaagatgctccgggccagcagccagagaaacgccgcgggtcacagagggtggagggcttcagggagcagaggaagcccaacagctgcagccgagcgtccaaaaaaaggtggaggcgggtcccgagcagcccaaactgggacgagagagggcgtgtgggggcggggagggggtgccccagcccagggacccgttagccctcccggctgccggccgagggcctggcggcctctccccgggcccccgagccaccgggcaggcctactccgctcggaggctgcatgcctcccgccgccgggcagcagcagcctccccggggcacggcggacccggtccctcccgccgcgtccccagcgctcggggccagccccggcaccctcccatgagcccttccgggcgcggcccccgctcctcgggctcacgcgcggccagcagtcctaccggcttccagctcagggacccgccgccgccgccgccgccgcctgcgcgaaagtcggcgtcccagaagccgttctggctgccggccgcccgccttccaggccgcgcctgatccgccgctccccctgccggccggcagccatttccgacaggcgactgcggaacttgccgaagggcgccgcgccggaaatggccgaagccggcgttcgcgagcgggggcgcggacgcgggcgcgcgctcgccactttcccgaccgcgtccgaagaccgccgaggcctcccgcagctccgcggtgacacccgggtcaggggcgcggggccgggcgccggggattgtgggaggcgcgggggggcgcgccggccgccttcggagccccccaactcgcgtcctgcaaaggccgccgggccctgtcgagaagacccgaccgcagatggcggggaggatgctcccggcggcgtgggaaccgggtctgactcccgagccaccgccgcttccgcaggggcgccggccccgggaaagtcaagtcataaatccctgaatctaaaactccattctcagagaaaaggcctccaaggacgggcgccgtgcgcggcaactgcctgcagttttgaagccctttgactatttcataacaaagacaaggccgggcggcttggacgcttaggaaaatcctggggctttgcaaaaacaacaggttaatctagtcgtgtgggatgatcaccaaaacaagacaggaaagaagaacaccgtgtcaatgctgaaaagccagcccctgtgagccccaaagtgcacgttttccacagtcccaaggaacacgtgactgtgtgtttccacacttgagaagtcaggataagaccccttggataatggaacaggggatgggggtgggagcaagcaccctacctggtcacctgcttaacttagaaaccagcttttaaaacctgtaactgcagtatgagctacgatcaaatttgtcttaacgtattttttttaatgtttttaatacccagaacacagggcttctactccagggtttcctcgccagggaaccccaaacacacaggacctggagaagccgggtagagctggctcctggccctgcgcttgggtggtcggctgccttaagaagaactgcaccccagagacaggctcgcagctgccgaccttatccactcgccctttctgctggagcccaggcccagtgctccagcaaggaggctgagaaaatgctgaagactgatgcccacgggggacagcttgggctaaggataacgtttgcaaaacaaacctttaaaaacccatagcaacctgtttcctagagcacactcttcatctctccacccccaaactagtcccgactcggatcctccttttcctatcctctttctcttgctctcccgtctcctattcacttttcttctcctttcctcttgattattataaacaaatgctttccaagtcttaccgccatcatatgtgtacatatgcaacccttactgttaccaatttgttgaagtcaagacaggaggaggcaaagtttaaaaatcagaagtattgcaggaaatgaaaatggagtgagtgttgcctgggtatcataattttttttttttttttaacagttcctctacttggctctcctccaaaggtacgcggccacagcaggcaggggcttggcagtgtgggaggagacaccacagaagacagggaagaactaccaggccttggttcatctccacactggcgagagaggacgtgcagttacctgctacctgttcgactcagtcttttacgttggagtaacttaacacattgctgcccttaactttgacttacttgcttttaaagatgatgaagctggccaggcgccgtgactcatacctataatcccagcattttgggaggcccaggcaggtggatcacgaggtcagcagttcaagaccagcctggccaacatggtgaaaccctgtctctaccaaaaatacaaaaattagctgggcgtggtggcgcgtgcctataatcccagctactcaggaggctgaggcaggagaatcacttgaacccgggaggcagaggttgcagggagccgagatcgcaccactgcactccagcctgggcaatagagcaagtctccatctagggaacaacaacaacaaaaagattatgaagccttaggaagaacagggatattca

SEQ ID NO: 587460 - DNA, 4001 bp, Homo sapiens
tttaaaccacatggatgctaccaatagctttaaaggattgttttcaatatcaatttacttaaaatgttgaatgaaatacttttgatatttgataaacaagtggttttattcttgctgcaagtgtttttcttctttacaatgtattcttaatacgattttcacaaatggaaattttcttttgagaaaatcatttatcatgtctatgaaactcacacagcagtggacttccatttggccctctaaaactgaacagtggctcaattaggcctctatgtctgtcaccgcaaagaatgttcaaagattgaaaatccatggctgcttgctcacttactgaacactttgggccttgggagaactcaagcatgcagaaagtcaaatatcaaatatttgataatgcaaaagcatgactgtacatgtgtgcatgtcctcagaccccagactgtgggggaaaagactcatgcaagcataaaataaaacctactttgaaagacacattataaaaacaatcccaaacctataaaactacactatgtgcttactatcgaccttttgtaccccttgccattttaagaaataaaacaaaaacgtttgcctaaattcaatgacagctctgaatttattgaattcttgcaaatgctatgctctaatgtgttcaaaacctcctcccaataaatataaacccatgagtcattaacaattcatatactgattttgaatggcaaatattttaaatggtaattcaaaagtttacagatcttgttttaaacttcaaggtccactcaagccttacaaagtgtcaataagagaaaaatatattaattgggtaaatgtttgttatatcaccttctgaagataagtttgtttaatataacgtttgggaaatttattaaagcaaaaatattttcttccttaaaaagtgctatcaatttaatgttgttatctgttgtcctttcaaatgttaaatgcttcatttttttcatatcaaagtgtgtaaaagttacttatgtattgcaatgaacatatatgtaccgctttattcaataccacacaaatatatttgagatttgtgcagcaattcagaaaagagatatgaagtcatctccctgcaagaatatggtcctgcattacatttatctagagcataacaaaagtaattgttaacaattaatttgtaattatttcttaatgatcctgatcgctcataatttggaggttgggaattctacttctaggatgaaaccctgtggctcataaagtactaggtacaaagtgtcataattttccccatgccataatgtttttctttgaaaacaaatcaaaacaataataaaagcgctcctgttagcttgggctttgcccacaggacagctgttgtcagtcactacaatttttcaaacagtcagcttgtacttacagcgcttacatctgctgcatccaccagtttaatgtgttccttcgaattttctgggttagcaaacctccattcctgacatagttttgctcctggatgggtacgcgcgggggctctcaggcgctctggtgcagccgcggcgcttctgggagtggagcgcctctgcaggggaaagctcggcgcagggggcaggcgcctggccgctgccgcaggctcgggctgccgagcgactgagcgaaaacgtgttccccaggaagaaacccgccacagtggacggcaacaggaaggcttaaagtcggaagtggcactggagagtttctacctcgccccaaactcggagccatcagctcccaccgttctgtttggtaacagctttgcgcccagcgctccttccccaccaaacagcagcggcagatagcatctgagaaccctagacaaagaaacagcagaatctcatccctcgatttgtttgcgcagccttgtaggtctgcccatggagcctcggggctttctttttttttttttttttttttttttggtttttgcaacgcaaaccacagctattctcttgtcctaaccttattggtttaaatgcaacaattgaaaggagcactgctctgtctgactcaaccttgctgtttaaaaaaaaaaaaattatgtaaatgaacgcgccccacgctatctgaataaacagctgtgtgagaataacttctctgagacgtggtcaacacacacgcgtcctcttgcaacagtagttaccaattaagatctttggggagtagttacacgttatcttttacacttttcctaaacttttttcaggccctgaaacttagggaatccactacttttcataatttatttcctaactaacgtacctactactgaaacaggtctgggggaaataaaaaactagaatggccatttccctttaagtagaaaatgaaaaagcaaacgtgcaagcttttatcagtttaataatgaaagcctgaaggatgaatccgaaatgatttctagaatggcaaatcttctgtgaacaattccttggctatgaaccagataatgtttcagtgttaatatttttaaatggtttttggaaaagattcatgttatctagaactctttctttacagcttattcttttaaaaaaaaattcttactgacctcggaatctatgcatgacagtctataacactcacctaaagagctgagcttcagttaagatatgttttatacagatacatgactttggtgataagacttaaccattatgttgatttcaaatattcaaagaaggcatcgtttatgtgactaatgattgtatctcaatttgccagacctgtgccaacattcaaatacaaatgtttattttgatactagtcactcgttgtaaccaattttgtgctctaaaataaaatctttaagcccatcggatttttcttaaaactgttttgtcatcacccatagaatactattctgctgattaggtcttttatttaaggaaaaaaaaagcgtcctcattttttaggcgcttgatagatgtgaaaaaaattttaaaaatcacaataactttttgcatgactttataatacatttccagatcgtcaactaataaaacacatagacacaatcataactttatattgctaatatgtaaatgaaagcaccattccgatgcaaacaaaaaataaaaagctgctaatgaccaaaatttattacagacttccccccaaccaccgaaagtatgccaatctgaattcctcagaaaagaacactttgtcaaacataaacgacagtttaaactgcaaactcacctaggatttcattttgtatagtaccagcaaggaatcatgggctagtcatctaccatatttgggaagccaggtcaaaacacagttgattgctattggatctgttcatatatgcagcagaaatagaattatgttaccacctactgcactttctcagaccagaagtatcagttattcaatatactaaagtatatatgcagaaaataaaatacagcttgtaatggagatttctagcattgtcagataaaatgtaatgttgtggtaattcaatctgatatcaaacagtaaatacttttgcaaccacatttatttctaagctctataaaatctaaaatttgagatgttggagaattaaacaatgcttgaaattttacatttagctattgtattcatgcttccaattgtttaacaattattttagacataagagagtaagaaattatttttctaatccatgaaagattatattgacaaatccagaatatatgaactatataaaatcaaaacagtgggaatattatgtaaagtatgtcacatttatatacaagttacttgcccacattatagttaaatgtatcatattacatattttatgttgaaatttaatttttatttatataaccaaatgaaatattaaataaatgatgcatataattatgaagaaaattagtaaaatcatgatgaatgtaatgtgaccactaattgatatggtatagctcatgcttcataattatgtaacaaagagcttagtcactgactaaaagtaatatccatgtgca

SEQ ID NO: 587461 - DNA, 4001 bp, Homo sapiens
tttgacaactgaaatcataaccacctaataacaaagcatatactgatgaagaaacaaggtgcaaagtaaatagtgagaaggcagacactcaccttcggtgccattgggagtcatggaattactatttatatgagagttaccgagtttggggccactgggggattcactactaccactcagacggctatgcgggctggttagatcctgcatttccatagacctaaagacaagaagccttccatttgacagatgtaccaaattcataacaccaccatttaatgcgctaatgacttgacacctttgaaacacacttgcacaaaagtcccattgtatctatttcttagactcaaaataattcatctcacattttgacttcaggtatcccttcatcatatgcactatcaaaagatgtcacttgctttacctatacagccagtcacatgaagcttttaaaatttcatttttctcttacacagttcatcaagtcacaaggtctaatgtgagacaatgacatctattataattttcaaagaaaaaatacagtcatcgttgtctttttatattaaaaaggaccaaaggcattacttttctaaaagaaaaggcaactatgtaaagaagtaaaatggaaatagatcactcttctgtggaatctgtttcatctaataaattagcactaggtactcccttataatttaccacccagttgtaatttaatgggtctccaaaccaaataaaacacttgaaacctatagtctagtgacagggaatgagatagtcctgatgcatgtgtttactctggcaaactacttaattgttcctctgtttcccttgaaacaaatgcagcattaaaacattatgatgtcggctcacttgtttgctttgtggattacatacagtgtgcccagttgaaaaaggataaggccaacatacagtgggtccctgcaagcattagcactcggaatacctcagctgtcacttactctgggaaataacaacaattctactttagtgctataattttgcaattttaccatataaaaccagttaaatgccctctgaaagttcttagactctgcagttacttattccataaaaggtacaaaagccactactcatgttcacaatttcagaactatacatttatatttaataccctattagtgaagagagaatttatttaaagtcactaaaaacacacttagattccattattttcttacagccaatttcttaaaagtttagggcccatttactttattttaaactttgtatgtttttctaagaaaaaagatgggaggaggtttaatgtttacatatataaagttaatactatttgctcctcaccctatcaggtcaataaaagctacagtcattttaatttagaggtcgcacttacattgactatgggtatcagtttttaaaacagcttaacatgaaccattttacttctaaagtgagctttgacttccccaaatattctgaattcaaactagaaatggtctaaaatccaatttttctctcctgattctcattacacattcacagttttcctaacactagaaactatagcccataattattttcaaaccgaggctcctattccctttctacatacttaaaatgttttacaagcacacacacacaaactgttaagtaatttccaacagaggctgttactattaatagaaataattaagaaacactagacaaaaatagatatgggtcacagaaaggtaatctccaaaaatgtcaaatatcaacaatatccttacctgcaacttgaggaaacagcaacatctgaactggcttgagatgtttgcacctgtgatcaggggtaaaaaaattagaagatgttgttactctgcttcagtgtcagctcttaattatacagagcacatggctgagaacgacaatgctctcttttaaccaaaagagaaaaaggaggatactgcagcagtgaaaggcatattgtctttaagttgaggtctcaactgttgtttcctcctgcaggtctatcctcctcctccccttgtcagggggggaaggcagccaaatgacgtgatagtgattcatcactggcctatgacagctgcaaatgggattacccctcccccaatcaacatgcaaagcagccttgcccaggcagcttggaaaaggtgcttggaaaaaaatagcgaatgacaaaatgatcgtgtttaacagcaatagttcaagcagtaatcctccagcatcctcagaagatctttcatcttctgttatcaccagctgaaatagagctcccgcccacccctttgactcctgacagtttcttatccttatcataatggttttctcctacatttactatttgtcatttaacattcactaaaacagcttctgggcaacttcctgacaatgctggactaactatataaggcaaaggcaagttttcatacccaaagtcactccactgaacaatgtgctcatttaccctcgccaatttaaaattcaatgggttcttatcagttctgcctggtaaaccagaaaatgtagttagcttttttggtggattttccatcttttaaaccgaggaagaaaatggaaagtttaataatcaattcaccatcctagtcagcctacatttcagtctctcttgtttctagatgaatctgtacttcaggacttcactgaacaacttaactaatgtgcaggctttgacagtcactgcccttcttccagaagcagctcaaactgccagcaggtgataaagctcaggtgaggccaggctgctggcttgtaagctcaggctaacgcctcagtaggagagcattctgcaaaacgtttaaaatggctcagaattccaaatctttgatgtgcattttcattcaacctgaactgacatcaattagggttacagaacaaagatgagaactaaagcatctcgaatggcattacagttatccaaccaaacgtcttctgttaagtcctgttatttttaaattatgatttatgaaataagaaatactacctttctagcaagaataaagcatcattaaagtccaactgtcttggtataatgttacgtaaaatttctaggtatgtttctacaatacgtgcaggatgaaaaacaatttttaaaagacgcttgagtataagataaaaattaaatttcaatgcctacagatgtgtcattccgtgataacaaccttctgcgatttttgttaaaaattaatgttctcacacaagtttaagtggtttcctttagaaagtccagcaatatacctcaaggataaatttcctttttcttttttttttttctccacttttatacacctggaataaattataggtgagaactaacttagttttaagaactctcctggcttaattatgtgaaagagtatttaaagcattctttctgttaaatgttaaaatacatttccattttaacattagctggaaagtacaatgttggaaatataattttagtttcagtatacactttgaaagtttggttagatttatatttgtactttaaccaatcatatttaaatttcaaagtcaaactgttgttaataaagaaaaagtgaacttcaaaacaagaattagtctaccacatttcagtgaaaacatgcattttcacgacaacacatttcttttatgctggttcaactagactctactgtattttcatactctacaacttttgaaagtccatatgcatgatctacatttcattaagtatacttcagatatactcttttgtgtctcagggattatttaaaccatgtgttgtgtgttactgtatttaaaaatgactctttaatcaaaataactttaaaacaactaatcctcacttaggctggtcagctgaatccacatcgtggtccaggaaaaataaatctactctcaagaatgcgaatgcagacaacaattagacacagatgtgagcaaaattagttacagtttacaaaatgctacacttcacatgcttttagttttttatgtgtagtacaagatta

SEQ ID NO: 587462 - DNA, 4001 bp, Homo sapiens
aaatgttatgcacacaaatatgtataatatacatgtgtatatatgtatatgcatttggtgaaacgaaaccaatctacgcaatgttacaataactggaaacatgaagctcctaacaatgagtactgattggtaagtcacattattacctaaaggggaaatataagagtagttttatgattttgacaactgaaatcataaccacctaataacaaagcatatactgatgaagaaacaaggtgcaaagtaaatagtgagaaggcagacactcaccttcggtgccattgggagtcatggaattactatttatatgagagttaccgagtttggggccactgggggattcactactaccactcagacggctatgcgggctggttagatcctgcatttccatagacctaaagacaagaagccttccatttgacagatgtaccaaattcataacaccaccatttaatgcgctaatgacttgacacctttgaaacacacttgcacaaaagtcccattgtatctatttcttagactcaaaataattcatctcacattttgacttcaggtatcccttcatcatatgcactatcaaaagatgtcacttgctttacctatacagccagtcacatgaagcttttaaaatttcatttttctcttacacagttcatcaagtcacaaggtctaatgtgagacaatgacatctattataattttcaaagaaaaaatacagtcatcgttgtctttttatattaaaaaggaccaaaggcattacttttctaaaagaaaaggcaactatgtaaagaagtaaaatggaaatagatcactcttctgtggaatctgtttcatctaataaattagcactaggtactcccttataatttaccacccagttgtaatttaatgggtctccaaaccaaataaaacacttgaaacctatagtctagtgacagggaatgagatagtcctgatgcatgtgtttactctggcaaactacttaattgttcctctgtttcccttgaaacaaatgcagcattaaaacattatgatgtcggctcacttgtttgctttgtggattacatacagtgtgcccagttgaaaaaggataaggccaacatacagtgggtccctgcaagcattagcactcggaatacctcagctgtcacttactctgggaaataacaacaattctactttagtgctataattttgcaattttaccatataaaaccagttaaatgccctctgaaagttcttagactctgcagttacttattccataaaaggtacaaaagccactactcatgttcacaatttcagaactatacatttatatttaataccctattagtgaagagagaatttatttaaagtcactaaaaacacacttagattccattattttcttacagccaatttcttaaaagtttagggcccatttactttattttaaactttgtatgtttttctaagaaaaaagatgggaggaggtttaatgtttacatatataaagttaatactatttgctcctcaccctatcaggtcaataaaagctacagtcattttaatttagaggtcgcacttacattgactatgggtatcagtttttaaaacagcttaacatgaaccattttacttctaaagtgagctttgacttccccaaatattctgaattcaaactagaaatggtctaaaatccaatttttctctcctgattctcattacacattcacagttttcctaacactagaaactatagcccataattattttcaaaccgaggctcctattccctttctacatacttaaaatgttttacaagcacacacacacaaactgttaagtaatttccaacagaggctgttactattaatagaaataattaagaaacactagacaaaaatagatatgggtcacagaaaggtaatctccaaaaatgtcaaatatcaacaatatccttacctgcaacttgaggaaacagcaacatctgaactggcttgagatgtttgcacctgtgatcaggggtaaaaaaattagaagatgttgttactctgcttcagtgtcagctcttaattatacagagcacatggctgagaacgacaatgctctcttttaaccaaaagagaaaaaggaggatactgcagcagtgaaaggcatattgtctttaagttgaggtctcaactgttgtttcctcctgcaggtctatcctcctcctccccttgtcagggggggaaggcagccaaatgacgtgatagtgattcatcactggcctatgacagctgcaaatgggattacccctcccccaatcaacatgcaaagcagccttgcccaggcagcttggaaaaggtgcttggaaaaaaatagcgaatgacaaaatgatcgtgtttaacagcaatagttcaagcagtaatcctccagcatcctcagaagatctttcatcttctgttatcaccagctgaaatagagctcccgcccacccctttgactcctgacagtttcttatccttatcataatggttttctcctacatttactatttgtcatttaacattcactaaaacagcttctgggcaacttcctgacaatgctggactaactatataaggcaaaggcaagttttcatacccaaagtcactccactgaacaatgtgctcatttaccctcgccaatttaaaattcaatgggttcttatcagttctgcctggtaaaccagaaaatgtagttagcttttttggtggattttccatcttttaaaccgaggaagaaaatggaaagtttaataatcaattcaccatcctagtcagcctacatttcagtctctcttgtttctagatgaatctgtacttcaggacttcactgaacaacttaactaatgtgcaggctttgacagtcactgcccttcttccagaagcagctcaaactgccagcaggtgataaagctcaggtgaggccaggctgctggcttgtaagctcaggctaacgcctcagtaggagagcattctgcaaaacgtttaaaatggctcagaattccaaatctttgatgtgcattttcattcaacctgaactgacatcaattagggttacagaacaaagatgagaactaaagcatctcgaatggcattacagttatccaaccaaacgtcttctgttaagtcctgttatttttaaattatgatttatgaaataagaaatactacctttctagcaagaataaagcatcattaaagtccaactgtcttggtataatgttacgtaaaatttctaggtatgtttctacaatacgtgcaggatgaaaaacaatttttaaaagacgcttgagtataagataaaaattaaatttcaatgcctacagatgtgtcattccgtgataacaaccttctgcgatttttgttaaaaattaatgttctcacacaagtttaagtggtttcctttagaaagtccagcaatatacctcaaggataaatttcctttttcttttttttttttctccacttttatacacctggaataaattataggtgagaactaacttagttttaagaactctcctggcttaattatgtgaaagagtatttaaagcattctttctgttaaatgttaaaatacatttccattttaacattagctggaaagtacaatgttggaaatataattttagtttcagtatacactttgaaagtttggttagatttatatttgtactttaaccaatcatatttaaatttcaaagtcaaactgttgttaataaagaaaaagtgaacttcaaaacaagaattagtctaccacatttcagtgaaaacatgcattttcacgacaacacatttcttttatgctggttcaactagactctactgtattttcatactctacaacttttgaaagtccatatgcatgatctacatttcattaagtatacttcagatatactcttttgtgtctcagggattatttaaaccatgtgttgtgtgttactgtatttaaaaatgactctttaatcaaaataactttaaaac

SEQ ID NO: 587463 - DNA, 4001 bp, Homo sapiens
gttttagacaaaagttcctcttaaggactttagatatgtttgctagaattgcttacttaccgaggatgatatctgactaacattcttttgaaatgtgtctgaaagactgtcgtaggcctcacctttgttttgtggccacctggcgtgatttcctcaaactcttctcccagcttaaaggagatctcattatttttaaagatgcttttggtttttattgtgatgacatctccatctgtactgatggtcacagtgggttttgccaaacggcccagtttcctgctggctcttcctatacctggaaaccagataaaaggagtattatctttttgcataaagaattacaaatacattacattacaatacaatacttaaatctgttgttgactccaaaaactcaacattatctgtataattctttgctaactaggaggtttgcgaattgaacagatttaatggtgcatgacttcacatatcccaagccagcagctccaccatgacatgttaaaatagactatctttgcagaaaaaaaatctgtctctagttgttgtttagtgagtattctttttcactagtccagtagctattaatcttactgatttttgaacccctttgaaaatctgattaaagctatcaactatctccctattttaaaattatatccactcacatacaaacaaaatactttggtatggattttgccagatatttagctcttcacttgtattcttacatgtatatatatatgggtttgtttcctcaatgatgtatgtttttattgtggtaaaatatttataacatatatttaccatttgaagttacaattcagtggtattgagaacatcacaatgttgtgcaagcatcaccattatttataggattttaaaaaatatgttatatctactgtttttcaacttgctttttccccttatcttgtcttggaagttttccccttatctatgtcttgaaaattttccatgtcactctatatagatatatactttttcatagtacataatattccacagtgtgtatagaccaaaatttattttgtctgtctccctgttgatgaacaattcatttgtttccattttggttattacaaataattatgcagtgaacatccttgtatacacagctctgtgcagcacatgtaggagtattttcagtagaaatagcattacatatactgcaatacctaagttaaaattctaagggaagatatattgggaaaatactataatgtagttcatggaattcatatcataaaacacaatcacaggatgtgacagattggataatggttcctaaagatattcacgtcttaatccctggaacctgtgaatgttacctttacatgttaggagactgtacagatgtggttaatttaaggatcttgagatggggagagtatcctggattatcagagcagatctcaaacataatcataaatttccttttaagagggaggaagagggatgctatactacagaagaagagagagcagtgtgaaaatgggagcaaaatttggagcattgctggcacacactaaggaaagccagtagccagcagaggctgaaaaacaaaatctactctgaactttattctgaagatcccctaaagcttagagcaaacatttacaaaataatcattttaaaaaatagttgtatttttttgttttaaaacatttattaaaatcacttgctgtttagttagtttatgtaaattaatggtaacttatatgagagattattgtcaactccaacatagttttgcacagaactatatcctggtactcaatcaatatttattttttcctatgtgaaaaattagggagttcaagattaatattattttatacagagcaagttctgtgctatcaaaatgcccatttttactggatatgatatgcaagtaaacatagctcacccagctccttcatgtagtcttcggaattttcacaagaaatggacttccatgttccttggagctggtcaatcattctgtctgagataagttgatctcaaagaacagtagtttcatgtgtatgctggttttccctgaagtagtatgggaacttgtttttaatacaattttgggtagagaatgagatgagaaaagttaggaaataaaataaggaactctaatccttgcaatgttccttgagtatcatctaaagcagaaaagctttcttaaatttaaatacatcaggatgaaaatggaaacacagtagagtgtttagcagaactagatataccttttccaacaccaatttagcatcaaaactaaatgttactttccttccctaggacctgccaggcacaaagcagtgtgtaagagctgggcctggacagctgtgtttatgccgtggaacttttgtgcccaggtctctctctctgtctgtccaaagatgattcagaaaaagccaatttattggctgtttgaagatcattctcattcttgatagtttcaactaaacaccagacagacttcatagatggtacttgacatttgaagtaaaaagttaagtttagtaagggctagaacaaccactttaagtcatgtgcacaatgaaaaagagaatgggacagagaaaaaagaaaggaaagagatcatgttacaaacacatgcacacacacacacacacacacacacagccctgttactgacacttttccaggtgccagctcaacttcccaacggtttagagagccatcattgccatgagaacaccaaatatcttttaagtcctctttaatttaggctactttctgttcctttcaaccctgactgtaaaatctcagtgtccactaataactgtaagtcagaacaggggtcaaggaatataacagcaaatccatcagctagagaagaggggactccaaatgctaagtaaaggacaaacatgcccttatacattccatcagcccctgaggacatcattgttaattctaggcagagcttgatgtccataggttgacacaaagctattaagaaatactgaagttataaaattattttaagacaagaatggggacatggcattttataattcccattaaaatgttaaatttccaaattctaatatccaggccaatagtcttactgataattattcaactaacatttataaagcaattagcattatatgcctaatatgaggcaaaaattttgcatacactactgattaaatgttccagatatggttggtaaagatactatagtttggccaggtgcagtggttcttgcctgtaatcccagcactttgggaggcccaggcgggcagatcatgaggtcaggagttcaagatcagccgggccaatatggtgaaaccctgtctctactaaaaatacaaaaattagccaggcatggtgcaacgcacctgtagtcccagctactcgggaggctgaggcagaagaatcacttgaacccaggaagcagaggttgcagtgagccaagatcgtgccactgcactccactgcactccagcctgggcaacagagcaagactccgtatcaaaaaagcaaaacaaaacaaaacaaaaagccttagttcattggttggttttcctgagtaatttgtacgactgtgctcattcaacttaataggcatgaggctgaagccaggaaatgacccaacattgagggtaatctgggcactgaaggcactacaattcccaggatttttcaagaaaatgtcgaatgtgctgccacatatgtcggatgcacatggatcccctcccacaaggaaaatcacgattgaagatcacctccttgaagatgtcgtattgggagcggtgtttttccctgttgctgacaggttagacttgcacaggcgtcagtactgaggtgtgagacggagcccatgtatggcttctatctctgcactgtggctgctccgttcatgtgtcagtcacatcagctcagagactgcctaatgtcaactggcctagtcattttgtctactctgttgttcagtgcctcttctgtgattgatgctttct

SEQ ID NO: 587464 - DNA, 4001 bp, Homo sapiens
cctacatttataacattttagaatggtgatatcattgctaataatttataggggatatttaaaagggactagtcatcaaattgtgaaaactttaacatttaataaatcactatttcttagtttaaaataggttagaagccaatactttgatttccagtcacctaagttgtgaacttttctttcttaaaaaggggaatatattttcttgtgcaaggtatggaatgaataatttacagcctaacatagcagtaacttgctgacactgtgtatgtcatgcagagtttatggcagtcatagatttgctgaattttttaaacatgtgcatgtaaatctaagctctttctttgactaaaggcaaccaaaggttagaaattgggaagaactgggagagatatatggcgcaaaataagtaatgctgaggctccgatttggctgtctgtctgaaaaatggccacaggtgtgtcttcatgtcctggctcagttacaaaatataacattaaatgtatgaagtgagtccacttcgtgaatgcaggcaaaactgagtgtgattctagaatgactgaccttgggaaaaaccagtctccatttgcttgattttgcttttatttgatgatgaagacaatacctgcccactcatcctcaattacagcagctaatttcatgcagaaggtgttttattgactttaattataatcagccctttataatttaaaaacacagtattattagaaaatataaatattaaaagtataacatttttctaaaaataaatagttaaatggccccaaatcctggcttttctgcatcagtgcatattaattagtttattgaatcactctagtttattctagaaagtctctctcatgctgaagtcaccaatttccctatcatctaaaaacaagaaacatagttacagacaagcaaaaaaatatatactgtataatttacaggagggttaagtgttttgcgatttaatgattacattctaaaccctaagattgcataaaattcctccccagtttgctaaccccagttctgactttattggactgtcatgcatggggttgagggagaaaggttttcaaagtagaagctgcctgagtgagaagttgtcttttctgatttacctccatagttatctgagagacattcatccaatgacatgctgacagttaacagcgtctaaaaaattaaaaacctctactatcaaagaagaggtatgttatatgcgtaacattctccttttaaattggttgataattctatggcatactatgtcatttctagtcaaaggaagtatttaagccatttaagaaacatattttctgaaattaaaatttttgtctatcataaaacaaccacatattttaatagattaacattgagacaagaaaataattggctaacatacggttactgaaaaagaaccttgcattaagggaactagagtgctttcagtttgaaatgaaaattattgcatactaacttttttccaagttattgcttaatttacatgcaaaaggggatgaaagagaaacaggcaaagagctaagtaaaccaaggatacccaagtttttcaaataaagtcaaatcttatcatttctaaagacaataaacattccatttagacacctttttatattggtacacctttaggaaacattagttgtagctttggttcagaatttctctagaaacaaatgattatcacttgctatgtgtgcagcctctctatagaaagcagcatttttcatttctggccagggcttccagacattgctataaacacagctgtaaactctttttcccaaaagaaaatattataaatccagtcattccacaacgcatttccttacctacttctttcatataatcatcaaagttttcactggagacaagtttccaggtacctacaaaagcatcacacattttgtgagttttctaggattattcttcaaggtgagaaggaagctgcagttttcaggagggtgctgtgaccctcttgagtccagataacttccttttaaagatgctcagaacatgtgatcttaggaatgaccaattgggaatgagatccaatcatttccttcattaccggcctctgcatttttttctctgagtcatgtttttaatagaaatttctcaactttggttctccctggcaaatagtcactggacttagagtacaaattatttttaaaccactaacaggatattttaaacattcctgttttgacagcttaatgctcagtgcactgaatttccccctattattcctatacatatttatcccagtgtagagaggggaaattattttgagataaacttcgaccttattttgtgtgtgtgtgtggggtgttatttaaattgcagttatgtggttcttttgaattgaggaacataagaactgcctcggagattcttacataattgcaaaggctcttcgggacactcctgtctcaggaattacctggcgattaaaacaaaataaataatgggatttaaaagtactccagatttctgatttcaaatgttttatatgaataaaaaagtacattcaattcatccaccagtaatctggactgtagatttaatcgaaatgataatttaacctcactctttccatctcctaaatgagagcatagcattgatttccacagatcctttgaaaaataggccttattctaaaatactttcctcatattgagaaactgcattcaatttctgaactgtattataagttctgaatttattcagatcagaaatggtgtgtggtcacaagctaccaaaaccaatatccttcttttatacagtgaccaatctgtgaaactagttttctaaagtaatcgtggttttcaattccctttgcctcatgcaagaatgacagaagttgttcacatgtgctgcaaattcccacgaacatacccagatttaggggaaaaaaagaaactaaaatatttcagagtgatgcatcgctacactgtgtatcccactgaacagtacctgctgagcatgtgattgattcacaagcctgtgtaagtgtcctgagggcttcccaaaaatgtttgtggcaggaaattctgtaagcaacaggattttctgtaggaaagcaagttgctatgaaagcctgataaagttaggttttgcatttgttaatggcacagtaataacgctcatctactctggactgttgcatagatacacagactgtggtgatgtaccatccaggtaggcttgctattagtgatccacctgtttcccattgaataagactgttcagatggaaagtaaataaaagtgacaaatcttaatagagggatgtttttgataatgttttaaattaatttgcttcctacaggtttttaaatgattgaatttgaatacatactatgtgtattctaacactgcaatttggttttttaaaatttttgtttctatagatttcggactacatgtgcatttttgttacatatgtatattgagttgtaataaagtctggacttttagtgtaatcatcacccaaatagtgtatattgtactcaattggtaatttctttcttttttttttttttttttgagatggagttttgattttattgtccaggctggaatgcagtggcgcgatcttggctcactgcaacctctgcctcccaggttcaagcgattctcctacctcagcctccctagtagcggggattacaggtgcccaccacatgcctggataattttttttctcatatttttagtagagacagggtttcgccatgttggccaggctggtcttgaactcctgacctcaggtgacccactcgcctcagtctcccaaagtgctgggattacaggcgtgagccactgtgcccggccctgataggtaatttcttatcccttgccccctcccaccttcccaccttcccaccttttggagtctccaattgtctattatgccactctgtacgtctgtgtgtacacattgtttagctcccacttataagtgagaatat

SEQ ID NO: 587465 - DNA, 4001 bp, Homo sapiens
atgattgtcttgatgaagaacacccagccaggctttaaagttccccttggagccttctcttttgccagctcagggctggtgccttatgctgttaattgagtcattatgtactctcactttggacaaataaatgggctctgctcttttcacattgtgactgctccctaatgaactgagtcttgacaaccttcaagactccagaatcctggaaacaagccctccaaacctacacacaatttgctttctacaggcagagaaaagtgttctttgggccttaaacttgtacacacacacacacacacacacacacacacactgttatttattggacaggtgcagtaaatcgctttttccagagtcatcttgatgtaggtttacaaggaaaaagaaaaatactgccttctttactgatagtatcaaaaatacactcatgattcaccataaaccagccttaacaccacatggtcttggataaagggtactgaaggagtgattccgaagtgccacggcgaccaggtatcaatagagggtcacggtagttatttcaccagcgagcaaccgggttaacatttgtggataccggcttctgaagcaccctcataaatcccagccatcccttagggctggaagctcccttccagagaggatccatgctatgctaactccatctcacttcctagtggcctgtgacaaaggtccatttttgtttgcaatttatccagtgtctcaatcagcatgcaatctgtcactggcatagaaaaggacagtaatttataatgaagcactgttttgagtgagaaatgaatcttactactgagattcattctccctcggaacgcttcaagaagtcatctgccttctgcagggccacacccatcttgcatgcagttagccgcaggagggccaggcagtttctgttacggttttccagcaaagcccactgcctccttcctcctcaccctcaagtggcagaggccaggatggcaacacacggccacccccaggcctcattgcgctcctcccacaggccacccgcccactgcggcgccccggcccggcagtgccagcagcaggtcggcaccgccagcgccacgcttctcgggggccctggtgttccatggggtaccaatccaaagggttcggctcaactggtaagggcgagcagaggacctgggggagacggggctgacagaggaatgcaagctgaagctgtagcgccactcagacccctccacaggatttctgcgggaaactgcgcgccagcaccgcgtccccatgaagaaaacggagggtgacctgcgcgccacagggaacaaaagatgcgacagggagggaaaggggagtgggtgctgccacgatggggtaaatgggagagacagaatggtggcaggaaggggaaggatgagtaaagggggaaaaaagggaaatacagggtcgcctggagggggtcgaaagaagtgcagcgtgaggtgacgggtgcgcgcgctaaaggacaggaagcaatgcggaagggctgccgtttgggcgaagggaaagaagcagaggtaggtggaccacggggtggaccacctccggaatcttgcggcccgcgggcgggcaagaggcgcgcacgctccctgctcctcgccgcctgcccgcgtggtgctgcgcgcgctgcacccaacggccgcgtggtggggaagatgggaggggatgggggtaggccgccgagcatctcctgccccagaatctggcacgctgacggggacctagggacagacgaccgcacaacacgccacgttgcaggcgctgccaggccgggtgcctcacctagctccttcatgtattcatcaaagcctttgctgtccaccaggcgccatcttccttccagctgctgaactgtggccatggtgggtgcgggcgggctggcgtgcagagaggggtctgcgtcggcgtggcagcgtgctgtgaggcacccggcgccggcggctgctttataacggcggcccgcgctgggcggcgctatgcggccaatgggaggcgggcctcgcccggtccccgccccgcccgccgggcgccccctgggccttctcggggtcgggaggtgctaaccagctcctcttgccagggtacgcgacggcctctcgggcgcctcctgcaagcagggactcgcccggcgcgccccacgcctcatggacgccggcgcctgcacgtttcggcgcctctgcaggcccaggaagccagaggggtcacctggaggcctggccccgcctctcctgcacccctccgtttgacaacatatccaccgccgtttttcctttcaaaatacccggaccaatcgattagccctcgccggactcggactgcaggaagtgattgatcggctgtttggtttattgattcattaactacggtgcctccctgaccttctgctcctcgccagcgcacaagctcacaatccacaccctcctaagagaacctgctctcgccatccgcaggtctccctggcccaatagtggggatatacctgagttgagctagaggattttatccctgttgggatgggggacgtctcgggaagtgtggtttctaaactaaaagactgcaggaagtgtcaactttagtgactgtcattgccattcaagaatgtttgattagtttatattcccttcgtagtgcacccttcaccgtttcttctcagacaccagcgggtttcttctcagacaccagcgggttccctctttctcttgaactataataataccctacacatgtgcgtagaacatgatacgtttcaaagtgtactcttcacaatttattacttggtgctcccgggtgcctgttggaagtcagatggactgaggtgaggaagttgccacacaggctggccgtttcgatagcggtaatgtgcatttattgagtagctactaagtgctagatgtgcttcctgggcactttatagacattggtctccactatatttttgctaggggtgttatcccaatttttcaaaagagaaaatagggcaaagatagttctcacagtggtagaaccagaatccccatccaggtccgtctcactgaagaccttatgaaatcagaccacacctgactgccttgggctcagggtagctgtgatggagctctgagtagaccacagtcaccgagacactactagttcttgtatcatccttgacaaaattgaaatctgaggttggtttgctatctcccaacatgctgcaggacatgtactcccctgaactgcatccctttcatttcaagtccctgccctcagtttagggtcacaccagtcttccttgtggtaccatttaacactcaattgttttcccaataagggtctgcatgtcccacacccgaggccctactgctcagaaaatattcgtgttctgagggaagctgagtgcatcatttactcagtgatgagaagccctggctaccaggcacttcaggcagctccttagggctgcctgtgtgtttgaacttgagctcttcatgtgctatttcaacatgtcttatccatttctgtatagactatatgtagtaataataggacgcagcactctgatactaatttttaaatgatcataatctaacatgttacagaaatatcaaaaagataatggcactggagtactagatacttaggtacttaagaaatagcctttaatcccaaggccttacttaaaacttaagtttaaacacaatctctgatgtgatgagtggaaataattcttttgtgttaaaacatacagacaaaacaaagctatatggccagaataataaccgttattgtatcttgtggaacaaaaaagggcatggtgattgctctgttcctcagggaaacacattgaatgtcttgttttcagacaccacatctgatgcatatacagatgtatgattggagtagattatttctaatgccccttaagctctactactcagattctttccttctccagagtaatggtaatggattttaagctgtgaaaaagcagttaagta

SEQ ID NO: 587466 - DNA, 4001 bp, Homo sapiens
ttttgaaaagctaaattcactctctgagactattacacttcctctaaaatgtaaatttgtatggtgcctttcaagagatcaaatgcttgcacttcaccttgtggagtgttacgataaccttgtgggtgcgggaggagtttgacttagagcctggccctgtggtttggttgggaatttcccattgtcaaacttgactcctgcagttggtgggcagaagagctgactccttctctgtcctgatatcaaactccatttcacatttagattgtggaactgatatgacacatcttactgtagagaagcagtgttagacatctgcatcacaaagaagagtgagatggttaaaacccaggctctaacttggccacttgctagcttgggcatattatttacctctcctaaccttcagttttctcaatagtaaagtgtggataactgtatacttgacctcgcaagttttttttttgtttgtttgtttgtttgttttttgttttgagacagagtctcgctatgttgcccaggctggagtgcagtggcacaatctcagctcactgcaacctctgcctcccaagttcaagcgattctcctgcctcagccccccgagtagctgggattacaggcacatgccaccatgcccagctaatttttgtatttttagtagagatggggtttcaccatgttggccaggctgatctcgaactcctgacctcaggtgatccacctgccttggcctcccaaagtgctgggattggaggcctgagccactgtacccagccagcggatgttttaaaaggttaaatgaaaggggttagcatggtactggcacatagaaactgctcagctgttattcttgcttgtattatgcctaaacccagctcccagtcaacacaagtgctactctggccataaggcccaagttttttatatacccccccaatttttattcaaaacaagtgagtctataaatctatgaagagacagaaaaacttgtttcttatgaccctctgagaaagtgaatattgactacatcagaggaacaaatattacatttataagcacattgacttattatggggataaggcattgttatttcattgtctagaatgagtaaacataattaataattgtaagcatccattaagcatgttatgtaagttaaaaaaaagtaaagataagaaagtccttggctttgtatacagtttactacaagggaggtttctcttaattaaatatgaaaaatatgaaataattgctgttcttccattagtaaagaacagtttagctattatacacccaagtcattataattaatgtgtaactaaatgacttgagttagagattaaaggattggtagggtttataattctgaggaatatccagtggtgagacattcaatgagtaaaaatgttgtgtttcttcagatttgtaattcttcaaaaccatgtttataaaatatctctcacatttatgagaactctaaaaattaaccaactagaaattttgttagttgatactgctgttttaaagctataacttaaaccttgaaacaaatttaattgatcaatttaattgtaggtagtgattactgtctataaatttgaagctgggaaaaatgttattaaatgaaatgaccaagctaaaatgaaattctatctagaagttaggtgaagtattttcaaaaaggataaatgggcttaaatatatggatcatgactggacagaggtgtctgtgggcctagtcttccaaaaagagacaattattactagtaatttaaaaaagcaaaagtagaagcatacattgtgttagtctatataccctaggatcacaaaaggaagataattgtaggaaaattcatggtaaagtacaaacccaatcacatcacaaaatgctttgccaatttccaaatttgtaatggtatttctcacccagttctttcatgtaatcctcaaagttttcactggagaccagcttccaggttcccaagaagggctcaaccatcatggaacacttgctgagaagagccactcgtaattgaaaaccaaagaaatataggcattacggtgctgccagtagtttaatttaaagagcgtcttcatcacgtgactcttctgaaatggccaatgggcaacagcagcaagactaaagattctaggcaccagcatttgactcattttatttacctccaaattaagagacagaaaattagcatgtaaaattaaattctggtcaatgattttagcttctagcaaaaagatttacacccaagtcacctgacaaatattacttgtggaacggagacaatcttcaatagacatcagctttttgaacaatgaatactgagtcaaccctggaggaatatcctgacaaattgataaacacctggctgagatgttttcctacctaagacaagaaatccttgcttggtccacctcagctgttttttgtttgggtaagtcacagtgctcaaacatcctcttcattaaaataatatcttcccttcccttccttacagggttgatgggttgatattagttaatgtaactaaaatgcctataattgcttggagggaaatggagggtattattaatatattatcattgttgttaatcgaaggtaattgaggacaggaaagaaaggtgacaattatcattggataatagtatatgatttaagctctgaaaaggaagcagagcgaatgcctacaaaattcgtctttcaggcttacaaagtaaactctacattaaaagatattttaaattataagaaaaaattttggcaagtttcatatagaaaaagatgtttggaatctgcattctaaaagaaagacaaaggcagcaaatggtttcaatctctgtgccattacttctgaaaccatcttctgcaaccccaataatggaagtggactttgcaggtactgagtttagtaagaaggagtagattcagtagctgttgatttacattacggttttgaactccagttaactttagaagatgttggaaagttagtgtcagggaccagaagaagaatatttatatttttacctgctttgtatgaagtatttatttaattcagaaaatattgtttgtgaacaaaataaacaggaggttgatattttggtactgtaaaacaataacttaagtggaataaaggatggcttttgatgaaaacatataaagaagaaacatataatgtgatatctttatgggtgggacaattattaaattatctacagtgcaaaacagggtaagtgaaaatcctggagttaatttcaggaaactaagacccaagctcaaaataagtgcctcagcagttgaaagtgcattcagaggtgatgttcaaatatagagcaagttgttaaacgtttgcttaactggttcgagatgtgtatgcactctctgctttaaagaaagcaagcatacattgctatgcctgttggccagctgggtagtgtagcaaaggtctcccatcagcataatcttccttgttgttttgattctcctgtcatagaatgatattcctgtggtccgtttagaactcagttggcccatgagacaaaagctaacatcagatttctggtttcaattatcctcagcaaactaacgcaggaagagaaaaacacctcatgttctcacttataagtgggagctgaacagtaagaacacatggacacaaggaggagaacaatgcacactggagcctgttggggccagggctatggggggagggagagcatcaggataaatagctaatgcatgtggggcttaatacctacgtgatgggttgataggtgcagcaaaccaccatggcacacatttacttatataacaaacctgtacgttctgcacatgtatcccagaacttaaaataaaataaaataaaaattctggcttctgtaaaattccccacccctaggagagaaccaaagggagagacagtctctcttttgcctctacacatttttctatctcacgtgatatttacaagtgctgcatccattg

SEQ ID NO: 587467 - DNA, 4001 bp, Homo sapiens
agagatccaatatataagatgaattaaatcaaccctcaccatgcataaggatacgcagagaagcctgtcagtcataggcataataacaacccaacctcagccctgatctaaaattaaaaccacagacttaaaatagatcatgacctaacagatcagaattttaaaaatcaaaacgaccattttccaaacagaaaataacacatagcttgataagaaaaattaaaagtaatattagctgacacctagaactatatgcaaggcactgttctaagcactttatgtcaggctaacaaggcaccaaccacctctctgttcaattagtgactttacatgtacaatctatagtaatactacagattaaataccgtagggtaaaccaatgggatgttatcagtgaaggattctagtttaccattaactcacctttattctagaataactatgcttaataaatagcttacctgaatgaccaggggttgtgatgtcacaaaaatgagtacaagaaattaatacaagtatcttcccagaaatcactacgtgtaaactggggggaaaataataaataccttcttcaccaacaaaggaaacgaagaaaatggaagtcctactatccatactgcaaaaatgcttattctactatcatattcccttttgagaaatagaccagttacgccagaagtgcaatgttgtcacagatgtgtgccagattttgcagaggacataagttggctgtgaggaagaacacagaggttgcctattttttaggcaggaaagaaagcctgcacttttctgtgtgtgtgtgtcaataaatctgaataacaacttgaaagggttaaaaagctgagcaccaggtgttttctttccactttccagagtaatttaagcacactgcaaagttatctcccttccttccccacgagccagcttaagggagacctgtcactgccatttacactgtacagctccagctctaaacaataggagggcaccaggctgggcagcaggcatcgcggcttcccacagcctgtatgggctttgttgccaagttatgagctccgctgggtgatggagacacgagtgagccaaggagaatttaattctatttcaaatctgtatgctttcaaagaaaatagagacaattgaggccacgggaggagctggagggggtaaccaaaaacaaactttcggaacctcagaatctacatttctagcagtaattctcagcaaaggattaggtggtattgatactctcataaagtatttaacaccgagattagagaccattcaggagcggtggccgagcggagtccccatccttcgtagtcccactcctccagcagcaaccggcggcgcgctttcggagcccacctccgctccgcagcgcggccagcttccccccgccctggctccaaccccggctccagccccggccccgtgcccagcctcctagccgagcccgggacgtgcagccaagccgagcgcagagggggcgcggggcaggcagcggcgctgcgcctcccccggcagcccagaaagccggacggggtccgcctgggccagtgaggccgggctcaacggagacccgggccgggcggggaagctgcaggcgcagagccggcttagctccgcgccgcctggccgcgcgcagctcccgcattgtccgcagtcggggcgcggcgcgaccactgaacccgaatcccaacccccgcccagcagtctctctcccggcccccacggcccagtcttacctgggccgctcaccccagtccctggcggtgcggcccgagccgggagccaggctccgggggactgcaaggagggagagtcggggcccgcgagggacgaagggccgagagcgggctgtaggggccgccgagtgttcacggtcgccgccgcggggccgcgggtagagagcagacggggctggcggaacgggcccaggacgcgcggccgcgaagggcccggctggcggcggccgcgatggttcggtctgcaccgagtgggagggctcaggcaggcttcgccggagagtgagggagggaacttggagccagttgctgtggccgagagcgcgtgtccctgagccagtgtacacgcccctcgtacaccccgccccgcctccatcccgcccccaccccaccttccgggtccccacccttctcgcacctccactccaagccctgcctctctctcaacatctccaccccgctactgatgcccatcccaccccatccctgacccaccccccattccactcggtcggcgcctccatttcctccctatcccccactcccacctatgtccgcacgcaagcacccccaccctgctcccacccggtgataccgctggatctcggactgccaccccagtgcagatcgctcagcactggagacgtagagcctgtgccctgaatgagataaccccacctggtagtccagccatccaaacgtcttggtgcttgacattttctgtttactaactttcatatactcagatggagcgtcctagcttaatttctgaaggcatttttaagacttcaaaaaaatgtttggagaaaatagtaaataacgaaaaatatcaagcatgatgtactacctctgaaatgtgggccagctgatgttttaaaatgaaatgctttggggtgcgtcattattaatcgcctaatatagtatttgagaatactttctgcttagatttgcttaataacttggttgtttcaggagaggatttgttttaggaagactaaacacattgtaatttaattttgctattgggaagtctaaaagataaaatccatctttatcaaaatgaatttgaatgggatatggactcacaaaataattgtttcttctagaaaatattgagcaaggatttctttttaatctctggtacattaacaatacgatttcactcatctcattttctcagaaagatcgtttatatttgaattgtgcttcaattcaatgaatctattgtttcataatagttaagaagttgccaactaaataaaactcagactttataataatatattttttttctatttaaagattaccattttaagaaagtgacatgatactgggatttaaatggaactttcctttggcatactaatacattccttgttatcacagattacgttgtggtctccattaactccaaaagtcatataacaatagaaataaactatttttcatcattcccatagcaaatggaaccaacttctctccctctcaagtatactttttttccccacttctttgccccaatcccttccttttaggaatttccccctcccattgggtgtgactagcccacagagcttcctgacattgtgagggatatgacccaggccagccaattagaatatcgtctgagaacaaaggaggagggtcctttccctgactgacagggcagctcctgggaccatatcatatatgcgtgcagcagctggagtcaacttactggagaataaaacaaaaccagaaaaaaagccaaactgagcaatggagacagaaaagtgccctgatgacatcaatggccatccgaagacagtcacctctaaaaccagtcaaatcctgaacttctgaagtaatgcaccaataaattgtctttcttgcttatgccattttgagttaagtttctttccagaagactcacttataaaatcataaaagattcccctatgatcgatgctttgaaaatcaggaatgtaaccaatgagttttagctttctttctttttttttttttttttttttttgatgacagagtctcactctgtcacccaggctggagtgcagtggcatgatctccactcactgcaacctccacctcctgggttcagcaattctcctgcctcagcctcccgagtagctaagattataggcacgggccaccacgcccagctaatttttgtatttttagtagagacgggattttgccatgttggccaggctagcctggaactcgtgacctcaggtgatccacctgcctcaggcg

SEQ ID NO: 587468 - DNA, 4001 bp, Homo sapiens
tctgtttatactgtaaaaaaaaaaaaaaaacttaatccacccattgtgagcaggcctcactgtttcaaactagacgagtgctgcatttgatggcaaagcacttgaccttcagcacttgtaggcaaggtggatggcatgcagcattttcccctgagaagccctctttatgttgccctgagtgaatcttggaccagactacagtgtttccactgtgagtcactgactaatatttccactctcttttcgtagttgatggatgtttaatgatttgccaatctgaggaagagagattctttagaaaacaataatcccttttacttgcacaagacatcaggttttaaaaagcccttcccaaacatcctctccacatcccattggattgtgattgagcctggtaaactgcaagacttgttagttagtatccccattctccagatgagagaaagaagcctcagtgaggtggaacaactcaaggtcacacagcaggtgcatgaggaaatcagagttcaaatccatgttttctgaccctccaatctggtccactttcctctacacctaaccatctgtctaagctctgataacatcatccatattatgacataaatctccagatgagaggttggccaaatcacatccccttgggtaacataaccacaccataaattaaaagcccaattaaagaacatagccttttaactgggacttagactgtcccccgaggccacgatataaaggaagagccctttcaaagtcaatggctgcctatcctggatattattcagaggcctacttacctacatgcacgaactttcagaccctaattattcacatgctatcttccttcttccggggccctggtcccagctgatctgagtttgtaatcactccccaagctctggccctctctccagcctgcagatgtagttaacagtccatcacactgtatggacagcccaggtgcctctcggctttgacacatcacttaacatcaagagcatcataacctgatggaaaacaatgccccctggttcaaatggacaactgaagcggtgtctccagctgtctgaaagcgagatagtttgccagtggccaaggagcaaggattgtcactatgagcgatgtgattcttgttttgctggcaaagtggggtggggagctagaaatgaggtggggagaaggggagggcatagtcttgactgctagctcaaaattttatttctattcccatcctatccctaatagtcaacggcaataacatgatactcctgtgtcccaaaataataacagttactacttgcctcgtctaaacatcccctccagtgactgggcttgaagctggctctacagatcaagagctggtccctttccatgtcacagctgagctgcagtgtccccgcacacccctgtccccagccaagccacaggaagaacgggtctgtgcattcgcctggatcacagggaatcgctgccactgtcccctccaccccagtgcggtcttctcctgagcctggcccccgggttccctggctccaaggaccccaatggccaaggtctgcatgcgccccctcagcctccatctgggactcctggggggaacccctcattaacccagcctctccgctcctttcacagccctggcccttcttatcccctcaagacctgtccagatgtgcagcaaacctggagggcagagagactggggaaaatcgagggagataaaccacattttgcggcggaatcgctgttccgtgacagaaagccatccaactggcaaccacgcttgcagaagcgtcactaccaccgacgagagagttttgcagctgccgaccccgaagcgctctcacctacctgtctccactgcagggctcccctctctctcccccgggggccgcgctcctgggtccctctctctcctctttcgccgtctctggccgccaacagttgcggcggcggcggcggcgggcggactggggagtccgcagcacctgcgagctggtgttgggtccccgcggcgaggctgcctggaggaggagcgagcggatgctgccctcgcccgccgccgccggtgctgatgcggttgctatggttatggaaccccgcaactgcccccctctccgtgcaacagctgcccggccgcggcctccgggcagccccagcgagcaggcgccaggacgcgaggctgtcagcgcggtcgggggaacgcagccgccagcgccgcaagaaagcaaggaccgaccggctgcgcccgcgccgctgggctggcgcctcccgggctgcgctcacctctggcgccctcactcctctccttcctccgccgggacgcggccagaccctccgcgccgcgccgcgcgccctcgcggccgggagagcccgccctgctgctcccgctggctccgctccgcagccgctgcgcaccgcgtgggtagacgctgcgcgactggctggcggcgcggctcacgcgctcccacctcggtccctctccgccgcgaggccctgatgggagcccggggcgggccgcccggcggccaaaccccgcccgctcggccgcccgggtgcccagggcgcaggctgcggccccgcgtgcggccctcccagactgaccggcgcgagcatgctcagtccccgcggcggggctcccctctcgagccaagaccccaggcctcgggcaggaaaagggtccctgcagatatccgggggcggggcgcggcggagaactggctgggaggggactgttgaacttggaagagaagcccaggcaacaagtagatgcctgagaaagggtaaaagcgctgagcaacccatacctccaatgcgaagtcagcagtggccttcaaccagccagccggcccgtcatccgatgggctcctcacttcatgctgaacgtgggggttcacagacgtgtgagattctgtccacggaggagggagaggaagattggggagggttaagccagctcccgtctactgagcattcttaaggggcattgggaactctaattatcaccaccactgtgctggcaagttctcgtggcatgcctgtgacagatgacaaaacagccttagagaaggagccaagactgggactcggaagcccagtgacccgtccactagactcggctgcactaactccacccaggaggaggcagggaatggaaccaggcattagaggatgactatgtcccccattagactgggctgcactaactcacaccccaggaggaagcagggaatggaaccaggcaattgcagttggcaggaggagtctctaaccctgtcaggctgggggcaggggcaagtaattggggaaagatacctgaaaaaaaggtataagaacaaatgagtggggcggtgaagggtagagaagactgctctttccaggacaagaggagcagggtacagaggcctggaggcaggacagaacagcaggaacctagcagcagcaggcaaggagaggtgaggcaggcgagtggtgaggtttacagggcaggcactgcacaccaaaggccttgcgatccaagtgaaggggttggaatttgacaatgtgacccttaggatgggaagggaatggggaaggtggtggggaggagggcagtgaagcagtttaagcaggagaaaggctgggtgggaatgaagggaagatcaccttagttgaagtgtgtgtggtgctggctagggtggggattaaggctgcagaaagaggtgtcctaaggaggctgttgacatagtgggcctgggcagatggaggctctgagctatctaccctgcttgtcctccccacagcacccagcaagcccagggcaatgcataccctcagtaaatgtttggtgaatggcaaataaatatgaatttctcaatagagaaaatgggtgcttttcttttacaatatttgtctcttaaatgtgttcataaccatatggcatttattttgctattgacattgcatttttatgcaaccttatttttgaaagtcagtgcaagcactcattattttcctctgcattt

SEQ ID NO: 587469 - DNA, 4001 bp, Homo sapiens
cttgtaactcacttcagtaagtcttcactgtctgaatcaaagagaaaagatctgttgaatgaaacagaaggtctgaatgaatgtgtgccctccatgtttctgtactttgagagcctttctcccagtcctttcacattccaaagtgacattttattctctgagataaatattttaggctaacaataattttaagtcaaagtgcatgatctgtgtgcaccattgctgcatggccgtgctgcggacactgaccctgtgccctcccctcctgagggctccccagtggccggctggactgagaggctctgcccgggttgtccacacaccagctgggcagcccacctcagcctcccaccttctccatcccctccccagggcaggacaccctgctcacttagtgcaggtgtgcaccagcgcctccttccacacccaggtgtgtgggagagtgcagacactgctgtctgctcctctgggtggcctccgccctctgcatggtgacagacaggaactcgaagaaagtttgtggagtgaataagtatatatttatatcacaactattgtgaaagaaaaatcatactaagaagcccttgtttgctttcttagccataaagcctgaggagaagggatcaggagctgtggtcccacggccagccgctagctgcgaggcatccccaggccaccctaggccctctcctcttcccaagcccggtggaggccaccaaatgtccccgcagaggggcccttctgtcccagcctcgccggcagcttcaccttgctctgctcttgctgggtgtgaacagaaacgtgtgaggagcttctcgcttctgtccccaccttcctttcctgcgtgtcctgccctcctccctccagcgctgccccaagtgcccggccgccccctcggacctccttttccaggggcttttccgtgttccccgtattcacacgacttctctgcctgtggatgtctcatgaccctctagagcagcgactttttcctccctcattccttccactcccctcgggcatctaagtagcaggaacctgactgtccaaagttgatttgggagcagccggctgcccttctaaaatgatctaggaaaggtgccagtaacataagccgccgcctgctgaaactggcgcttcctcagccactcgctgcggccagcgtgaaaggggaggggaaaggggcattcctggcacggtcaggtgtctacggacagcaatcttagttaattctcaaaaccccggaagatccagaaatggggtgctgacagggacctaacctgtccaccacccctcggtcggtgggactgaaacccatgtctttgagctgctttaccagtttatttccaaaaagtcctcctacacctgggaagggacatagaaagctgatcccattgccagccggatttctttacttaactctcaaccgtggtaaatctaattcgcttacgacctctttccgagagctgggaatctgcagagatgctctgttttctgctgtactaatctcaggcttcccaaagcgagtgcctcgcccagctcctaggggaatccacggagccccaggcgcagggcaaaggatggggcgggatggggacatcgtacctgcgctccgggagccgctgggagtccggccggccccggccgcggggaggaaaagcaacggcttgggctccttatccgtgacgcgcgctcccctgcgcccccggggcctcccgtgggctccgtgcggggacaaagccagcgccagcaggaagagtgcgggcaaaggggcgccgggcttaaggggccgcatgttcgcaagccgggaggagagagcgggagactccgggaggatcccgacgcaggtccggagggtgcgcggcccaagagaaggccagcgggaccacagcgcggctacgcggccggccgcagtcttcaccgcgcgcctgcccttgtctacgtcccgggggtcggctggagctgcactgggactcggtcctcagtgtgccgaagcctaagcgctgcggggcgcggggcgggaacgggaggcggtgcctggggccacggggtcgtcccccaggatgagggcgtgtcccagcgcgcgggaccctcggaagtccgcgctgggccgggcgggcaccagcctcggactcagcgggtctcagggctccctgcgcaacgcctgcctcggatccggaccccgggctcgctctctggtcgccgtccccgggaggacccagtagggtaactgccgcgtcgccccggcggttctccctgggctctgtctcccgccgcctccaccccccgagcctcggggtccgtcacggcttcccctggctggcggggtcagtagaacccgcggcgcctaggtccggacggaaaaaagcagggccggggtgcggcctggatgagcggagatctccgcgccttgggctcaaaggtgcggggtgcgctctgctgccgagcccctgctcgctcaggaacactggccacgccgtcacgccagccgcccctgccccaggtctggaggcccgacctgctctcctaggcgcagcaccgcgttctcttccgcgtgggggagcggcgggcggaagaggtctggggctgggcaccggggacacgcgcccagctcccctggcctccctggggggagtggccggtttcagtgcttccccaggtgaaatcgccaaggttgaccagtgcgcccaaaaaagcagccggctggatttttcttcaaattagggaactcttataaagagttttagtgttaacaacttaaaaaatgaaattaaggccagtcgttctgattaaagtgcgcctctctgatcaaaccgcgctctgtaaactgttgttgttttagttgtttcagccgcctgctttattgctttatgttaagtatattgaaaaatgttgaaattgctcgctaatcaattgactactaattatctcctcatatgcaaagtgcaaacaggtgaaaggaaaaaggcaggaataactaagggaactgaggctccattactccttaggcggtgcccaacgttacattactctacaaaaagaaatcttgtgggtcacagatcctgaataatgacctcaactccttcaaatagtttatctaggcttggcatgtccaacatgcctaagaaattgggaagcaaagcaagctttgcaggagccctgtgaaatcgtgcctttggatgaagctcttttgaggaagttgttacacaggtgaagactgcttcttccaatcgtttcactgttaagcacgcataggaatctggtatttcctaagcaaacacagcagtgtaagagaatggcttccaccaagggagacccacaagagtcttcctagaaaaacaggttaagggtctgaaggccctacttaggtggaataaacgctttctcacagctctactgaagtgaaataagaaaacattagaagttcacagacattgacaggcagttcaaaaattaattttaattggaaaataaaaaaatagggactagtccgaaaaacgatggggaaatgcagtatgaaataatgctggagaataagtgatactgaaaccatgacaaatggactttttaatcaaccatctatccggagcaaaagacagcaaaacctggaagctgaattatttccctcttcctctacgttgaaagctagaggaaataaacaaagcaatgaagttttcaagcctgacagtttggggtctactttcagctgtcattagccatggggccctgagcaaaacacttagtcttctctctagcaaggtgaagaggttgaacttcagtggttctcacactgtgtaccatgtgaaggagaggctgtaaaaaaaatgcaggttcccaaacccctggggacgcagtcccccaggaggatcctgtaaatctgcgttttaagggactctgggtagttctgaagcaagtggtcctttgaaacccacctttattcattcaacaaaaatgatgtgaacgcacactgtggaccaggcagtggaaacacagcggagcca

SEQ ID NO: 587470 - DNA, 4001 bp, Homo sapiens
cgggaaggagcagtcttcctactcaatgagtaatcagttgacttactaggatcacacttggtgaccaaggcttgggaaagacctagactggcgacctgagggtagagcacaaaagaggaattcccgtctccctgtagggccaaccacaccgcccggacatagcctatatggtcaatactaaagggcccggaagatcacctgcctaaaaagatctccctccactgccaaaatctcctgccactgatgcctgtacttctgtcattggaagccttagaatttgactcctagccgggtgcggtggctcatgcctgtaatcccaccactttgggaggctaaggatcgcttgaggccaggagctcaagaccagcctgggcaacatgttgaaaccctgtctctacaaaaaatacaaaaattagcctggcgtggtgccgcatgcctgtagtcccagctactcaggaggctgaggtgggaggattgcttgagcccaggaggtggaggctgcaatgagcggagatcgcaccactgtagtctagcctgggctcagaaataaataaataaataataaaaagaaaagaaaaagaaagaaattcactcctcaggactgaggaactgtctggcctgtctcacctcctgtaaatggagtgttccccagaggtatgaattggtttatcagatcacttttgaagatcacagctgttttgactggggatgggggaaggggaagaaaaatcattttggaaccctctctacctggatgccccaaggccctggccctgggtcaacagcagggctgggaaggtggaggaagtcatagtttctgactttcttcccaactttgcctaaggcaaacttctttcaacaggagctcccatgagggttggggaggaggtggtggggaggaaggagggtgaaacccaagactttctctcctgagaaaatctgatactcaactcatcaattgggggaagatttatactaggaggcagaagtattgctgactttacagacagcttcttggcagagttactttcaacagcgggcaccccccccaccctaccgggaatacccccacccttcctacacagcgctacatcttgctgaacgaaccctagtagtaggctgcctgccagcctgcagccccaacaaaaaatggcaaaaacacaaactgacggcacgtgaaacatcaatggactctcctccccgcacagggccacccaggccccaccacgggcggcatgtccctaactcaatttggcttgtgaggggtcacagccacgctggaaacatctgcacccaatagaaggcgatttccccggctgggggcccaccagcctgccccgggtctttacccttcgtggggacttggaccggcagggcctgcacttcccacgtcccggggtgacgggaagggcgtcctgcaccccaacaaggtcctggagttgtctgggagatcagaccgaggggaagggacggcgattttttcaagcccaggcgaggcggtggggtggagcggaggaaggaggcaggcccaccgggactggggggaggcggcctagggccccggggggcaggaaacaccccaagcggtgacagggagcgtcccggcggaggcgagttcgggaattgggagagactccggggccaggacgcacagacaggaagcgacgcgggagcaggccggggaggtggggcggtcgggaggagtctgggagcgggactgggaagagcgaggggaagcggggcgcggccggggaggcagaggaaggggcgccgcggcccgggggtccctgcccgagggggcccgcgcccgcccgccctcctgcgggccgcgcccggctccgcgcccgcccagcccggcctaggcccgcgactcccggcggcccggcccggccctgccggcctcaccgcccccacggcttcctgcagcagcgccccgagccggctcagcatgatggcgcccggcccccggctcccgggcgaaagcggcggcggcagcgctctaggcggaggaggcagccccgtggccccggcggccccggcgcgacgaggggggcggggcccggccgctccgccccttcccggcccggctgcgtggcgctggctaaccccggctgggggcgcccagtcgggctgggaaccgccagcggtgggccctgagagttggctgggaggtgttttttttttttttttttttctttcctttcttccgagacagggtctcgcttggtcgcccaggctggagtgtagtggcgcgatctctgctcattgcagcctccaactcctggactcatgcgatcctccaaccccggcctccagagtagctgggtccacaggcgcgcgccaccacgcctggccaattgttttttttttttgtttttttactgggaggggaggtctcactgtgctgcctaggatgatctccagctcctggcctcaagcgaccctcccgccagggcctcctgagtagctgggattaaggcgggagctaagggaggtgttttcgaagagaaattacaattcctcctgaattgaagtctcagtcagccccaggcacatgggctgatgagctcctgaaatgtgctggtcccaaccaagatgtgccgtgccaagcacaccccgatttggaagatacagtaagaaaggaaagtgtgaaactgcaacaaccatggcttatattgattacatattgaaatgactattaggtgtgttgggttaaataacgtatattgttaaaattaacttcacgtgttgctttttacttttttgacagggctatcagaaaatgtttatgggctgtgggcggtggctcacacctgtaatcccagcactttgggaggccaaggcggtttgatcacttgaggccaggagtttgagaccagcctggccaacatggtgaaaacccgtctctactaaaaatacaaaaaaattagccaagcgtggtggtatgtggaggctaaggtgggagaatcacttgaacccgagaggcagaggttgcagtgagccaagatcgtgccagtgcactccagcccgggcaacagagtgagaccgtctcaaaaaaaaaaaaaaaaaaaaaaaagtctgcagctgagtgtggtggctcaagcctgaaatcctagcactttaggaggccaaggctgttgaccagcctgggcaacatatgaagatcctgtcttgacaaaaaataaaaatacaaaataaccaggtgtggtggtatgtgcctgtagtccaagctgctcgggagactgaggtgggaggaggatcacttgaacccaggagttcgaggctgcaatgagctatgatcgtgcccctgcagtccagactgggtgacagcaaaatagtgtctctctaagaaacaaaaaccagtgtctctgcttatcactgacatcatattgtgtccggaattggtaggttcattggtctcactgacttcaagaatgaagctgtagacccttgcagggagtgttacagctcttaaggtggcacgtctggagtttgctctgatgttcggatgtgtttggactttcttccttctagtgggttcgatggtctcgctggcttaggggtgaagctgcagaccctcgcggtgagtgctacagctcttaaggcggcgcgtctggagtttttagttccgcctgttgggttcgtggtctcgctgacttcaggagtgaagctgcacacctttgccgtcagtgttacagctcacaaaagcagtgggaaacccaaagaacgaacagcagcaacttattgcaaaaagtgaaagaaaaaaacttccacagtgtggaaaggaacccaagcgagttgccactgctaccttgggcagcctgcttttattctcttatctggccccaccctcatcctgctgattggtagagcccagtggtctgttttgacagggcgctgattggtgcgtttacaatccctgagctagacacaaaggttctccacgtccccatcagattaactagatgcagagtgttgacacaaaggttctccaaggcccc

SEQ ID NO: 587471 - DNA, 4001 bp, Homo sapiens
agcaagatttgcctagagaacacagcagccagggtgtgagaagcctagcaagtagtttcttcctcattggcctggggctctgtggctctctctcagcaaatagttaggcatggccttaatttatttccctgccagagttcctcctggaggggggccaagctagtagacaggaaggcggggactggcaatttagtagaaatccatgcatgtaattgcgaggaccagaagaacaggagcaagtgcgcagggagtctgggggctctgggcaggcaaggaggagaacagggtgtgggggagcaaccctttcttctgcttcaggtgggaagaattgaggccggccaggcccaacaacacagccttgcaagctcctaatagaagaaatggctttcctggctccacagggttcctcaagcaggcaggggaccttctcaggtcataagatgagccccacgacacagttctcatttcatctgggcgtgagtggtttctgcccctctctgggccttagatgcctcagatttcccaaagcagccttcgtctgagagcactgtcccgggagtcaggcacgtgaggctgactctctgctctctcaccaggtgtgggagccacaccaggtcactcaatttcttagagtcccattggcaaaacggataatagagtctccttgaagactgatggggaggatggagtgaccaagggatgcgaagggtttctaagtagtgcatggtccataaatgcactcaagaaagaagagctgtcatctttatccattccaagcacagcccatggctgctttccaagctccttaaaaacacgctgcagaagttcctatcctgccaacgccctcaggcaacaggcgccacagcacctctgctttcccaagactttgtccacgctctccacgctccatcccgagcttagtgaggggcaggactgtgtctactgtgtcagtgggaagctgctttggagcatgtgccccttggtgaaaaccctgtggataggacgtgatctcatcttctgggattctccagcaatgacggggagtttgtggaaacttgacttgggagaacctgcttgcaggcatacggcagtggccagcccccaacctagagtcaaccctccttccagatcttcccaggaggtcccagtcctcagaattccctccaagccccgccgggaataaaaaccaggcagtaacgggtgtgcagaaaacctatacatccaacctaacttggctgaagaagacaccctcccccccgccgtctgtgctccggtgtctcggtgactcagggtgcccaccttcacggctgacctgctcattcccgggggcccctgcggctgtgccgttccctcaggtcacactggcttgggtccttagagcacccttgggtccaggtgccctgggccacctcccattagttagggaccgcatccgtggggacagaaacttccatctcactgaacctatacacaggagccaggctgggcttggaggtcaccagccgcctgggagtggacccggagaggctgagtgcggccctccctctcagacggcagaccccgaacctccacccagaatccgagcccggacacggccagcagggagctaggagatgaagtccagccctggctgcccggctcctctgggagggcagcgaacccgcgggagcgcatgagcggcctctcccgggggggcggtaggagcgcgtcccctccagggcgctttgggatcgggctgctccgggccagtgctcgcgctggggacctgcgacgcctcagcccctgcccagactgcgccgcccgccgcggccacacctcccagtccctgggaaagtccccgccgccggcgcgaacccaccttccgggagcccaggggccctgctggggactcgccggtgtccccgccgcctcctcctgcgcgggtccgcgctgcccggcctcagctcagggctcccgcctcgcctccccgagctccggtgaattctcggcgctgctcctttcggaaaggactttttttttccccctgcgttgcgtcagggcggttgcctggcgacggccgagctctccgccgcgagcctttcaccgcgatcccggcctcgcgttctcgccccgggtccgagcgcgccccgggtcctagcgccctgtcggttcaccggcccgggcagcccccgcgagtggagaggaactacatgccttcgccaaaccccagatgaaaccaaacccaaacatccattttctcattaaacccgaaaccaaggcagtttcccccaattgtggcaacgtgactgcgccactgtcagaagtttgtccgcatggagggcgcagggggaccccacgcccagggcctcacccacccccaaacggcaggagttcataggacccgcggccacgactgcccgcgagcgcctaccgtgggccacgccccccaacgacccagcagggcaagtgtaggcatctctggctgccagatgaggaaactgaggtgcaaagacgcgagcgtttgccccactaaccacagggtgtctgtcccgccaggggcgcggcatcggccacctctggctgtcgttagattctaagacccagtccctgctgcatcagagcccagagctgcaaaccctaaggcacaggcaggacagcagcccgagctgcccggaccgcaggtcttcaggaccagtcccagcttctgacgaggggcccaggccagacactggaggccccaaggctggttactggatgggggtctcttaccccagacctcatcaagcacctttcctagatgcccggggctggaagcgtctttcaaagggctccagtctgccattctcacgatagccctgggcgtgcgcgcaggcgccgcctacatggccagacgcgaagctgagtggtggggctgcaaagtgactggcgcaggctccaggcaggtgcgcggctggtcgggccttctgtggggtcttagcccctgcaggggcccgagacactcgtgctgccctctggtgcccgcgtccttcactgcaactccgcatccagccctgacctactcccttcctttctgaccttcactggaaggtcctctgagggacgtcgtctaaggagacatcttgccagtacagacctagtcatgctaatgagggaacggtcctaagctagcgggtgtattaacaagcatcttttggagagtcacagccttgatccagatcttctgattccagctcctaaacatcactccttccttcttcctgcccgctgccactgtccctacccaagccaccagcagcttgccctacccagttctgggacctgccacccgggtccaagcgtgcacgcagtctccatactgatctccctttaccctctctcagcgcctcccaagccagttactcctccacaaacaggggaaactcttaagaatggaaatccagtctcagctgcttctgcttaaaggccttcaacgcccccagtcctctgaggattaacagctagcttggctgcaggggcctggctggcctctgtccgtctctagggccttgtcttgcacagaccctgctccccagacaacagaccctcttccagtcccattgtgcacctgctcctcccgacaggctgctgcagctctgcctcctaagggaaccccaggttacaggtgctggcagccccctgccttatgtccttcatggaccagttataattccaagtttacctgtgaggttatttgattagtatgtgtctccctctgaggcagtaggctccggaagggcatgaaccatgtttgcaagcaggagcctcaatctggacttggggataaagcatccttctgggtgctggctgtttctgaccacagccccggtgctgagccctagttggctgcattgctcactggtgtgcccatggccctggcacgtggtgaatgctccaagatctttttggatgggccattcagccccatctggaaatgctttgtcccacctctacctcctggctccctgtttgacctatggcttcta

SEQ ID NO: 587472 - DNA, 4001 bp, Homo sapiens
aatacacattctctctctctctctctctctctcatgagttaggaaatcttactactgaagtggttatccaaaacctaagcggggacaaacagccaagtacctttttaacaccaagctccccaaaaacgaagctgttagaaaatgctgccataaatacttacagcaatagcaccatcataatgatatgcaggtaggtgtactttaggactaagagcctctcgttcgttattatggatatgaaagtcacatgaaaaaaaaaagtgctgtcatttcattttatgaatgctgattagggagtttcagttaactgcaacactttgcaaacaggctatcaaataaaccccagttatcaagcagttctagacacaaagcttctgtttctattactaaatacaattaaagaattaaaaggatcagtgtgtttttcttgaggtatattagtctaaaataatttgcgatagtaagtcaccaaacacccgagtgactgaaattcttttagctatataaaacactcctttggaatgccgatctcccacaccgtaagacttaaaacacacaaaattcactgacatacatttttcacatagagattaaggggtaaaaaggtggcaaactcaatacacttacacagaagtagcaaaaaacgtgtaagcaaattccaaaaacctttgtcttatccagaatggcactttgtggtactccaaggattcaggcatttcatcagtattccgcacataggggtactcaaacaatgttgctgacagatgagacaacaaagtctcaccaacaaacatttctacagcaatgtattaacaggtaatgttgcaaatcagtcaaggggccaagtgaggaggaatccagaggagtagaaagaatactaattttctgccaaattttacactcagaggaaattaatccatcatagaagtcttccatgaaaaaaataaaaaaggtactcagtatgacccagaatagccatgaggttaaaacacatacacacacacacacagcaattgccacttccactagagtttgacagttatagatttgggtaattatagtagaaattgcgcgtttggaaacacactaagaccacaccctaagactgagaatctggactttaaacgctgatcattaattaaaaggacaacgcagtatctaagttggaagatctggccgcgcaggtggaaggcgaagtgatggggagcgataaagacaccaacttcaaaaccagggaccaggagggctgggtgtcgaggcgaggcgaggcgaagcccgggggataagggggtgtggagctggggacgggaacaggggatgaggagaaaaagcggccgcgaagaggaaggagtggtgggagccaggattggggaggggggacaacgccgacacgggaagggacgagccaacgagccaggagtcactggcgggcgcaggatctggggtgggagggggcggcgagagcgcgcgtggaggtgccaatggaaggaagggggcggaagaaaggaagacccgaatgaatgagcgccgggggcaggccggggccgcggggccacagaggaagcgggcccggggcgtcgcggggccgggggcgggcccagcgcgcctggaaaggaggaagccccgcgccagcgcgggccccgccgcacccgcctcttcgccaaaatggggtcgcagagcaggaaagctaggagtgtgaaggaagaggggaaaatggcaaaaaccaatcactcaccctccgctcgagcctccaggcgctctcagtcccgctcctgcgccctcctggagccgcagaggcggctcctcagcggcgctagggggagccccgggtccggagcgggggagcggcggcagccggaccgggagcccctcaacacctgcccctgtggcagagccgcgacaagccaggcggcagctccgagcggggagggcaagtgacccggatgtacagggtaacgacggggagggggaggagggaatgccaggaagtgagggcgccgcggacctgtccggccgtgcgcatgcgccgcacgcccgccccgcaaggtaaatccttagcctatcttctccgcccctcatccccgcccctcccgaaggggcggggcgaagccagagacaggtggtcggcgggcgcggcgtgcagaggaaggaggcgtggccacccccttgcaccccggcctccttaaaggggcagcaccttcgcaaatatcgcgccgagatagcttctgagtgggttggggtcttccagccttccagatgtacagatgggaaacggaggttcagaggtggcggtgacctgcctcttgtcagcgggcttggaaatggcaggaactggacctcgggactcgatgctgagccctgcgaagttgccatattccccccacgcctggaaccgctaggctgcgggcgcgcctctcccctttgggtcaggtactgagcctcgcccgcgattcccggcgcggcacgtgttcctggcaggcgcccagcgccaggagactgtactgttaccgcctgcgatggtatcgcggagacgcccttgggtggtgaaaaatgatcattctgagaacaaaaattagactccacttacaacactctcagatatatcagacccctgttctggggtcgactctgggcaaaaatatctagtgggcagaaacttggatgtgacagagggcacagcctcttaattacttccctaattcccctttcactctttgaacataaatgatccctttccctttacagacaaaaacagaacatcccatctagctagcttctcctaatcctgttataaagctgaatttttttttattaacattaaaggggaaaagatgacaatgttatctctcccagggttgttttcagtttgacagctgagcagatcactaagatggaggtaaatgattatgaacattttgcagtcacaggcccaactgaaaatactgtaacagtatggacttttccccccgggaaaatacagacatgcacacacatttgcataaaatttcaggagtttcatgcaaccagggagcctatccatgaaatcctgattatgaacgaagctctagtcaaagagctaaggttccggtaactatctgcgccttactctatggggccaagaaatcactccttgccacaaaacacagaagggcagcccttaccttagcctttttgtcttcctcttgagttatgtagaaaccaaatggtatgtaacatggtgggcatattacttagaaacgtgttgagtcatggagagatgaagtggctttttcaaggcacacactaagggcaacattcctaggcctcagacttttaccttaattatcatacttcaggaggattcagggattctatattgtagctattataattctggtcaatttcaatgaaactgaaggagatttttttttttttttttttggtgatggagtctcgctgtcacccaggctggagtacagtggcgcgatatcggctcactgcaacttccacctcccaggttcaagcgattctcctgtctcagcctcccaagtagctgggattacaggtgcacaccaccatgcctggctaattttttgtattttagtagagacggggtttcaccatgttgcccaggctgctcccgaactcctgagctcaggcaatccacctgcctgagcctcccaaagtgctaggattacaggcgtgagccaccgcccccagctggagatgatgttttacaaatgttgatgctgatagaaaagtcctcctaatccaagaagcttggtccacttgtctgacatactgacgtccaacctcagataacctgggtccagatggatcactgtcctcaatgtgaacaggaggaggagttcatacatgtgcaaagtcccttagatatgagctctgagtaaccacacacctctaaccctatctcccaccagaagcagaaatctttcatattatcttcaacacatgaatatctagttcagctccaatatctccaactacagggagctcattac

SEQ ID NO: 587473 - DNA, 4001 bp, Homo sapiens
gaccaaattagatttgtcgtacagaaaaggttgcagggcactggggctcacacctgtaatcccagcattttgggaggctgaggtgggcagatcacctaaggtcaggagttcaaaaccagcctggccaacatggtgaaacctcttctctactaaaaatacaaaaatcaactgggcgtggtggcatgcgcctgtaatcccagctactcaagaggctgaagcaggagaatcgcttgaacccgggagttggaggttgcagtgacccgagatagtgccactacactccagcttgggcaacagagcaagaagagcaagactctgtctcaaaaaaaaagaaaaaaaaaaagaaagaaaaaaagaaaagaaaaaaaagaaaaaaaaagaaagagaggaaaagccactttactgcagtatggagactgtgacgctggggatcaaaatggaagagggggccaggcaggaagcgattgcgggagttccagtgataagtgttggtggcctggaccctggctgtgacaggtgggatcaggaggtcagtggtccagggcaaggcggacagcaaagcccctccatccgaagccccaattatctggactctcgccctgggagcaaaatgcacccccctccctgctctatcagcccccgatcctccctgctacttggccacggagacaggggctttgccatcggtacctggctagtccgggtgatgcagcggcggacgaggtctctgatgttgttgtgcttgacggtctggaagtacacagtggcgctggatttttccttcaggtagggcttctcagctgaggcccagctgtgcagtagggccggctcgctgccctctgaggccacagggaagtaggtgccggactgtagggagctggagtccagtcccttagggcctgcttccgcccctcccagggtgtctgggggacacgggggctccctggcctgggcctggatgtactgggcctccaccgaggacaagaagtccacctcgccttcctggctgagcacccgccagtaggcttcagaacccccatccaagagggcgtccgtggccagccgggcactctcgttgtcactaaagtcagccctggctggccggacccactggctcttgacatcttccagacgcttccggattttgcccaggtgccttgaccggctcatgcctcccgtccctgggtggtgctgggggaggctggcacgtcagctcctccagatgtgggaagcaaatggaacacaccacggaggagtggggctcccgcacccccgggaggccgcctgctcccaggaccggcgtgcagggcacctccaagaagtgatttaccgctgtcctgagcaatgcttctcagaactcctcatctgcagctgcgggattggcttatctctcagggccacctgccctgccctcgggccgggagggctggctcagacacctccttggcacagtcagccatgggatatttcctctcctcccagccgcagggggaggcgaaggtgagccggctttcctgctgggtttcgcaactctccctcaggcctttgttaccaagcagggagcctccctggcaccaccagcccagctggaggatgggcctgaaggaggcctgcctgcctctgctcccctcctgggtgcctcgattcccatgctgtttcaaagataagaatttccctgtgggggggaaagatgccatccctgagatgcgcccccctctctgtgtgaggagggagctggacacgggccagggagagctgttgaccaggcgcgcctcctctccttggtcacacccaagtgcccacccctccctgccctatgaaggagctcctttctcccatgccctctcaagtgtttgtcattgtcgtgtttgcagagaccgcagaggttccagttctcaggccaacgcttcctcgctggaagtggcttcttggaacactgtctggagaacgagccgaggctgccggcggcccacgagcccaggggaccagtcagtgttggcgctggagtgagaggagcagcacgtgggtttgaaatctatgaactctgaggggagtgaccacgtgttctttccagatcagatcgtgatctggcaatgggatggactgcctagaaccctgactctctttgggtgggctctgctggaaacaggctctgagactaggatttcagtacaagtggttggtcggaagatcattctgagaagtacagagagaagtggggaagagaaacgggaagggaaggaagccaggccaggtgaagttgaggagcaggccactgctgtggacatctgggttcatggacatctctggggacatcagggggttccagcctgtgggaacctctgggtgatggtgccaaatatatctcaaggttttcctgcccaaagggtgagaaagctgcggagtttatctaaggagtcctagttatcattggctgagggctgctcccggggccagttcaccaagcacagccctgaacccagagaaagccttcaggcagtgtcaggtgctacaggcagagtgctgtgggagtggtgaggagcgaataaatgaaagtaaagaaatgaaagcaaggccctgacgctatctgctcagggacgacaccaagaaatcaggattgtgtggtcttcaaagagccaggatatggtaagaacctgatgtctgtcagtggcagagccattctttggagaaaaacagctatgaacacctgtaaccctactgtagctgtggcccttgtgcctgaacccagcagtaccacagtattttttaaagtgtggcgcggctgggtgcagtgactcacacctgtaatcccagcactttgggaggccaaggcaggtggatcacttgaggtcaggagttcaagaccagcctggccaacatgatgaaacactgtcgctactaaaaatacaaaaattagccgggcctggtggtatgcgcctgtagtcccagctactggggcaggagatcaggcaggagaattgcttcaacccaggaggcagaggctgcaatgagccaagatcgcaccattgcactgtagcctgggcaacagagcgaaactctgtctcaaaaaataaaataataaaataaaataatataaaataaaaggaatctctctctttctctttttttttttggaacatcgaaggaatccaattcacaatcttgagcaatcctctctttattccattttatctcctccctacaatccctggaggtcaaagaggacaaatccaataaaccctctctcccattgcctttttggatctatgccttttcccttctgccttttgccaactcttgcttctggagattgatgtaagcccctttcccgcatcctcctctcatcttccttcctctctggtctggtctgtgtcctcctcaggccattctctgttcctgcatcacccaagtcctgtccctagtctagcgagatagaccgggggcagggcagtggtccatggatttgctcggcttcactccatggctccgaagctgtccatagagactatactctcagtgaccagttcctgagttcattactagagaagtttctctgaacgtgtagagcacggggagccaggaggggaaggtgagcgttttctcctgagcatgaggtggctttagatattgcttcatggcaatttggcaactgccatgtgccattgaagatggttgttatcttcctctggaagaggaagaggacacagtctgagtggttcccatttatgttattttttttttaagttgtcaatggctccccattgcctgttaaactaagtaccaagtcttgagcctacctgagaaactgcacaaaatggtcccacatgttcattccagcatggcttctcccatacttggccatcgctgagtgctcactgcatgctggctgtctgtactgagggagaaatggattattagtcctcatttcaccaaagaggaaaccgaggctcagaaaggtcaagttacttgcccaagatcacttagctggtaaatggcagagc

SEQ ID NO: 587474 - DNA, 4001 bp, Homo sapiens
tgcttcaacccaggaggcagaggctgcaatgagccaagatcgcaccattgcactgtagcctgggcaacagagcgaaactctgtctcaaaaaataaaataataaaataaaataatataaaataaaaggaatctctctctttctctttttttttttggaacatcgaaggaatccaattcacaatcttgagcaatcctctctttattccattttatctcctccctacaatccctggaggtcaaagaggacaaatccaataaaccctctctcccattgcctttttggatctatgccttttcccttctgccttttgccaactcttgcttctggagattgatgtaagcccctttcccgcatcctcctctcatcttccttcctctctggtctggtctgtgtcctcctcaggccattctctgttcctgcatcacccaagtcctgtccctagtctagcgagatagaccgggggcagggcagtggtccatggatttgctcggcttcactccatggctccgaagctgtccatagagactatactctcagtgaccagttcctgagttcattactagagaagtttctctgaacgtgtagagcacggggagccaggaggggaaggtgagcgttttctcctgagcatgaggtggctttagatattgcttcatggcaatttggcaactgccatgtgccattgaagatggttgttatcttcctctggaagaggaagaggacacagtctgagtggttcccatttatgttattttttttttaagttgtcaatggctccccattgcctgttaaactaagtaccaagtcttgagcctacctgagaaactgcacaaaatggtcccacatgttcattccagcatggcttctcccatacttggccatcgctgagtgctcactgcatgctggctgtctgtactgagggagaaatggattattagtcctcatttcaccaaagaggaaaccgaggctcagaaaggtcaagttacttgcccaagatcacttagctggtaaatggcagagcccatgtactttccaccattccaagcttcacttttttctttcccattccccttccctttctactcacagcgcattacagatcctctgattggttcctgaatatgcataggggagaattttaaaagtaggtgggtattctggggttctcctttcacctggaactaattctctttcttggttgaataaatgcttgagtgtctccctgagacagaggtgagtatcctgtagggaccattttctccttgtcttctcacagagcagctctttaaaacaaaacaaaaaaaaggaatccgaaagaaacttttccctctagagccctgcttctgttcccagctcttggtcttcacacagacccagagattctagttgaatcctgtagaacagtgagcaaacacaccgtacatgttagtgccactcatcctccttccctggcagacattactagttgatcataggattctgccagtgagctgggaactgttctgttgccactctttatagggattatcttagtccatttatgctgctctaacaggatgccacagactgggtgatttataatgaacagaaatttatttggctcatggttctgggggctgagaagtccaaaagcatggtgccagtatctggtaagaccttctgcactgtgcatcccatactgtatggcagaagaaagagagagaaggaaggggccgaactcattttaacaaacccgctcccatgataatgacattaatctcatgaatacatgagggcagaatactcatggcctaattacttctcattaggccccacctcccaacacttttgcactggggatcaagcttccaacacatgaactttaggagacacattcaaaccatagcagtgatcaaagagaagtcctcacctgaaggaatgttgaaggtactgcaagctcttcagttactgatgagaaaactgtagcccagaaagaggaagtgactgttctccaagtcatcaaactggttggtgattctcatcagtttagtctctcatctttcctcggcagcccagccctgtgaagtgtcctcgttcttgccggctgtaataacaaacttccccacctaggattacacttctgaaccaggaagtctggccagctgttgaactgcacgttcataccttgaaaaatccttatcaaggagccctcagtgacaggcactgtggattatggaggactccacttcccttcttccttcctgtggccatctgaagtgtggttgtctccttttcatgaggtcatccaacaataagagaaaggatgagaagccgggctcctgttaataaatgagtggcattggggcttcctgaaaattccatttatctaggacagtggcactcagctggagatgattttggacccccatccaggggacatcaggcaacatctgtagccatttttggttgtcattctgggggcctgggttgctaactggcattagtgagaataagccaggggtgttgctacaaccaacaacgcactggaaagtcccccacaatacagagctgcctggcccaaaacacctgcagcgctgaggctgaggaacacactcacaggtgacgggccctcacccggtgactgatgtggggatcccagtcccctgccattgttcagtctgttctccagtctttccttccaccatcataacttattcaaatctttcccagcgttcaaggtctatatcctgaatccgacctatgctgggaagccctcgtggtgaattaccaagtgactgtaactactcctcttctggtccgcaaggcgcttgtagaatatgtctcagggagtcttgtcctggttactggtgtattaccccatctcccactgcttctaattccttgagcagtgcaacagcaaaaggcttacatgaactttgagttgggcacaactgtgtccagactgtgcctatgataggggacctcaggaaggtaacatagaggaccttactgaacttcactttcctcatccctatagtaacatttgtggggcacgtcccatgtgtgtgcggtggtgtcctatgtgcttttcatgtgttaactcacttcagcctcacgacaaccctgtgagtaagtgctaccagcattccgtttcatggatgaaggaaataaggcacagcggtaacctcaaaggacgtgagatcttagggcgctgcactgggtggtcagtgaaccaaccttgtccagtttctgcttggctctttagctggagagagtgccaatgtttctgagctttctacatcattgatattgtactctctgtgcaattttatatattttgccttcttttttgcttagcattactcagaagtgtattttccatgtcattaaaagtgtgcacgcttccctgctccacacctcccctctcttttcttctggaacaattcagtcctaaagccactgggtgggtcagagcaagatgggtgtcagtggtgggaatgggcttggtggctcagagcatgtgtcggagcccaggccaggtgaggaggtgcagggggctgaggggttgagggaatgcctgcacagggtgtgagggtgtgtcctcacaggggccagtcagagcccaaacagggcaaagagggtgtccatgtgggcaggggagctgcctgtaaggggtgtcagagctctagctggaggaggtggggaaaggtgggagattggttacatacaggagcattgagcaaataaagagattaaaggtaagggaaaccaggtttcttattgtcagagcagggagcatgtagagaaaagggggaaactgaaatggacttattagatatgaattggagacacagatttgaactcacagctttcaatacagatagataaacttagataaaaaataaatctgaatatataatatatattataaatgaatagaatataaatacagaaaacaaattctagaaatatatatacatatacgtgtttatatatatacacacacacatatctctgtgtg

SEQ ID NO: 587475 - DNA, 4001 bp, Homo sapiens
gggcagcagggacctttccaggtcctgggctcgccaccaccatccatgcttggctgccccacagcccactctgttctccaaagggtccctgcgggggcctggcctctccagaaaggtgtcagatggggagcgcccagggcccacgcacacagggtcactgagctacctgggtacctctccctggaaggagagccctagggactgctcagtccatcccactgctcctcgggttggggagggaggcaggacacctgtccccgcctagcacacaggttcctgaatgttggccctggctaggaaggtgcccagaggagcgtgcccctgggcgctgacaggatggatgccggccagctggactacatgggtgctagccggagccacttggctgagaatgttggggtcaggaggcagccgtcctgcctggtgcccctgggggtgacatggagttgagacatgggaaatacctggtgccactcaacagccctagatgccaaccggcttgggagaagctgtcccaacatttctttgttggggcaccgtcctcatggttgacatatggggctggttagggcacaccgctctggttgtgccaggggcagatcgaggccaaccacatgggggtgaggtgtaggcctgtctggctgggccgaggagcccactcaccattgccagcctgtctgtaggggcggtgtctgaccatacagggcagggggaacaaccctgctgatgttgtttgagggtacttcccgacactggggggacactctagaaaggacccccactgtccctttggatttcagtgtccaggctccaggctgtgtgtaatgggggcagggaccatccagacagtggaagcccccgtggccaggagccctcccagcagacatgcctcgtcctcacagggtgatgcccagacctccaactgcttcattcctcacgtcgtctcctttcatgggtacgtgtctcctgggctatggacggggctgcagccactcccgagcccaagatggagcaccccagtggcctgcatgcccacacatttgcctaccaaacgtctgcccaagggagggagggcgcggaacccacccatgggcaatgactcagcacgaatccactcttctgcttgctgacccctgacctctgactcgaagtcagggccctcagctggccttcaaggaccccatcctctccaccctggcaggaagtggggttcctgagtatctggaaggaggaccccatggaaggatctggagttcctacacaaagtggggtgaacctgtgccaagttccgatgggcgcaggagggcgcggaggctctaggcggcggaaaggtggggtgcggaggacggggctcacagaccggaagtcgctcagtgataacttgcggagtgggcaccccagcccccaacggggtcagtgcaccctacgagctcgcggctgcggccgctgggtgccctatccgcccaccccagcccaggaacgtgggcgcgaggggcagcactcccatcactcgccctgctcgccacgcggggatccaggccgcaccctggccaccccagtccacggcggcccgggcggatgtccccagggaagggtccaggccgtgcccagcacccagactccagctaggccgcgagggcgggagcgagtcgggacggccgggcaggctcgacccggatcccgggccccttccccctcggctcttttcgggccggcgtcgtgcgggggcgctcgcgtccatatccgcacagcggcgccccctgtccgagcagccccgccaccccggccccgcgcacgcggccgcgctccactcccaccgcccctctctgggtcgcgcggccccggcccaggtgtgggcgcaagggtagcccaagtgggaccgcgccaaggggcgcccgccccccgcctcgccccgccccgctcgggccgggggaggggggccctacctggccaggtgcgcggggtctcggcacaggggcagcaggagccgaccgccgcccagcggcctcgcggtccggtcggtccggcagccactccctgccgcggcccgcccggcctgattcacgcgcccgcccccgccccgcccgtcgctcctgcctcctgcctgcccgggcagcacctgggggcggggcagccccacccgcggcgcgcccgcattcctgcgccccgcgcccgccgccagccccagcccgcgcccccggcccgcgccccgacccgcccgtgccctgcggccgcgcgcccggagaccccggcccagcgccgccggagaccgtgaggcccgcacttcaaagaccccgacccccgggagcccaactgttgacccaaggctcaaagttcccagcctgacccctgaccctcgccccggaagtcggggtgactcggaagttccggctcagtcgctaggaaacgagcgagcccgacgccaggggcggagctctggcctcctcgccgagttgggggaggcaggtgcgacaggtgaggacggtggggcggcgtcgagccccgggcggggccgggtctgggagccccgagagcacaggggatcccctcaccacacaccggtctcccaccgcaccagcgccccacacgtagacgaggaccccgcccacacagaggacccccagaccccaacccccaccacacacactgatgcccacaagtacctggggtcccccatctttctccctcaccccctcacaccgatgcccacacttgtaggggactctgccgcagtgacccccccatgcacatgcggaccccgaatgacctgtgcctcatgtacaccaacccccaagcacaggagactcctcaggaagacagaagccacaagcacaccgagtcctgcccatgccagtcacccacgaacacgctgacatccgcacacctagggaaccccacctgcatatgagatttctcagacaccaaccccacacacaaacaggggatgccatattcacactgactctgagagcacaggggacctccctcacatacggaaccctgtgtacacacagggactctgcaaaaaccaagccccaacggacaagggacccagtgtgcacaccaagcctcataccagacgcccccccatgtacacagcaacccccacacaccaccccgagctgcccctgggtgctccagtcccccaggtccccctcaggccctcacttagggcccctccccctcttaggccctgccctacactggatcatctgtccaaaccaccacccctcgcccctgccactcccaccccaaggactggccctgcctcaaccctttctgatggtcatcagtcgcctttctctttgttcctcttgccatgtgatcctattttctgttttcagggtcagtcccagtttcatttgttctttccccaaacactcagtgccaccccactggtaccagcatgctggaaacatgggtggggggtcagaccagtgcccaggcaactgtgctgcagcgggtgaggggcatggggcaccggggaggacccggacaggctggggcaggcaggaggagcctcccagggaaatgaacttgggggtcagctgtgtggactagggagaggggtgttgctccagggcctgacaccaccatctgccagagccgggaccacataaggtctgagggtgtggaggggtgagtgccttgggtgggctggggagcaggctcaggggtgggctggcttcccagggcagtggagaggcatggaggcttcagcagagagggccatgctcatgattacggtgagaacaaagaccggcccactggcaacccagcagcttggggcagggagaagagtgctagactccagatcctgcgcccggcaggatgggctgagcctggggcggaggggcaggcaagccacggccagggggacgggaggtggccaagtgctcttgccaggcatcccggctcaagcttctgggcacacacccggggcgggcaggcagacaggacaccagctgggaagcctcaggggagcccatgttcctgctgtc

SEQ ID NO: 587476 - DNA, 4001 bp, Homo sapiens
actgcctctccgtcctcctcctcggagctgggcgcaggggggcgcccgggaggcggcgtagtccgcgccacgttgctgtcgccctcctccggctccgccgggtgcaggtgcgtggcgagctcctgcagcacggccgcgcgcccgatctggtcgttgcgtcgcttctccatgatcaggtcctctagactctggaactcgagcgtgtggctgcgctgcgccgacagctgaatctgcagccggtagggctgcttgccgatgcgcagctcgccgccgatcttgaactcgcgcttgccgtagcggcaccaggcggcgaaactctccgagttgcgccagctcagctcgcgctccttggcacccacgtgcgccagcgcgttgcgcaccacggcgctggagcttagcggcttgtagcggtacagatcgttgaccacgcggccgcgacggccctggctggcgtcagtcaggaagctgttaatcacctccagccggtgcaggtgcaccacctggaagttacccacatatacggcccagtgcgggtactgagcctgcgacacgaactccaccagatcgcccggcttgcacttgttgagcaggttctcgggcgtgtaggtactcagcgccgccgagcccggcgcgaagctcttctggtagatgcattcgtcccggtagaacacggagcattccacctcgtgcagccgcggatcgtagggctgcggctggggcggcggcggcccgtccccaccgtcgggcaagccgccgccatctggcccctgaggcggcggctgcggctccacgtcctcatcgtcattggagaaaatgtaggagaccccaatgcggggcccgtcgtcccggtccacgccagtcgggtcggccgtgggaacttccttgtaacttaggtgggtcaatttctccacctggttgcccatcacgctgcggacacacgttcacaccgccgcaaggggagaaagcgaaaccaactccagggtcatttgcacaggtccccggacaggggctgaggctacctgttgggagaggaaggcaagaaagccatgcaggagcccctccgtgaaaagggcgttttgttccgaaaaagaatcggtgggggctcagcacctggagccattttagggggaagtctcgggtgtagcgagctttccctcgtttctccacctgtaaggtcacggtcacaggagactgggcaactcctgttctccctgtccccagcccttcgcctggccctggcaaaagcccattgcatcagcagcttctactgcttccgcctgcgccctacctgccaagcttgggcaggaagagggaaggaaagagaaactttacgccaatcccccccctcctctgctaacttcccctcccaccctcgggccctaactagccccggggacgcctcctccccaccaacgcatccatccccagaggaacaagcgaggatctcagagcgcgacctggacaggtgagtcaccctacctggctcacctgcagcgctacctcctcccggctcgcccgcccttcccccgcgcccgccctcaggctcgggttacctgcacaaactcacccgcggagaggtgaaggccgtggggcctggggaagggctccctgccgcgccccgagacttctagggcgagtttgaaggtgtaggctcggcagtccctcctctcccggcgcgggcggcagcgaggctgggcagagggcagcgcagcgggcagactaggggcatgtctttcccccgcggctgcgtagcgccccgatacttgaaggcggggggcaatccctgttcacaccgcgcttcctcccgccagctggggctgctgcccctcctcagccagctctcgggggaggtggggcgcgaggaggagaggacggcagcctcgcagcctggcggcaacagctcccgcttgggccgggcgagcaacaagcaccggagctggagggacgggattgtagatccggctccgggctcccgggcgggagcgcagcccgtggcatttaaagagacaggcgctcactccccgagctcgggtctttttcacattgcgccgagcggccgggagccccgcccccgccccgcccactcgggcctcgggactccgcccggccacgcccccgcgccggagcgggtttaaatccccctgtaaataatccacccgccgcctggggctggtgctgtgagctctgcttgccttccgagacaagttagaaggcaaacacaacttgccagtgtggaaatgagaaagggaaggagagtttggtgtttgcgccttttccctttgacctgttttttcccagagtacctggagaaggaggaacagtcgtttcttttctttcctggaacatatttcttgccctaaaggtcacaagaaaggattcttcaccaggacagctcgaagagtgcgtcatcctagaggtgttttcagagttagtagtgggaaactttggggtagaaaagaaaatcgcagaaaagaaacagtataaaacagaacgaagacttattcactgactgggtcccaagaccaccgctctgtttattagatacccctggaagttagtacaaagttcataacctccgttatttccagagaggtaccagttcgttggatagtgagagaagcgtgcagctctgactgcttttttttgggggggtggggggttaggggatgtaggaattgcctaattcctacatcctaattctaattgtccttaaattagaaacaaattagcagaggccctagtggatatatttccttcctgttgacttagggaagtgacaggagaccagtaatgcctactaacctccaccacaaaaggacacttccacctctccactggtttcgtttcttttacctaaatgtaggctaccaaagtgttttttttgttgttgttgttgtttatttttttaaaataatgggtccggtgagggtggaggattaacagctctgtttacaataaacaagtttaggcactactgcaagcacccagacttattcgtaggggacttaagaatgcgattcaagacctatattctgtcttcagttgctttcttttgactaattttttccagcatgtataaccagccagtggaaacaggaatatactagcactactgtgatcctttctagtttaggagaaaaaaataaaaatcattctacttatgtaattttgagtccaaacaatcaatattggcagggctgtgatagaaattagtccttcagcaagtctgaagtataagttagatcaacatgagactactgtgtgctgtgcgattctgtttcaataatttcagactggctggcctcaggcgcatgtgactgaatgaatccaacacaccccagtccttttgatagcaaatggtgtggggggctgctgttacctgagtgatatttgttgccatcatatgatcaccatattatagacaagagttaggcttatagagattatggctggtcatcctatgttcatcagattgggagacctctgctactgcctgatttgggaggccactttgctcctaggtgctactgggatggctgggaatgggagaattgaactgagaggacacagttgtaggacaatttgctaccagcactctaggtcagagatctggtgggtgaggaagcaatgcctagctgactaggtgtgtctccttttgtcttgatgagctgttctcaggtgcacaatagtggctcaacaacatatcttgaactgaccaactataaagcctcagagggaacaagccctgatccattttatatctgaatgcctggcactgagtgggtactcaataaatgcttgatggatgccttaggggaaaatttggccacaggtcaagaattgcttcctggttttatggggctgtgagtgagtgagtgaagaaatgttgccttttgatagctggcgtctagtgtagattcttccatgaatgcctgttgagggttcaacatccgtcttgtcacctggaacatttggtcagagattacaacatggctctcaga

SEQ ID NO: 587477 - DNA, 4001 bp, Homo sapiens
aggaattaccagggcagccatggcaccaaggtttgatgggcttgccatctgagtttaagtggaaatgcagaatgtgcccataccagcctgggttacattgtcctcttacaggggcctcaagcccagcagtgagctttggctcccgagttaggcagactgtctcggctggtatgtgacacatggcaaggcacttcattgcttcagagctccttctatgccataaaaggccctacaaggcctgctgctaatccccctctctggcctgttctccctcaccactggcccaccctgctcactccactccagccacactggctgccttgctgttgttcctcaaccacagctggcttatttccacaacagggcctttgcatatcttgttccccaaacccttcccatggctggctgcttcaccactcaggtcccagttcaaatgccacctctttggggaaggcttccctgattccctgactttggtgacagttctccccagttgctccattcaccatttccctgttttattggctttaaagccactctcatctggtcttttcttgtttattcatttattctctgtctctcccatgcaagcagagcctcatctatcatgggtactgccgatccatggtgcctggctcacggaaggcatttattaaacattttgagactgaagaaaacactagctaacaccgacatgcatttaccatgagccaggcactgatccgcaggcatttgtactcaacgctgagaacaaccctaagaggtaggtatcattatatcccccattttattaataagaaaacaatagcacagagagatacagtcacttgcccaaggtcacacagggccaggggttgggccaggattcgaagcaggcaggctgtctcctgggtctgaactctcaactacttcaccctaatcaaacaatccctctggtcaaatgtgagtgataataatagtacccacctggtgggtgttgagggtgagcccaagttagcattcagtgtgggcatgtgaacaattatagtcaatattgaatggagacctatgatgcttttatgaaggtttctattttgggttaaaaatgcacacatttctcctgaccagaaatgatctctgagtgctaaatattttatgtcaatggaataacacaaatgattaagcaacaccccataaaatggggcagacccagggaggaatatatatcccaactgactcatccagtgagctcaatgcacatgaattacaaatggaacggggtgcattaagcccctctgctggcagaagggaggctgctgcctgccatgtgcctgtgctgagaatggcaggtccccagggagaggagaggccacccccttctctgtctcttccatcacaggcgtgaaagcctcagcgcatgagccgattctgtgcagtgctcgacatacagatgagaacactgaggcacgagggacagcctgtgacctggtcaccgcgctcaggaggaggtggttacccgcgggcctgagggcgctgactttttagaatgggcgagtgcagctgtgtcccagtgaccagaacgattactgcctttaaaaagtcgtgaaaatgatcgtgaaccgtaccccacacggagcgcgcgtctaccccctaaggcggtggagacgcccccagcttccgccgccagctcgcggggcagaaggggtgcgagcgactctggccaggccccagggacggggaccgggtctcgcggccctgaccgaggagagcccaggaactcacgtggccggagcgccgggggtttcagcacggagacccatcccgtctgcccctggactcccgcgacccccgcgggcctctccgctcgccccgccgcccacctgccaggggaaggagcgcagtgtgcgcaccgccaggaagcggcgctcaaaaccctgcagcaagagttcggtccccgcgttctcctcgggcgccataacgtgggcgaggccgcagccgttgccgggagacctggaggaagccgggcctggactgaagagggggcgggccgagggcagagcgcgggggcagagagggggcggggcctggggatagggtcaggaggtgcgtcctgggggcggactctagggcggggccaagatgagcgttaggagggcggggcctggggtagggccaggataagcgacatcggggcaggtcctgggtagagtccaggttggcggttcctggggcagggccaggatagggcgatcctggaagctgggcttcggaagcgtccaggttggtggcgtcctggaggcggtgccttgcgtgggggcaggataagagtcctggaggcgggcattagggcgcggataaacgccattggattcaggaggcgggacccagagcagagcccaggagacaggtcttagggcggggctaaggccaggcccagagaagggctcaggaggcggggcaggggcggggcgttgactatgtcgtagaacatggccaggcggtgcgcggactctgggaggcgaagcttaggacgggcccacttggggaggggcccagtgcccgggaggcggggccgagtccgggctgggctgcgctcaggaggcgggccctgggaggcggagcttagggaggggccggtgttgggagggacccagggactgggaggccggttggggctgggctcaggggccgagacctagctgggcttggggcggggccgagacggagcgaggggtccagggtgtgggaaacggggaggggtttgaggaggggatcggaatgtggctcaagttcgggaggcgttacctgcggagggtttgaggcaggcccaggagcgagcccatggtcttccgacgcggggccaggggcggggcccaggatccggagcttcgtgcggggccgagtccaggtttggggcccgggaggcggggccagttagggcgagggtccctgggatcgtcgggtcaggccttgggctaacgtaggcactctcgcagttcctccgccttcaggaaggtcttttcagcaggggccttacgggtgcatgcttcggtcctggaggccttatcctagcctcctctccatcagcgccacccgtctggggcccgaaaggagggagctttccctctgtcccccagcctttggactgtcactaaacaagccattcgttcatcaaatactttttaagcgcctaccatgtgcctgacaagggagatgtaacggtgagaaaaactaggtgtggtccaggcccttcaggggctcaggtgctcgtggaagaagtggacattgaagtacttatcacacaaatgaggataaaagtacgataacgatatctaccacgaaggtgagcagacagagctagcggggcttgcaggaggagttttgatcttgcagggacaggaaggaggagttagctcctgcggggtgggattgggggtggtggtgatatagacgtggggacagagtggaaaacaacaaaaatataattattttagttcaaagttattgtgtcttgagttgaaaggcagggcagttagcaacacagcttagatttcagtactgctcctgaaatctgaactgtgttcaaagtctaaaacgtttaccttagcaaattcctcatcaaactccatttggaagagtcccgagagctaatttgttaagtatacttgcaaaaggtagatgaggagacagataaaatcttattacctctttcagatgagaggcacttgagccctgctcagctatgagaataagagaggggaattaattctaattgaatacacttgttctcttatagctgttgttccccaccagaaccaaatgagcgcaagatctgacaaagaaaaaaaaaggttcatcttttattcctccaaacactttcatttaaatcaagaggatgggatgtggttattgctgtgtttttagacagaatcaacggtttctgggtctgagatgttgcatacaccttctcagtccctgtatcctgagatggagtcacctgagaatccacagcaagtcctaac

SEQ ID NO: 587478 - DNA, 4001 bp, Homo sapiens
tgccacccaggtcatgggccagctccctggttacactggtcagccaggaattaccagggcagccatggcaccaaggtttgatgggcttgccatctgagtttaagtggaaatgcagaatgtgcccataccagcctgggttacattgtcctcttacaggggcctcaagcccagcagtgagctttggctcccgagttaggcagactgtctcggctggtatgtgacacatggcaaggcacttcattgcttcagagctccttctatgccataaaaggccctacaaggcctgctgctaatccccctctctggcctgttctccctcaccactggcccaccctgctcactccactccagccacactggctgccttgctgttgttcctcaaccacagctggcttatttccacaacagggcctttgcatatcttgttccccaaacccttcccatggctggctgcttcaccactcaggccccagttcaaatgccacctctttggggaaggcttccctgattccctgactttggtgacacttctccccagttgctccattcaccatttccctgttttattggctttaaagccactctcatctggtcttttcttgtttattcatttattctctggctctcccatgcaagcagagcctcatctatcatgggtactgccgatccatggtgcctggctcacggaaggcatttattaaacattttgagactgaagaaaacactagctaacaccgacacgcatttaccatgagccaggcactgatccgcaggcatttgtactcaatgctgagaacaaccctaagaggtaggtatcattatatcccccattttattaataagaaaacaatagcacagagagatacagtcacttgcccaaggtcacacagggccaggggttgggccaggattcgaagcaggcaggctgtctcctgggtctgaactctcaactacttcaccctaatcaaacaatccctctggtcaaatgtgagtgataataatagtacccacctggtgggtgttgagggtgagcccaagttagcattcagtgtgggcatgtgaacaattatagtcaatattgaatggagacctatgatgcttttatgaaggtttctattttgggttaaaaatgcacacatttctcctgaccagaaatgatctctgagtgctaaatattttatgtcaatggaataatgcaaatgattaagcaacaccccataaaatggggcagacccagggaggaatatatatcccaactgactcatccagtgagctcaatgcacatgaattacaaatggaacggggtgcattaagcccctctgctggcagaagggaggctgctgcctgccatgtgcctgtgctgagaatggcaggtccccagggagaggagaggccacccccttctctgtctcttccatcacaggcgtgaaagcctcagcgcatgagccgattctgtgcagtgctcgacatacagatgagaacactgaggcacgagggacagcctgtgacctggtcaccacgctcaggaggaggtggttacccgcgggcctgagggcgctgactttttagaatgggcgagtgcagctgtgtcccagtgaccagaacgattactgcctttaaaaagtcgtgaaaatgatcgtgaaccgtaccccacaccgagcgcgcgtctaccccctaaggcggtggagacgcccccagcttccgccgccagctcgcggggcagaaggggtgcgagcgactctggccaggccccagggacggggaccgggtctcgcggccctgaccgaggagagcccaggaactcacgtggccggagcgccgggggtttcagcacggagacccatcccgtctgcccctggactcccgcgacccccgcgggcctctccgctcgccccgccgcccacctgccaggggaaggagcgcagtgtgcgcaccgccaggaagcggcgctcaaaaccctgcagcaagagttcggtccccgcgttctcctcgggcgccataacgtgggcgaggccgcagccgttgccgggagacctggaggaagccgggcctggactgaagagggggcgggccgagggcagtgcgcgggggcagagagggggcggggcctggggatagggtcaggaggtgcgtcctgggggcggactctagggcggggccaagatgagcgttaggagggcggggcctggggtagggccaagataagcgacatcggggcaggtcctgggtagagtccaggttggcggttcctggggcagggccaggatagggcgatcctggaagctgggcttcggaagcgtccaggttggtggcgtcctggaggcgatgccttgcgtgggggcaggataagagtcctggaggcgggcattagggcgcggataaacgccattggattcaggaggcgggacccagagcagagcccaggagacaggtcttagggcggggctaaggccaggcccagagaagggctcaggaggcggggcaggggcggggcgttgactatgtcgtagcacatggccaggcggtgcgcggactctgggaggcgaagcttaggacgggcccacttggggaggggcccagggcccgggaggcggggccgagtccgggctgggctgcgctcaggaggcgggccctgggaggcggagcttagggaggggccggtgttgggagggacccagggactgggaggccggttggggctgggctcaggggccgagacctagctgggcttggggcggggccgagacggagcgaggggtccagggtgtgggaaacggggaggggtttgaggaggggatcggaatgtggctcaagttcgggaggcgttacctgcggagggtttgaggcaggcccaagagcgagcccatggtcttccgacgcggggccaggggcgggccccaggatccggagcttcgtgcggggccgagtccaggtttggggcccgggaggcggggccagttagggcgactgtccctgggatcgtcgggtcaggccttgggctaacgtaggcactctcgcagttcctccgccttcaggaaggtcttttcagcaggggccttacgggtgcatgcttcggtcctggaggccttatcctagcctcctctccatcagcgccacccgtctggggcccgaaaggagggagctttccctctgtcccccagcctttggactgtcaccaaacaagccattcgttcatcaaatactttttaagcgcctaccatgtgcctgacaagggagatgtaacggtgagaaaaactaggtgtggtccaggcccttcaggggctcaggtgctcgtggaagaagtggacattgaagtacttatcacacaaatgaggataaaagtacgatagcgatatctaccacgaaggtgagcagacagagctagcggggcttgcaggaggagttttgatcttgcagggacaggaaggaggagttaactcctgcggggtgggattgggggtggtggtgatatagacgtggggacagagtggaaaacaacaaaaatataattattttagttcaaagttattgtgtcttgagttgaaaggcagggcagttagcaacacagcttagatttcagtactgcccctgaaatctgaactgtgttcaaagtctaaaacgtttaccttagcaaattcctcatcaaactccatttggaagagtcccgagagctaatttgttaagtatacttgcaaaaggtagatgaggagacagataaaatcttattacctctttcagatgagaggcacttgagccctgctcagctatgagaataagagaggggaattaattctaattgaatacacttgttctcttatagctgttgttccccaccagaaccaaatgagcgcaagatctgacaaagaaaaaaaaaggttcatcttttattcctccaaacactttcatttaaatcaagaggatgggatgtggttattgctgtgtttttagacagaatcaacggtttctgggtctgagatgttgcatacaccttctcagtccct

SEQ ID NO: 587479 - DNA, 4001 bp, Homo sapiens
atgctacatttattctgatgaaaagagtagagaaaaaatggaaacaaagaaaagaagaactgtttgttcttcttgtgtctttggatttgccacaaaaccctaaagtacaaaagtgtcctttaaagcctttattcaagattaacaaaagaaatttattccttcaggtttagagctttgttctcccagtttaagataaatgccacacgggcagccactgacacccaagaattcaagttctttaaatttatctttctcggtttttgctatattaaagtgaaagcattttcttggccacatgatgcatgaccagaaccttaatattcacttcctggcactaaatccccaagggaggaagggagcaaagtaaactaaactataacaatcctcatactggctgggcactgtggctcacgcctgtaatcccagcactttggaaggccgagacgggcggatcatgaggtcaagatatcgagaccagcctggccaacatgatgaaaccccgtctctactaaaaatacaaaaattagctgggcgtggtggcgcgcacctgtagtaccagctactcgggaggctgaggcaggagaatcgcttgaacccaagaagcagagtttgcagtgagcggagatcacaccactgcactccagcctgggcaacaggagactctgtctcaaagaaatgaaaataaaaataaaaataaataaataatccttatataccatcaccgccaccattccaaacttcccaaaaatgccactgccgagtgccaacagaaaactgaatttcactctcgaccaagtataatgggaggaagcgaaggtcaatctatgaccagagcagcagtgcgttatctgtagcccatatcactactttcgtaagacttaaaaccatctgctatgttacgtatttattcatttatttgtttacgtctttctttagtaaaatgtaagctccatgaaggcagtctttgtcttgttgactgttgcaaattacctgcacctagagcaacgcacagcacctagtaggtggtcaataaatatctattaaacaattgagtaaaacagactaaaaaaatcgagaattaactttcaaaaacctcatgtcactcttgttgaaacatctctgataaacccatcttgtctggaggataaagtccaacaaaacaaagcacacaagcaccttcaaaatctggccctgaccacttttccaggctcatctgctaccagccccgcgcactcaaaaaacttcaactccaaacatgtcagtccaaactctggtgatacagtcacttgctactcatgagacatgttctttcactcatccaagctttgtaaaatgactttccctccccctggaaaaatctttattccctcttatttaactcttattcgtcctccaaggcccaatttaagtgcctgccttaaaaatccttccaactctcccaggataatttctccctccctctgctctcacatatactacaatgcaggtgtgtatgagctgctatcatcctgtatcgtattcatttgtttcccatccctttcccaccatcctgaaattccggaggtcaaggaccgtgtttaaaatctctatcgcaggtgcctggctgaatgtatcctgcgggcaaaggcgccagtcgagtcctgtggacaccatgccatcccatttagcgatcgccccgtcctggccctgtggccccacagccgtcccctcctcgccctgggctgaaggtccgtctccccaagaccacggaggagtaaaggaagggagtcagccggcagcagcccgctcgggccccgcgagcgaggcaagcaggtgaccgctgggcgggccgaatccgtcaggggcccggtcccaggttccggccgtacctgtctcacgttggccggcaacttgttccaggggtagttgtgccggatgtggaactccacgtctatgttcatgatgccgcggccagggccggcggccggggccgccaccgcgacccacactacgcctcccgcctgcccgcccgcagcctgtcagcggagcgacgcgggaggccccgcgcctcacactgcagaaggcccaggctgccccatggcctaggctcccgacagttcagcgccgcccgggccaaccgagtacaagagcagcagcgattggaggctggatcgcctgaacagctccaagtttcttcctagtttcgggccgccggaaatggctctgggcacacgtcacttccgcccgctggcgcgcggccggaggggcggggcacggactggcctctagccacgccctctacaggctgcggggcggggcgacgacgaggtaccgggaggtgcccgggtgagcgttccccgcccgcgcgcttcgtctccccgtttcagtctctgaatgaacggcgatagtcgcttgggtctgcgttgccgttgctgatgacccagtttactcaaattgtaaagccggaggcactggggtcggttttcagagaaaagcgacctgggaagcgggccggcagtggctggctttacattggagtgcggtgcgctcgcgggggttctccacaggccagcccggaacccgggccagtgagacggggcggggggttgcggggacgggtccagggccctggagaaagaaataatctctaagtcaggtctcgcaccgggttgagcgagaagcatgggcagtgggagagcaaaggtctggtaagccctcttcccttccgcggtgtgctgcacgtcattgggctccacttcccaagaagatccaaattcttacaatgcagggattcagggagctgaaattttaaacagtggtgctgacaggtcgaggcagcctacagggctgacagagagatacccttgccaactttgtcatgcagcctgtcggtttctgctttattctgctccacacaaatgcctccagagtcacttaaaagcaaaaatccagcatgtcttaatttcagattgagtgataaggtctttgggaataatttctttcagaagttgttacgctgccttagcaaacccgtgaccattattcctggcagcaaccagagacaagttcagtgttattgcaactgtttttcagtttttaacaatggttttaaataatgttttattatatactgggagatgtatacttagaactttttataagatacctagctcacacctcaacagctggcaagtctgatgcttagcagaaaccccattatgtctgatgaaataaaggtgacaagtacacactgcccttgcttagatgttttggtctcctattatccaactataataacccaaagataagtgctttgaaccttatgtttacagatcctcatcagcatagctaaggttaactgaactctaaccgtgagacatttattcaacaaatattgattacctgcccgccatgtattaaggccttgacttgacaatagattattcctcacaaccctgatattcctacaacagtaaccacttactatcccagtttgatagaggaggagactgaggcttggcagggcttcatgacttgctcgcaagatcacacaggtagcactgacagagccaaactggagccgaaggctatcctcactccagagccatcctttcagttccccaactcaggctctcactcactgaactcttctacctcctgttccaatttagacaatgttcattcaaagtcaacgacataaacatcctctaaaataatgctttacagttctaagtgtggaagaacccatattcttccaaagtctaacttagatctaatgcaatataagtaacaatgaaaattaaagtcaatttagcttaaaaaaatccctgtaaactattattttagctaatgatagcagttcagcaggtgaatgcctgataaactcactatattgagtttagtggacacatcaaaaactataaaagtgaacgtgggataagtagaggtgaacctacacccattaaattaataaggcaaacagacctttgaaaatgcgaccctgtgactagaaaagattctca

SEQ ID NO: 587480 - DNA, 4001 bp, Homo sapiens
gtaagcaagggaaataaaaggagaacaaatgcaaatcaattcactttgctatttgataaatagcacaaaggttttctacaaaggggcattgaaattattggctaaaataagattttaggattacctgtgaatataaattatctttgaaacattaagtccccagttatcatatataattgagagttacttgtttattacagaagtttcatgacaagaactccacatttttccaaaagtacctccaaatatgattactcttcaaatttgtatggatagcaatgatgagttcaattttttttatactcattctgttttttgaaaattgaaattcccgttttaggttctgaaaagtataaaaaagcaacgcagttctaactgggcaacttctgataagttaacctatgccgtgaaactgaaaataaatacaagtaaaagtgcttattaagtatttaaaggaaaaatatgggcttttagaaagaaaacaatcacaaggacacttctcctgctacccagagcaaaaagtccacacggtgtctcagtattggtttgcttccatgatacaattcatagcattttgttgttgttagtaaaccattggtcaattttccaaaccatggatgcagcaatgatgtcttacccatttattaataatttatccatccacattaccattcccaacatttccatctccagtcattctttaaaacgtacttatgtgccacacaagacattaagttatgcttattttcttccccctgggtactattcccactacccccagtaaacagccaccccttggccaaaagttggcaaataaagtggggaaattcaagacctcaagatgccctaaaggttagcttgaaaagggtaaaataaaacacagaacgcttctctttaatagactcacacagtcttatgaaaatgtacgttttatcaagtttgcatccacctctgcagttaggtagattacaagtgaaagtttccacggttccttcatccactacttcatggctcattcataacaatgacactgtgatctcactccatacctctgcttgtcgataatcctgaagtttggcaaactcatctgcaaagttcatcaggcccagctttaaatgcggggtctctgtagcagcatacgcgttaatttcattcaccaggaggtctgctttgtctctcagcctggcagttttccgcacataggcagcgaagatttggcacagttctccaaaatgcttctccacatttgagacagctgtttgcagttgtttcgtttgagcgttcctagggaaaaggtgacacaaaaggcaaaacattctcgttagagatgagaaggcttcacgttaatttaacatgcaaacattccccgggcattctgcagctttgaaggcgtaaacccatcaacgacccagcgtctcccggcgcggactgctctccatggggtcctgacctcactatccggactgtgtaggcacaggaaaaggcccaggccgggtgggcctggccttaactggggaggtggctgctccggctgctccgcgcagcgcggcctgggcgcccggctgcctcctaggcttccgcactgcccgcggcagtgtggggacccgagacccggtggcgtgggtgggtggcagccggccgggccccgggctcctcttcgccgccggcggtggctgcagcccaaggaattaggccccaggtcacagcggggaccgtgcagcctcccactcagggtcggaattcggcgcagaggccccatggacagaggcttccacttccctcaccccagccctccagtgtgggcggccctgggcagctgggctcgggctgttaccggttttccagggtgcgcctcatcatgctgcctcgcgcacggccggggaccttgcgggggcccaaggacggggattccaaggcgcctgggcgcgcgctggggcgcaagcagccgccgggagcctgaaagcccgcccctcgcgccgccgcggcaggccgggcgtttctatggaaacggggcgcgcgcccccgcggtcaatgcccgaggcagcctgagcgcggctggggctcggaaagcgccaagcaggcagggaccgagaggggtgatggcgcgcccacccctgcagagccgcctgcgcggttgtcccgcgcgtccctgccggcgaaggctgtgagaagcaccgcggggctacggcgcctccatcctctctaacagccgcgcttaccagacagccagcctccagcgctgctaggctactccgagcaggggagaaaagacgccggtccgccggggaccaggagggagacgtgaaaccagaggcccgggggccccctctccgcctgtgcgacttgtagtctcgtaccagacgcgtccgcttcactgctgaatctgaaaacgtgggctcttgagagctgcccttggaaggagctgtgctttctgcctcatctttaacttttcgtttattcagcaaatatgtatcaagttccgacttcgtggaagagattgtgttagacactgggagtaatagaaacataattaagaagcaggggtcccggacctgaagggcctgagcgtcgggtaaggaggcaacgcttacaccgaacctgtgctgagataaataacgaacagttctggctcttagagttggcctgggggaacaaaaattcaaaaagaataaaaccccaaacaaacaggaggctctcctttgtcctttgaacgcctctgtccctttgaccctcctggccttgcgtgtgctgcttttcccagtaaatactgcaaggactctattcagactttgtttatttatatatgtattttagatggagtctcgctctgttgcccaggctggagtgtagtggcacaatctcggctcactgcaacctccgcctcctgggttcaagcgattctcctgcctcaggctctcaaatagctgggattacaggcgtgcaccactatgctggcctgattttttgtatttttagtagagacggggtttcgccatgttggccaggctggtcttgaactcttggcctcaagtgatccgccccccttcagcctcccaaagtgctgggattccaggcgtgagccaccgggcccggcctcaattcagactttatctgcttcaagaaacctctctgggatcctccgtcacttcactttttcaggcagcgttagggccttgtcctaacgctttgggacggggtcctaatactgtctgaaggagcgaagtgttggaatgctcaaacagtacacttcgttgattttgtactgcctcctgtaccctagactttgaaccctttgagacagattaaatgtgattttggtcttgtattcctcgctgccgtgtgctgctgattaaaagtttttattttgtacaaatagatgtcctcagtcctttgttttgaacttcccctattcgcttgtgttacaatgtgtatctctctttgctccttgcattcgctcagcatgttattggttggatgcctggtgtgttccaggtattatgcttggctttgaggttggcacagtaacctaaggtcagaatagtctgtgcttttagagagctcacagttatgtggcagtgatagaagctaatcaaagatgtgtaaaattgccactgaggtatgtgctactgtatccacttttgcagtgtaacaaatcaccacaaaacttagtgacgttttacaatcgtttggttagcttgggattctgagtgagctgggtggttcttttaccttggttctgctcagctgggctcttactcacctttctggtcagctggcggctggatgatctaagaggcctcacttctgtgtcacggcattggcaggtcgtcagcaggggccacgtgtttcttattgtctagcacctcagccaggcttctttccatggtttcagagttccaaaacagtggagcaggacaagtcaactgcacaagtgcctttcaagtctctgcctatgttatgtttgctgatacactattggcggatgcaagccatgtggccta

SEQ ID NO: 587481 - DNA, 4001 bp, Homo sapiens
cgcagcacctgggggcaaggtccaggctgtagatgggggagggtgtgacaggtgggagaggcagggcgccaggtacctggagctgagggcagcctttctgcagagcctcgacaggcagctgaaggggaatgctattacggttgatgccggtgctcacctccaggacctggagctgggggcagcagctgccctgcagagatggggggagggggtaggtcacagggtcagtggcctggcagtccccagctcagcatctgcctctgctcccaccaatgccaacttaccagcagtgcgcccaggatggctgtcgtctgggagctgtaggtcagccacaacttgcgcattcgggaccctgcctcctccaagaagctcaccacagctgtggactccacctggggccccaatacaagagcacccgtcaccccggcctgggttttttcagggccccttgggacacagggctcaccatggagtgctgtaggtccaggctatggagctggcagcaggctttggctagcatgaccagagcgtcagcagtcacaccgtggcagccggagagcttgaggaaagtgagccgaggacagcactcacctaccagctgcggggagacagaggggcagctggggttgggagacgacaggctaagatccacaagggaaacagacaagtggctggtgccaaccccactctaccgccttagctgtgacctcctttctgcccatgccaggcctacttgggtgtccccgcctctgatacctccctgctggaggaaacagcaggaaaagagaaccaggcaggcaggcagacatccccacggagcagcgttgggcccccaaggtgcctgacccacttcctagagtactgaacagtcccagagtgtcacagctgatgtgcaggacagcctggagctctcaccttcaacacggggtgtacctgagacttccagtggatgagggtcagcctctggagctgtgaaaacctgggccgacagcggaggcagagctgcactaatgttcccacacgagtccttcccacccaacaccttggtgcagggagacggaaggagcctggagccaggggtaaggaagagagggaacccctcaccgattgggcataagccactccagggaagcaaggagcttcttctccgccttgaccccgcccttggcaggccggccgaccagcggggacgacagggtcacggtgtgccagagcgcgggttgggaagcggcctcctgccagcggcggcacacgcgcgcagccctgggaggacagcgtgctgagggtgccggcccctccgtaggcgatgcccccctctcgcagcgcagtagacaccccggctcaaagccgggctcctgggactccaactgggcgcctaaggggctgcgctctcggactgagcggtgcgcgctccgatgctttcgccctccgcccccgcccgggccaccgctcggaccacgtctggcccaagccgctacgctcggcggcgggcccggcaccagcgttacctgcccaggaagggcatggggccgtccgccgccaccaacaacccgaaaatctgcaccaggatttccaagggaatgcggtctccccagcccgcgtcgggcccttcctcgggcgtgggcgtgggtgccggtgcgggtgcgggcgcggccgccgcctcggacctgagcccggccttgggcttggccgcggcgctggggccccggggcggctgccggggagtgcggcgggaagcgcgccgctgtgcgcggggccgggcggggccgggttcggacagcaccagcagcatgctgtcggactgcagcaggtggtaccccgagcccctcggcgccagccggtcccaccaccagtcctcggccgagcggggccgcggcgctgcccgggctctgcgtcggacctgccgggaggctggggcagccatgaccaccgacggcgctcggggaagccccagggagcggaacgggcgaggcttatagaccgacaaccccccggttcctctcaacgcccgcccgcccgccgaccagcttccggggcgggacttccggtcgtgggccatgccgggggcgggcccggaaccgccacgggtgagtcgggtcgtggctgctgccgggtcctgcgcgctccggactgaggtggcgtccctgggccggacggcggtgtcccggcgtggcgggaagccggcactggagcgggagcgcactgggcgcgggaccgggaggcgcagggaccggacggctcccgagtcgcccacctgacggtaccgagagggcggcgcccctccgagcagagccgtcccggccactcccctgggatctgacttggctcttgcggtcgcgggcaccgtgaagccctggggtgtgcgtggctcctcctggtaggcgccctttcccggcgtccggcttggggtggtggtggcgttgactccagccccgcctctccctggagaggagggctccactcgctccttcggcctcctcccctggggccgcagcgactcgggccggcttcctgcttccctgcctgccggcggtcccgctgggtacgttttagccaatcctccccatctgcgctcctgcccggggctcccccagttcccctggtctcaccctgttctgactccggctctgcatcctatctgtttctctgtttctttcaagctagaagaagtcttcacttcccaggagagccaaagcgtgtctggccctaggtgggaaaagaactggctgtgacctttgccctgacctggaagggcccagccttgggctgaatggcagcacccacgcccgcccgtccggtgctgacccacctgctggtggctctcttcggcatgggctcctgggctgcggtcaatgggatctgggtggagctacctgtggtggtcaaagagcttccagagggtgagtgggagggaggtgcaggtgtgcccaagactcctgggctgcggtcagtgggatctgggtggagctacctgtggtggtcagagagcttccagagggtgagtgggaggaggtgcaggtgtgcccaggaaggtgggctttggcactcttcctcccttgggcatcatgaccctgacatggcctcctcccttccctgcaggttggagcctcccctcttacgtctctgtgcttgtggctctggggaacctgggtctgctggtggtgaccctctggaggaggctggccccaggaaaggacgagcaggtccccatccgggtggtgcaggtgctgggcatggtgggcacagccctgctggcctctctgtggcaccatgtggccccagtggcaggacagttgcattctgtggccttcttagcactggcctttgtgctggcactggcatgctgtgcctcgaatgtcactttcctgcccttcttgagccacctgccacctcgcttcttacggtcattcttcctgggtcaaggcctgagtgccctgctgccctgcgtgctggccctagtgcagggtgtgggccgcctcgagtgcccgccagcccccatcaacggcacccctggccccccgctcgacttccttgagcgttttcccgccagcaccttcttctgggcactgactgcccttctggtcgcttcagctgctgccttccagggtcttctgctgctgttgccgccaccaccatctgtacccacaggggagttaggatcaggcctccaggtgggagccccaggagcagaggaagaggtggaagagtcctcaccactgcaagagccaccaagccaggcagcaggcaccacccctggtccagaccctaaggcctatcagcttctatcagcccgcagtgcctgcctgctgggcctgttggccgccaccaacgcgctgaccaatggcgtgctgcctgccgtgcagagcttttcctgcttaccctacgggcgtctggcctaccacctggctgtggtgctgggcagtgctgccaatcccctggcctgcttcctggccatgggtgtgctgtgcaggtacacaaggacccccagcccctgtgcgggt

SEQ ID NO: 587482 - DNA, 4001 bp, Homo sapiens
caaggtcttgctctgtcactcaggctggagggcagtggtgtgatcacagctcaccatagcctcaacctcctgggctcaagcaattctccatgtcagcctcccaagtagcagagaatataggtgtgcaccaccacacctggctaatttttttttttttgtattttttgtagagataaggtcttgctttgttgcccaagctggtctcaaacttctgggctcaagcaatccaccacctcagcctcccaaagtgctgagattacaaaggcgagccactacctcctgccttaagccattcttcacactgtcatcattatttaaccaccttactaagtatctacaaggcaggtgttaggggtacaacgataagagtctgctttaatggagctcacagtctcctgttaggtattttttaaaagaccagttgatcatgtcacttttcagctcaaaaccttcagaggttcactgacagctacaggatccagacttcctcgcgtggaagtctaggtctgccatgattttacctccatctactctttcagtctcacctggccccaccttcatgcgctctctgcccagacacactgaactcatggccactctgagaacgtgccacacaactctgatgattcttggcttatgtggttttctgatgctcactgctcacctgaatcatcacagtagtatactcaatatttgttaaatcaatagaaaaaatgactacagcagtgcaagtggggagcagtttaaggattaaaacttgtagaaatgtttgggaggctgaggtgggtgaatcacctgagctcaggagttcaagaccagcctgggcaacacagtgaaacctcgtctctaccaaaaacaaaacaaaagcaaaaaattagcagagcgtggtggtgtgtgcctatagtcccagctacttgggaggctgaggtgggaggactgcttgagcctgggaggcagaggttgcagtgagccaagatcatgccactgcactccagcctgggggacagagtgcgactccatcttgaaaaacaaaaaaacaccaacaccaccaccaccacaatttgtagaaatgttgaccaagtgtggtggctcacgcctataatccccgcattttgggaggctgaggcaggaggatctcttgagcccaggagttgaagcccaggaattccagaccagcctgggcaacacagcaaaaccctatctctacaaaaaaaaaaaaaaaaaaaattgccaggtgtgggtgtggcggtgggctcctatagtcccagctactcaggaggctgagatggaaggattccttgagcccaggagttcaaggctgcagtgagcgatgattgcaccactgcagttcagcctgggcaacacggcaagaccctgtctcaaaaaacaaaaaccaacaaaaaaaaaaaaacccttgtagaattgtagaaatgtagagtgaaactcataacatgatactgggctctggggttatatgcagagtttactgagcataataggactgggtctctctgctaacagaatttacccatacattgtaatatcatcagacaagggaatctcaaattattatcaggaaattatcaagaaatagcgtatgggtagatttcaatacgaattcatcttccgcttaactagtttttaaaaagcaagaactataacacaacgcaaaaagctaatgcttggtaggcatataattatctgtgggttgttaatttcacaagtatgaatatctggcggttgcactgtagcccaaatgagagggcacaatgaaatccccaagagcactgataaagctcatgggaggccctggagctttccaaagagagagtctccatctttttcatgcactgcccacagctctcacctcttttagcttgtctccctcttcaagcctcaagcgctgacgttgccacagtttcattaggtcagctttttctccgactccctccagtccctcacccctcccagcttccagcagcccaatcaccgtctataaatcccgtcgctggcatccggggtctcttaggcaacaatgtgtgggctcctgattggccgcgagatccaggagggctggctacaaaattgggcacggggataaaattaacaagtgtggcggccaagagcgtgggagggactgcaatgtctcaatataaccctagaatgaagacgcgtcgaatcctgaaacaagtagcgttgaaaaccttcattcaagacgtagtgtgtcccaaatcagccctacctacggagcacgcccagtcacattgtcctggtcactccggagctgcgaaatgcaggctccactgtgccaggttttaagagtggccaacaggtaaacagagggttggaggaaaaagaattcgagactggttcaatgaaagaatagcacctgcaacaggaagtggaaggatggggccaggaggaattgcccaacacagagacacacaaatgcttcaatgcaaatttcaatttattggattatagaattcaggctgactgacagatacaccagggaaccagcagatggcatgccctaataagaataactaaatttaggaactcttagaatcccgtccaattcattaaatttattgagcgcctgtcttgtaatacgaagcaaaatgagaatacaaagataaaaaagaaatctaaagaggaagactggaaggtgcaatatacaaatatttaatggaaggctcacacgggtaacagctgttatagagttatgaacaagtgctggaggataccaaaaagttcaaaattccggaacagaggtcctttggtcaatgtaaagcaggtcttataggcagcagtcaacaacaacaaaaagcaaaacaacagcaaaaagagactttccttactatctttttttctcaaaataaataagaatgcactccccttccacttaaatgtacaaaccctgtgtttctgttgtgttttacaggttttatttttatttttggggggaacggagttttgctcttattgcccaggctggagtgcattggtgcgatctcaggttactgcaacctccgcctctcgggttcaagcgattctcctgcctcagcctcctgagtagcggggattacaagcatgcgtcaccatgcccggctaatttttttgtatttttagtagagacggggtttcaccatgttggccaggctggtttcgaactcctgacctcaggtgatctgcccgcctcggcatcctggagtgctgggattacaggcgtgagccaccgtgcccgacctgttttatagtttttaaataggcagcatttgtatatctctagtttaaaaagaaaaaaatgaagctcatagaagttgttgctttccttgggttaaaatggatcagtaagtgggcaagctgaaattagaacctaggttgtttgaattccagcctagggattttttccacatgaccgggttgtacctaaatgaataaacaaagccttgggggcagaggcggtgagggggtggcctggaggaggtacttagatgcaatactaaattaccatgcattaccagttagcttttatggtttcaaaacgggttcatccagaaagagaccagttttaacaatgttgggagtgctgtgtctctctatgaagttcccgctcattaaagacttcgtattggtggttacaacatggaatgaaagagagatgggatcacagagagcatctcctttagccctgttggatttgaatattttcatccctgaaaagaaggtctctttcttcttgcctctcaaccaacatcttctgggcctcctcttgtcctgcacctcatcatcagactactgtcctcccaaaagaacctgagtcacaccatccacactgtctgtgttcacagtgagcacatagagctccatgtctgacactgcaacattactttttttttttttttaagagacagggatggctttgttgcccaggctgcagtgtagtggctcactacagctttgaactcctgggctcaagcaatcctcccaggctaatt

SEQ ID NO: 587483 - DNA, 4001 bp, Homo sapiens
aactatttaaaatcttcccttaatttctatttcatgtggtaggacacgtgggtgggatacttcagtagaaaaggacttcatgaagttcatttgctggtggaaactcttggcatgagagactcagaacaaaaaaaaatgtctttccttcaacaagcatattttttcttaacaataataatggcaaacatttattagagcttaccataggctacgcattactctaaacaatctacatatgttgtctcatttaatcctcacactgtcctccaaggtagaaaacattattcttgttttacaagtttcattatgtattttaaagatgaagacactgaggcaaagagttcagtggagctgggattcaaaatgatggagtctcactccaggatccatgctcctaaccactatgtttataatagcagttcctgaaaaccctattaaaacagatgccattaaattataagctttttaactttttttttttttaccgtctattacagatcactaatatgatttcaagtaatgatgaacctaaatacaaaggcactaaaacaaggaatacaacacaggaaagaaaactccaatccatcttaaaagaccacatgtgtttccctatttgttttgcttataagtgtggacaaatttgatccagaaaggacattttaaaaaatggcaaactgagggctgagagtcagaaataagttgtactctaaggacttacagataatcacagattcctcatgggaaaggtaaacacgtaaagacgaggagaaaacagaatatgaaagagtaaacgtcttttctgattagggccggatggtaaggatttggaggcagcaagagacagcttcataagggaagaaatggttctctagattctttagtcttcaaaatgagtttgaataggcccaaggacagaggtggaatctaattgagaaaaaggtcaaattgagcttactgtgaggggaaggatgcaaaattagtgtctgctgcaagaaaaataagcatggaaagaaattaagggaggagacagagacagagccagagccacagaccaggagtagggaaaaaaaggtaagcagcagacggggcagagtggcctggaggaatgaggggtcacacctagcaggtgcccaccggcgaagaggcaaggaccgagcccggagggcaaacgccggcaggagtcgtccccgaaacaccttgcccagcgaggcggacacaagctcgggcctgcaagacggcccaggagggtgggggcgggaaggggtcgcagaaggtgggcaggggaagcggctgaggacgcgcggtgcacctgtgggcggcccccgtgcccacccgactcgcccgcagctccctgaatgaaccctccacacccgccggccgcccccagaccccacctgacgcgcccgcggcccatcgtccctacctgacgcgcccgcggacccagacttcagcagacgcgcacgcggcaatcccgtccccacctgacgcgcccgcgacaaccccgtccccacctgacgcgcccgaggcccccggtccccacctgaccctcccacaggccccgtccccacctgacgcgctcgcgaccccatgtcttcccctgacgcgcccgccgcccccggtcttcacctgactcgcccgtggcccgtcgtccccacctgacgcgcccgcgagccccaatcttcacctaacgcgcctgcggcgccaagtcttcacctgacgcgcccgctgcaccccgcacctacctagcgcgcctgcggcccccagtcttcacctgacgcgcccgcgtcccccagtgcccaacgggcgcgccggccacctgggcccgcacctgacggcgaccaggcggttattgccggaagtgggccgccgcctcccggcgcgcctcagggaagccccgcccctggccatgctgattggccggcgcggatccgcgtggcaatgttgctgcctggtcctgtcgcccgcagcgtgcgcctgcgtagtaggcactgcccctccgtccgcgcgcgtccagagtgccgggcgtggaggcgtgggggcgtgggggcgtggggtggggctcgggtgcgcagggacgggcgcggtcagtgcctgagatccctgcgatcgctgggagatgacggtgaagacctgagatttaggcctgcgcggcgggtgacgacgccggtccgggtcttcacgggaggacgctggccggggccttcaggtgttctcgtggcctgaggacgcgcgtccctgagaatgtgcgtgcccgcgccgcgcgggtcccacaggagcctgggcagccccgccgccgcatttccaccctgcggccgtatttccacccgctgggcgccaagcccgggatgactgcactctagggcatcactgcgcgctcacactcagcattcgggcacaagcacgttctctttataaacagtttcgaatcttgtcgaatctttctagaaggttgaaatgccctggaggagcagcgtgaatagttttttccaattaggaaaaaagaatgtggggcggctggagggagagaggcaggccgagaaggccaggtgggtccaggagccgcagcccccgtgcctcagtttccgcctagaaacatggaggtggcggtgcacgctacaggatttccataagaacaaatgagttagcgtgtgcaaaacatttaaaacagtgtctggtgtgtagcaagcaaatatgagtattagtcttttccttgttaaaatgtgtgcatctacatgtggtgcacattacaggaagtgtatagtatggattcatattttggaaaagtaattttagaagttatttctgaagtgcttattataatagtgtttcttgaccacatgcttttaaataatgtgaaggcaatgaagtaggcaatattgcttgcacatccccaatttaaacacctgtctgtccctccttccctctctccgttcttttcttcctttccctctctctttattccttccttcattcccttcaaggttgcggattattctattatataaatgtatcaatttattagaatagtttctatgatgtctatgataggttttaaattgtttgcaatagtttgccattataaataatgcccagtagcgctgtggtctgatttaacttgtgaaggtatatttccaaataaatcgctatgattggattgttgtgtaaagcaaaaagtgtctgaggcagatcacaactgatttagaggtttattctgccaaaatcgtggacgtgtctggggaaaaagaaacacaggttacagtaggatttttggcctgtacttttttccaaatatttaagggaaaagcgccggtaggaggggaaagaggggagagtaggctatgaggcaagtggtcacatttttgtgaggctctgattagagtacagcaaatctacatttcacatgtgaaaagaaaggtatgggggagggttatgcatctgtctcatactcagtagatctacatttcacataagataaagtaagcttttgggaacaaaaagaagactgcgtgtgtgtgtgtgtgtgtgtgtgtgtgtgtgtgtgtgtgttttgccaatattaacttttccctttggcatagtaagtttggaggcctgaaattttatttttctttcactgatgtgtcaaggttaactgcatatggaatactagtagaaattgccaagccaagaccccaccaccacaatgggggacatagtaatattaaatttagcccaattggctagcatcctcacaattcctagtgaaagaattcctggatggatggtaaagaggtaaacaaactgcagaaactcacaaagcaacaaaagaagtccacagagtaagagcaggaattcagagagtaaccacagagagatccacagagtaacagcagaacccacagtgtaacatcagagcccacagagtaacagcaggacccacagaataatagcaggcacccacagagtaacatcagaacccatagtgtgatagcagagcccaaagagtaacagcagagcccaca

SEQ ID NO: 587484 - DNA, 4001 bp, Homo sapiens
accctttcggcacttttctagaaagaacctgaacttgtatacagaaataaagtaccaacatattagatcattgtccttaggaacaaggaggaaggaaggaaggttcccattttgttgagggagaataatttaggcataattggtaactccagtcgataaaagacatagtctgtcaatagcagttggtcttactttcccgtaaataaattacttgattttacgtaaataagatttccttatggtggtccctaaactcccctgggacagcctccaagtaactccaacgtaaatggttatatgctggtggttaatacgctcaagtctctccggacagacccccagaattaaataatgtctttctttacattgtgagacaatgggaatttgatgcattacaaatcacaaacaaatgggaggcacgggagttcaagttgccaaaataaccacattttcttgatagttttctcaaaatttattgccaatgcttcatccaagcaacgactggtaaatctcagtaagcgggaacctggcccagaaacagaattctccattgaagtcaatttaagggtgcaggggcccatggttttaaccaaaggtggcaggaaaaggctcccaagggtgactctggctgcaccagtccattctggaatcactttcatcgcccccgctcaccgggctaaatgctgagagtctctgaaagtcaactgtcgaggtcaggggctgagaaattccaggctaccttgcgtactagccggcgctggcatcgttagccaagctgagcagggagcgcagcggacctcaggtttcccgccagaccacagagctcaggtgaggcctcgaatccagaggctcaccggggccaggcaggcttttcgcagctgacaggcacccctggaaacggagtgcactctatacaaagcagaccgaccgagagggccaccgaggaaacaggtgcaagagccctgtcctcccagaagcagagctcttgtgggattcatcccctgcccccttccctcctttgcacctctgcagccccaagcctccaccgctcgcaagtccgcccagtaagcggctgccccagggaccatctggccgtcccttcctggttactcatcctcccggccacttcgtggttgcccgtgcctgggcagggcctggaagcgctccaggcgggaccttcgtcggatcccgtcacctgtcgcgtccacagcgcttgggcgctgggagccgggccaccccgcggtgaaggggctcagcccacccgcccgcgcccccacatgggcaaagtgcgcgactccggtgtccttaaagcagggaccactaaagctgtgtgattaagtttgagcgaacgtttggggacacgatccgcgaatgtcatcagactctcagagggaccaggtgttctgtaaggagtcgtgtccacttggagacactgaccttgaacaataagagaaaccgaattccctgtctccggtggtccgaagacctctgcagaaatcgggccccgtagtcccaccctccgggtcagggtctccctcctcagcccgctccagccctgcctgcccctcattcgccgtccctgcgccccccagaccagcccgggtcagtttcgcgggggctggaagttggtagcgggtcccctcacctgctgaggtcgctcacgaaactgccgctcttctcatccaggaagcgcttccagccgtcggccgtcttcacccagttctgcccgggggaccgccagtcctgcccgaggaatggcatggcaccgcgagcggactagacggatggggagacggggccggcctggtgggctcggggacgtgccacccggggcggatgctcggggtgcaggggcccgcgacgggggcggcggggcggcgggaacggcgcggggcaccctgcggggtggcgggcgcggagaggatctcaagcgttgcaggctccgggagtgctgcgcggcagtagctgccgcagtatttatccccgcagccggccgcagctctttgttgccggaagagccgcccgctcttagcccggccccccggcccggaggccacgtggctttgtttatgggctcggcttgttttccgaggcgcctgcggctcacgctcccctcccggttgcacaaccgcgccggtggaaacttgaagcggtgctgccgggccgggtaccccgccgcccctggcacctccgcgcgccctccccgcccccaggacaccgttgtcccagagcgaggcccggcgcttggaaagatgcgccccggtctcctgcagctcccgggctgacggggtgcagggagggggccggaggggcgtctgggtccctgcggggtgggcgtgaggagcagggccagcccccctcctgcccccgagctatcaggatcgacctccgcagccagatcagcctcccgggccgtccgcagagctggggccggcaccgcgcccgccgggcggggagtagggggcgcagcctcctgacctcgctcactgccccaaccccgccctagcgcgcgggggttggagcggggaggagggacagcctcccagccctccgggccccttagctgtcactaaccagtcctccttcagacctgcccctggggcagcaaaggaggggaaggagaggaagccctgggaggtatctggctcccgcaggttgggagtggagaaaaagaacagcgcccctatcctacccgaaccctctaagagacgggttaaatgatgtacccagggccaatgctacagtacaatctgaaactaccctgtttgcttttactttttgctgttgttacaacaatctacccctgtctgcagtgggaactccatgagagctggtctgtcttgttccggaggcatttcagcccctgcaccctgccaggcccagtgcaggccttcaacaactatttgtgtgaataagtgaatggatacgggaggctgctggcatgagggtggcttcttgcccttcatcacctctagttatgatgctttacagcctggtctatttggcaattagtttgcacaggacagcagcagcagagtaaaaatcccatactcaagcattagcttcaaacttcattcttccattcttctttctctgcagccatcaatatcatctagtccactgactcggtgtaatctttaaggctcaggcaaagaaattgtgtgtgccctatgaggctacatgttggactgggaagacgtttttaataaagtttgttttcaagaagccagagctttctgatttagatttcccaccgtaaataatttattagtgtagtaatagtaaaaaaaaagcttgtaaaaacattgaagaagtcccaaacaaatgttaaacactgtgatggtgctaacaaatgaggcagtgttgggtctggtctctgttggagggaattggtatctgcataattaagggatgtgattattattattattatttttgagacagggtctcattgtgtcactcaggctagagtgagtgatcatggctcactgtagcctcagcctccccagctcaagccatcctcccacctcggccccagtctccagtagctgagactacaggcactcaccactgcaccaggctaattttttatattttttgtagagatagggttttgctatcttgcccaggctagtcttaaactcctgggctcaagtgatcctccttccttggcctcccaaagtgttgggattacaggcgtgagccaccatgcccgcctgggatgtgattatgaacaatgtgggttagttatgtattagtaagctggctacatacctgtagagaccacagagggccagaaggtagaagttttgaattctaattctgctggagcagcatactacctgtcctcccttggatgaatgacttaaactcttagggccccatttacttaactgtcaagaaaaaatggagccaataatgcctacctttcaggatggtttaaaagctgtggtagattgaattattagtacccattcttccctcctttccagtagcgtcat

SEQ ID NO: 587485 - DNA, 4001 bp, Homo sapiens
gagcttagccgaagagtgaatagatctgctcatgtggtcacaggctcagctcacagctcctaacctgcttcttgcaggcctgcgtttttatcaggtcactttggacagccaagcctgcatctgcccagatgacaggtgaaggatccaggcctcaaggggccttgaatgtcatcaccctggctgagcctctgcaatcatctgactcagtgacatggcaccgagaagcacaacaacccaggaaaaagaaaataaaaaccaaaccaaccacacccacagggggaaaattccctcctacttctaagcctaaaacccaaacagctgctacctcccaggttgactgctgacaaaaatacacaagggagctttggagggcaggcagggagaacaaaataataaaccaattagaaataataatgtgacagtcatggttaagctgatttgctttactaccttcatcattaatattttgctcattaactttttcttttttgagacagagtctcgcactgtcgcccaggctggagtgcaatggcgccatctcgctcactgcaacctccgcctcctggattcaagcgattctcctgcctcagcctcccgagtagctgggattacaggcgcccaccaccacacctggataatttttttttgtatttttagtagagacggggtttcactatgttggccaggctgggctcgaactcctgacctcatgatctgcttgtcttagcctcccaaagtgctgggattacaggcgtgagccaatgcacccagcctttttttttttttctcaaaatacggtttaaaatggaaagcaacagatccagtcagatttttttttttttttttttttttttacatggagtctcactcctgttgcccaggctggagtgcaatggcgcaatctcagctcactgcaatgtctgcctcccgggttcaagcgattctcctgcctcagcctcccaagtagctgggattacaggcacccgccaccacgcctggctaattttcttgtatttttagtagagacaggatttcatcatgttgtccaggctggtctcaaactcctgacctcaggtgatccgcccgctttggcctcccaaagtgctgggattacaggtgtgagccaccgcacccggccaaaacaggcagttttaagctttaggtggacatgggactgaatactgttatcacatgggggtggaagggaaccacaggcacaaaacacggaggtgctttaattcatccagttttgtggcctcatctgagaatgccttgggggtcccccagagtcagctgaagtaggacaagagggagacagtgagaacagtcagagatacagggttttgaaacagtccaaagtgctttagggcttgcttcctgctgaattctctcttgctaaggctgttgccagggccagcgttgcctgtgacatgttcccacgtatccacagggtgggctcggaaggggcctggtgtgaaatttcacttgaagagaatggctctttaaccgactcactggggtattatggcggcccctgcccatcctggccaatctcagggacatcctagtaggactcacttaagaacttgaagtacgttggggaagaaggagattgaggggtctgttttctgcttgcctcaaaattcttagggtcctaaaaagtaattttttggggaaactacttcaagacaacccaaagagatgattcaacttgggaaagagcctggatgagcctttaggcacttgagacttacccggaccacgtagttaaatcttctggaatccagaatggcagttgagaagtccagtctgttgaaagcttcccccagggtgcaatatccatggcgctgaacatgaaaacaaaggcacagaagttactcctgccatgcagaggtcacccaagtaagaatgagccagttagaacaacccaactggattttgccgaatgagcttgatgcctgtcttaggtgacctggggcactggcttctttcctgtacccacaagcccttgagagccaccaagatgggtaacacagccagcagctgcctcagtcagcccctcacatgtcaaacacccccttttcgtgacttgtaccatttgggaccttgcttataatttttccacatattagtctggaaaaatcataagtaattgcttattaaggaaagactgggagcagggtacgggacatgggaggccatgatggttggtgactgtaacgtactcctgggaggagaattagacctacctgcaccaactgtgtcaccaccttgccttataccaatagtgcttttctcactgtgatcatcagaagtgtttataaggttttgggaggaagcaaaagttttgatcttttaacctatgaacacagagggaattgggagtataaagtcccagctctgctctgagtatctgggtggtcttgggaatatcagtgacccccctctggacctcaaatcacagaggggactagatgttcactgaggtccctgacggtcatagaaattctttcatattgcctgtatcctagttattttagcaaatgcctgtgcagagagaaaatatacataaaagggctttataaagtaccatacaaatgtagttattacaatgtcttgtcccctcccacatcacactgagcaggcactgaaaacttctactatatttagtgattagcgcttccaggactgaaatttaactgagttgaagtccaaagagatcttagaacaaaagggagaccttgccctgaggcaaaacccagggcaatataataatatggttgagatgggcatgtcaatctttataaagcacttttacatacataatctcattgaacgactagagggtccacctagtgacttttgcttctttctctctctgttctaaactctgatggttggctaaataatagactaatagctgccatctcccacatccaagaagactctcatgatccgaagtaatttccctccctaccatatccctccctgcgctatcaggaagggataaggttcagtataacttagtaaatgaatgggatgctcacctctttagtacttcctttgtgaacatagatccatttttcttggtggaaatctacagagacaaaaagaatacacagctttaacatctgcaacatgctcaagatttaagacatttcatttcatttattccaaagttttaaaagttttgacaaaaaagataaggagtctactgacaactgaagaagtttcaagtgcttaatttctgcagtgtagaaatactggggctataagttgctttgtctgaagcactctaaatctttgagagccagatttcatataccaaagctccaaactactatatttttttttctaaagcattatgccataagaaattacaggccagatgcagtggctcatgcctgaaatcccagcactgtgggaggttgaggcaggcggatcactagaggtcaggagttcgagaccagcctggccaacatggtgaaaccccgtctcttctaaaaattcaaaaattagccaggcgtggtggcaggcacctgtaatcccagctacttgggaggctgaggtaggagaatcacttgaacccgggaggcagaggttgcagtgagccaagattgtgccactgcactccagcctgggcgacagagcgagactccgtccccccgcaaaaatgaaattaggctttgacagactgagttacatgctgtgaacagagcggggtagatcgcttgagccctggagtttgagaccagcctgggcaacatggcgaaaccctgtctctactaaaaacacaaaaattagccgggtatggtggcaggtgcttgtaatcccagctactcaggaggctgaggcacgagaatcacttaaacccaagaggcggaggttgcagtgagctaagatcatgccactgactccagcctgggtgagagagcaagactctgtctcaaaaaacaaaaacaaacaaacaaaaaacaccaaaaaaaaaaaaaacaccccta

SEQ ID NO: 587486 - DNA, 4001 bp, Homo sapiens
accaattttcctgtatcagcttccccactgactgggattacaggcgcccacgaccacgcccggctaatttgtgtatttttagtagagacgggctttcgccatgttggccaggctggtctcgaactcctgacctcaggtgatccacccaaccttggcctcccaaagtgctgggattacaggcaatagccaacgcgcccggcaggtcacggtccttttaaaaggttatggcaattgtactgctacttcaccactaggtgtctcacaatgctagaatttgggaaactcagaggcaaattgttaaaaacaaagtggggaatgcagatattatctctttcctctaaaatgttatccaaaaatctattctggccggtggctcacgcctgtaatcccagcactttaggaggccgcggcgggagaaatgcttgagtccaggagtttaagaccagcctgggtaacatagtgagaccccatctcttaaaaaaaaaattgtttctgttcatctacacacttgaagttgcctccaacgtcctttctctgctagcattttcatctttctactaccccaagacgttggtctcaaacgtggttcttcgcaactgaattttaaaattattcatgtaaaatcatggactgtctgttgtattttatggactcaacagttcacggataaatcaatcaagcctcttcgatattcatttttaaaaactaggcttctgataaaaggctgagaaaacttattcctaaagtgttctttaagaaaaaaaaaaaaaaaagcagcggccgggcgcggtggctcacgcccgtaatcccagcactttgggaggccggggcgggcggatcacgaggtcaggagagcgagaccaacctggctaacacggtgaaaccccgtctccactaaaaatacaaaaaaattatccgggcgtggtggcgggcgcctgtagtcccagctactcgggaggctgaggcaggagaatggcgtgaacccgggaggtggagcttgcagtgagccgagatcgcgccactgcactccagcctgggcgacagagcgactccgtctcaaaaaaaaaaaaagaaagaaaaaagaaaaagaaaaaaaagaaaaagcacctaccacatcagagaatgaagtacttacattaaacccaaatgttcttcatttgttaaagtggaaactcttaccatcagtaaatcttgagctcttagatgtcaaagttacgtaggcttccaaacaagaaattctctcatctttgtctttaaaactcatgccaaaataatgccacttaaagaggaaaactttagtttgcacaattaattgaaaggtgcagcagcatcatgattgctcaaagtcgaagggtacacagggtgcatgccgcagggattattcctaacacttgagaaggtctaaatcattttgaatttccttcagccctccagaaaatagttatcttaatatccttgttttctccagctggacttagacatgagtaaacttcccaaattcgggttcctgaaaaggcagcgtgtgctgcagcctggcactgactcccccgaggagctatggcgggcgggtgggtaacggtctcaccagggcgtcaaagatccgctaggcccagaaagccaagggcagcaggggatgggctggcgtcaccaggagcggaggagtgagggctgccgcgcgcctccctaggcccagcacctggaagacacagggcgacgcggggccgggccgccgggagacccgctaacgggcactcgcctggggtcccgccgcctgcctggaggccgcggggccgggcgaggcgccgaagcggacaggtgggagaggagccgggcagcagccgctggatgggccggggagaagcctcggcctcgccccctgggatgcgggctatggcaacccccacgccagcttcgcgtggggccgctgcctttacctccttaggtttgaacggcccgcccggggtaaccgctaagcgcagccccgccccgcgccgcgctgtcccgccccttcctccggctctgcagcgctcccgcccggccgcccgcaggcctgggtcctcgcttgagcgggaggagcgccccctctctcgctcacccctgcacccgtcccgaggcgggtcagaaaggctctgcttctccccattcccactttgggaagcattaccgtatttaggaatgctaacgtggcctacagtgggatgccattagaaatcatgtatgagaatgttcccttggaaatgattctccaaactgtcaagtgcaaaaagcaagttacaaactgaccccttttaggttaaaaatatggatatacacaggatgaggtctgaaaggtatgaataacttggatacggtaaatttgtacaggattatgtttgctttttagttctttttatctgtgttttcttctcatgtttcaacaatgaatatatacagattttgtgataaaaaagctgagccgggcctggtggctcacatctgtaatcccagcacagaggtgggaggatcacttgagccaaggaatttgagaccagcctgggcaacatagtgagacccccatctcaaaaaaaagatttttaaaaaatctattcataaaaaccagagtgaaatgtgttcattgtttacaaacatccatttttgggcatcatgaactcccaagtaccctcaaagccaaataaattttttaaaccctaattttttcattcaataaatatttactgggcgtctattatatgccagggacactcctgctgctcttggcagcttcttcctagtctcctttttctggcttcttttccttggcctactccctaaatgagaggtcctacctcagcatttttattagtttatcatcccatgcttatgtaattcttattcagaacttcaaccatcacttttaagccaataacaggcactaccaccactcttctctgactggacatttctccaactggatgtccctcagtcatccaaaaccaaactcactaaaattattatgagacagggtctcgctctgtcacgcacgctggagtgccgtggtgcaatcttggctcactgcaacctccacctcccaggttcaaacgattctcctgcctcagcctcccgagtagctgggatgacaggcacccgccaccacgcctagctaatttttgtattttcagtagagacggagttttgccaggttggccaggctggtctcgaactcctgacctcaggtgatccacctgcctcagcctcccaaagtgctgagattacaggcatgagccactgtgcccgtccactaacagttattaaattccaactatgtgccaattactgtgctaggtactgggaatacagagctgacacagccacagttactgctgttaaggagctcattggtatagagcaagtgctgtaacagaggaacagtagcagcacaaaggaaagaagaaccagctaactctactggagaacagagtgcatgagatagattttgatgtacaagtggcaatttaaaaggcagacagcaggaaattccaaacttaaaatgtataagggcaggaaaatttcaaactcaaaacaaaatgtgcaagagcagttgggcacatggagaagctgcaaataatttgttataggcagaaactaagagttgttagaggaaaggattagagaaaattcctgagaagtgaagaagctaagtcttgggaagttctggttgcaccttcagagtttgaagagcattttagaaagtccactctggtggcagaatggaggacagaatgaagagaggcaagggtggctgctaggagaccagtaggaagctactgcatttctccagaaggcagtggggggtggagcagaaccaagatgtgacatgttcagttggcagaatcaactgcatggggcaaggagtgagggaatgaagagtataggcttgggagaaaataagatgcatttagtgtgaggttgttaagtttgaggtacctgtaggactgtaaagaattaatgaattacacattctt

SEQ ID NO: 587487 - DNA, 4001 bp, Homo sapiens
gatcttcccatctcagcttccctagtagctgtgattatctgttctttaaatgcaacaaacattggctgaacatctacaatgtggcaggagacatgggaaaaaacaaagatgagtaagataaggttccacacccaaggagcttacaatgcagaggaagaaacagacatgttatgtgatggtgctatttgttagagagcccctaatccagctccctcagtctgacttaggtgtccacttggaagctgaacatacgaatggataacagccagacactatataacagaaccatggcttaaacaaccgctgctgcaggcagtccaaggaactcaaaatgagatagaaggcgagattcgactccagaggtggggttcagacagccgaccaaattgaggactagctaaaacagggaggggccgaagcagccgtccttaagacacgcccaccagtttgccatgtcagtttaccattgccatcgcaacacccaggatttaccacccctttccatggcaatgacccaacaacccagaagttactacccttttcctacagatgtcttcagaaactgtcctttaatctgcgtgcaattaaaagtagatatagatctgactgcacaactgccctgagctgctttcagcacactgcctgcggagcagccctactctgcaggaaaagtcacggagctgtcacactgcctctttaatgaagttgttttcttccaccttaccactggctcacccttgaattctttcctgggtaaagccaggaaccctcatgggctaaggcccaatttggggcttgcctgtcctgcaagaaaaccacaacctcagcagcaatcagccccaaatggtcaggactcttgcaactcagaatcaaccacagaaaaacaaataggctcctcaaaccaatcactgaagacacctacctctatcagctgcttccaacttccccaggccagaagcctccaatcagagcactgctgcagccttccccttttccaccgtaaagcttcccactcccctgcctgcctcggagtgtccactaagtacaaaactcccttactacagcaagctccgaatcaagaaccttatttgtttgtgttcattgggctgatctttactttcacagacctcagtacttctaccatgttcagtggttcctcccaacctgaactttctgtattctaataatctcttgtctgtttcgccacctcacagtggccccctcaagcacaagggctgggcctacacagtatctggcggagtgtttacagcgtaatcagatcagtcctagaaagctcagaacacaaacagtccagtcacttaacccccatcctcacacagcactttttccattaacagaaacactttacatactcccattacagtaggatttggctttgtattttgtttagccttgtattgccaaatcctagcatttaggaggcatttaagaaatatttatgaaatgtctaaagccactgtgaaaatctatgttaaatcccccgtttttcacaatgtcagttatcacaaaaccccaactcatgaactaaaccaatctttcaccttagagtctgtcgagtccaagtgtgtccggaattggttggttcttggtctcactgacttcaggaatgaaaccgcccaccctcgcggtgagtgttacagttcttaaaggcggcgtgtccggagtctgttccttctgatgttcagatgtgttcggagtttcttccttctggtgggttcgtggtctcgctggctcaggagtgaagctgcagaccgtcacagcgagtattacagctcttaagtcggcgcgtctggagttgtttgtttctcccagtgggttcgttgtcttactggcttcaggagtgaagctgcaaacctaccctgtgagtgttacagctcataaaggcagtgcagaccgaaacagacaagtattaaaatttattgcaaacaacaaagcttcccaagcgttgtaaagcaaacccagcgtgttgccaccgttttttttaaggcagcccgcttttatgctcttatctggccccacccacaccctgctgattggtccattttacagaaagccgattggtctgttttacagagagctgatttgtccgttttgacagggtgctgattggtgcggttacaatccctgagctagacataaaaggtctccacctccccactagattagctagatacagagtgtccattggtgtatttacaaactctgagctagacacagggtgctgattggtgtgtttacaaaccttgagctagatacagagtgctgattggtgtatttacaatcccttagctagacataaatattctccaagtccccaccagactcaggagcccagctggcttcacccagtggatcccgcgcagggccgcaggtggagctgcctgccactcccgtgccatccgcccgcactcctcagctcttgggcggtcgacgggactgggcgccgtggaacagggggtggcgctcgtcggggaggcttgggccgcgcaggagcccacggcggcggcgcgggggaggctcaggcatggcgggctgcaggtcccgagccctgccccgcggggaggcagctaaggcctgttgagaaatcaagcacggcggctgctggcccaggtgctaagcccctcactgccctggccggcggggccggccgcccgctccaagtgcggcccgccgagcccacgcccacccggaacttgcgctggcccgcaagcgccgcgcgcagccctggttcccgccagtgcctctcactccacacctccccgcaagccgagggagccggctccggactaggccagcccagagaagggctcccacggtgcagcggtgggctgaagggctcctcaagcgcggccagaatgggcgccgaggccgaggaggcaccgagagcgagcaagggctgcagggctgccagcatgctgccgcctctcacacgtatcccgcctctccttactaagatggaagcctagattcacccccgaccccccatatttccgtgccctccttcacagtcctgtcaagcgaaaacctctcctccttccaggcaacaggcacaggcacaaaaggcataaccgccactggtcacactccaccctgctgtctctgtaccatctcctctctttcagtccacttacaacatatcgtgcctacctccttttatgtatttatttaaaatttttatttttttatttttgagacaaggtcttactctgtcacccagactggagtacagtgacatcatctcggctcactgcagccttgacctcctgggctcaagtgatccttccacctcaacctccctagtagctgggactacaggtatgcatcaccatgcctggctaatttttgtattttttgtagagatggggtctcgctatgttgcccaggctggtctcgaactcccggggtcaagcaatcctcctgcctcagcctcccaaagtgctgggattacaggcgtgagccactgcaccaggccctacctccttttggaaccaacctgaaacccactgaggacctactgccagggtgaattagatctcactcactgggagagaagcatgggagtgtgggttgttacctgcccacattcccccttccccacctcttccatgaggaacatgttccatggagttccaacggcaccaaccacaacacttagtctcaactgttaggtactagtattttcccaattattagttttttccgtaagtcactgcagtcagagacactatgagcaaagctgctccagagatcctcctaaggcagggatgaaggtcattctttcatgtttcactctataaactttgtattgtgtgactcttttgacgtctgtaattttaaaaaaataatgtttctccttgtcccttaggtctcccaccatccttaccctgacaaacgtccatgtccattgtggggtaatccaacatccaatgtctccattttttatcctaagccactggatgctgtcagggaaagtcaggaaa

SEQ ID NO: 587488 - DNA, 4001 bp, Homo sapiens
aaaaaaaaaaagagaaactaagataatgttaagtgaagggaaatgtatttttccaatttatttcccctaattaaaggttcaggtatttttttaacggctcatggggatgtaaaaactgcccagaaagactacaactaacataacaaatactgcaccatattatcagagctagaatagctcaagtctcgcttttaaaaaaactcaaaatgtacaaaaacagtatactgtgaagtctttctctacccacttaccatgaccacccactttccctcccaacaggaaaccaatgctaccattttctctaacagtctttctgtagaaaggaaagagacatagaggaatgaagtctggacccaaatgaggtctgactgcactcagatcccttgccctgctagtatcttcctctgcagtgcttttctccacgtgaaaaactgtacattcgctttcttaaattgtctctcttccactaaaaagtaagttttataaaatcaaggtcttcacctagcttgttcactgttgtacctccagcacctagaacactatctgatatacaactggtcgtcaaatatttgttaaataaatgaatgctatatctaaatataaaaagtgacatctgccatatcaaataatagaagttattctgtagcaaaataattcaaataatgtagcaccggcaaagaaaagatgaagaaaactgaatgttctacaaatagactgaaggatgtacctgtattaaagatagcacgtgaaaaataacaccaaatgagggtgtagtctactggggacaaaaaccagaaatttattttctagtgtgtttactgaagcacatggacactgaaagaaagactccgatgttcaggcacctatcaagcctcggcctgagtcacatttgctactgtcctgttggcccaaaaaagttacagaaatcagccaggctggtccagaccagaagaacttggctgaatttgtctattcattcaataatcgcgtacgaataattttcttgttggaataaaaacacctcctatgcattcattaaacaaatagtacaggcatgaggcagataaaaatctaagtaaaaccaagttctgaccttccaccaaccacctagctaatccatagacgttagataactcattggaacttggaagcgtagataggcgattttaaaactcaggaagcaccgaggatgaagcgatggaaggcagcaaggcggggagagctccggaagaggtggtgaaactggaggagtcagacttcattccagaaacggccttcatgtgatgttatctgcatagttcattccgcttaccaaaaaactcactcgtcctctcccgcgtaacccacccacattgcctcagatgtgtaaccctcgggttaaaataccggtaagcgccgatgctcacggaggggacgaaacggggagcgcaaccaccgggaaccacgcaaaagtcgctcatgcccagggcggcttgcgggggcagggacaggtcagccaggacggccgcgtccacccgggccctacagggggaaggctcgaggaaagggggacgggaacacccaggcgtcggccctgctcgccgcgccccttgccccagatccgggcccggccgctcaggccctgaggccggcccagcgagctccttccccgccccgggcaagcagggaggctcggcccacctggtccatcttgggcatcaccttccgcttgcccccgatccggaagcgcaccaggttgtagaactcttcggggtggccaaggcatttcacgaactccatcctggcgcaggcggcggactcccgggcgcgactctcacctctgcggtccccaggcgctcaccggccggctggacctgtggagtaggtgcttcgaggggctggccggacagggggcaggcctagtacggcgacgccccgcccgccgctccgcccacttcaaccggcctcggccgccagcggggctagctgcggcctcgtggggtgggctgacgggcgctgattggccagggccgctcacactaggaagaccccggccaatcagtcgcggaaggagactggcgtgataacactctagaagctcattggaggccgagaaagaggccgacgagcgggattggtgccctgatggagccgggcctttgttttcttccgcttaccccggctgggagcgcgaacgctgtggggactggaggtgaggcggtggggcttaggatgcgcaggagcccaacggtggtccgcagtcgggagagcagtgcggggctgcttcctccccacttggtcaataagtcgcccacgtgtccggcctcggtggctcctgccagccgggtgagctctgcagccgctctctgtagagcctaaaaccgtgaaaaggccgggccagcgccaagctgggcgtctttactgtaacacacccgagcacagcccagctcgcctgcccgccaccgccatccagccccagggagccccacacactcctggagcttcagctgccccctctctagtgtttacttgagatccagcttagtcctagaaaaaggagctgaagccttagagagcctgtaacaggaatgtggaaacttctctcatcctagatctctccagccctagaaactactggctacccgtccaggcgtggtggctcacgcctgtaatcgcaacactttgggaggccaaggcgggtggatcacgaggtcaagagatcgagaccatcctggccaacatggtgaaacccgtctctactaaaaatacaaaaaagccgagtgtggtggtgggcgcctgtagtcccaactactccggaggctgaggcaggagaatcacttgaacccgggaagcggagtttgcagtgagccaagatgacaccgctgcactccagccaggccaacagagcaagactacgtctccaaaaaaaaaaaaaaacctactggctacctaagccatcctgcagtctgttttaacacagcaaccagtaatccttttaaaacctgtcaggtctagccgagcgcggtggctcatgcctgtaatcccagcactttgggaggccaaggcgggcggatcacctgaggtctggagttcaagaccagcctggccaacatgctgaaactgcgtctctactaaaaatacaaaaattagccaggcatggtggcaggcgcctataatcccagctacctgggaggctgaggcaggagaatcgcttgaacacaggaggcagaggttgcagtgagctgagatcgcgctattgcactccagcctgggggacaagagcgagacttcatctcaaaaacaaacaggaaacctgtcaggtacgttcactgcccaaagctgttcagtgtctctccaacaaaagccaaagcacctatagggatcctgagaggctgcagccttccacccagattacctctctggcctccatctcttatgcttttgctttctctggccctaggactttttgtctagctgttcactattcctgcactatcccccagatactggcttgactaactcctgtgcccctcgagtctgctcacacctcatctagacccacctgtttgccctctctcacatttccaccactgctaatcccagtgggggtctacttgcctatatttaccatattctaatacatcatttacttatgtattagattacagagtgtttcccctactactgtaaactaaaaatcctaagtccctaccactggacagccctcccactccccacctcggccaagggaaccccagaaaaatcttaaaaacttagtttccagccatgacggtataaaaagtaaagtagaggttcctcttcaaagactttcctccccatttaattaggaataaatagtaacttctcttagaagcaaactttattcaaagacctgtgctaacattcttaaatatctgctagctatgataaagaaatcaatgtacttcatgttcttagctctcacaatttagcctaaatatttgccctggcatgcttatagtggtccaagaaagcattaggtc

SEQ ID NO: 587489 - DNA, 4001 bp, Homo sapiens
tactcgggatcaggaagccgaggtgggaggatggcttcagccaaggaagtcaaaactggagtgagtcatgttcaggccacagcattctagcctggacgatggagtgagacccccccctcaaaaaaaaaaaaaaaaaggccgggtgcagtggctcacgcctgtaatcctagcactttgggagaccaaggcgagcagatcacttgaggtcaagagttcaaaaccagcctcaccaacatggtgaaaccccgtctctactaaaaataccaaaaaatcagccgggcgtagtggcaggtgcctgtaatcccagctactcagcaggctgaggcaggagaattgcttgaacccaggaggcggaggctgcatctagctgaggtcccgccaccactgcactccagcctgggtaacagagcaagactccatctcaaaaaaaaaaaaaaaaaaaaagagaaactaagataatgttaagtgaagggaaatgtatttttccaatttatttcccctaattaaaggttcaggtatttttttaacggctcatggggatgtaaaaactgcccagaaagactacaactaacataacaaatactgcaccatattatcagagctagaatagctcaagtctcgcttttaaaaaaactcaaaatgtacaaaaacagtatactgtgaagtctttctctacccacttaccatgaccacccactttccctcccaacaggaaaccaatgctaccattttctctaacagtctttctgtagaaaggaaagagacatagaggaatgaagtctggacccaaatgaggtctgactgcactcagatcccttgccctgctagtatcttcctctgcagtgcttttctccacgtgaaaaactgtacattcgctttcttaaattgtctctcttccactaaaaagtaagttttataaaatcaaggtcttcacctagcttgttcactgttgtacctccagcacctagaacactatctgatatacaactggtcgtcaaatatttgttaaataaatgaatgctatatctaaatataaaaagtgacatctgccatatcaaataatagaagttattctgtagcaaaataattcaaataatgtagcaccggcaaagaaaagatgaagaaaactgaatgttctacaaatagactgaaggatgtacctgtattaaagatagcacgtgaaaaataacaccaaatgagggtgtagtctactggggacaaaaaccagaaatttattttctagtgtgtttactgaagcacatggacactgaaagaaagactccgatgttcaggcacctatcaagcctcggcctgagtcacatttgctactgtcctgttggcccaaaaaagttacagaaatcagccaggctggtccagaccagaagaacttggctgaatttgtctattcattcaataatcgcgtacgaataattttcttgttggaataaaaacacctcctatgcattcattaaacaaatagtacaggcatgaggcagataaaaatctaagtaaaaccaagttctgaccttccaccaaccacctagctaatccatagacgttagataactcattggaacttggaagcgtagataggcgattttaaaactcaggaagcaccgaggatgaagcgatggaaggcagcaaggcggggagagctccggaagaggtggtgaaactggaggagtcagacttcattccagaaacggccttcatgtgatgttatctgcatagttcattccgcttaccaaaaaactcactcgtcctctcccgcgtaacccacccacattgcctcagatgtgtaaccctcgggttaaaataccggtaagcgccgatgctcacggaggggacgaaacggggagcgcaaccaccgggaaccacgcaaaagtcgctcatgcccagggcggcttgcgggggcagggacaggtcagccaggacggccgcgtccacccgggccctacagggggaaggctcgaggaaagggggacgggaacacccaggcgtcggccctgctcgccgcgccccttgccccagatccgggcccggccgctcaggccctgaggccggcccagcgagctccttccccgccccgggcaagcagggaggctcggcccacctggtccatcttgggcatcaccttccgcttgcccccgatccggaagcgcaccaggttgtagaactcttcggggtggccaaggcatttcacgaactccatcctggcgcaggcggcggactcccgggcgcgactctcacctctgcggtccccaggcgctcaccggccggctggacctgtggagtaggtgcttcgaggggctggccggacagggggcaggcctagtacggcgacgccccgcccgccgctccgcccacttcaaccggcctcggccgccagcggggctagctgcggcctcgtggggtgggctgacgggcgctgattggccagggccgctcacactaggaagaccccggccaatcagtcgcggaaggagactggcgtgataacactctagaagctcattggaggccgagaaagaggccgacgagcgggattggtgccctgatggagccgggcctttgttttcttccgcttaccccggctgggagcgcgaacgctgtggggactggaggtgaggcggtggggcttaggatgcgcaggagcccaacggtggtccgcagtcgggagagcagtgcggggctgcttcctccccacttggtcaataagtcgcccacgtgtccggcctcggtggctcctgccagccgggtgagctctgcagccgctctctgtagagcctaaaaccgtgaaaaggccgggccagcgccaagctgggcgtctttactgtaacacacccgagcacagcccagctcgcctgcccgccaccgccatccagccccagggagccccacacactcctggagcttcagctgccccctctctagtgtttacttgagatccagcttagtcctagaaaaaggagctgaagccttagagagcctgtaacaggaatgtggaaacttctctcatcctagatctctccagccctagaaactactggctacccgtccaggcgtggtggctcacgcctgtaatcgcaacactttgggaggccaaggcgggtggatcacgaggtcaagagatcgagaccatcctggccaacatggtgaaacccgtctctactaaaaatacaaaaaagccgagtgtggtggtgggcgcctgtagtcccaactactccggaggctgaggcaggagaatcacttgaacccgggaagcggagtttgcagtgagccaagatgacaccgctgcactccagccaggccaacagagcaagactacgtctccaaaaaaaaaaaaaaacctactggctacctaagccatcctgcagtctgttttaacacagcaaccagtaatccttttaaaacctgtcaggtctagccgagcgcggtggctcatgcctgtaatcccagcactttgggaggccaaggcgggcggatcacctgaggtctggagttcaagaccagcctggccaacatgctgaaactgcgtctctactaaaaatacaaaaattagccaggcatggtggcaggcgcctataatcccagctacctgggaggctgaggcaggagaatcgcttgaacacaggaggcagaggttgcagtgagctgagatcgcgctattgcactccagcctgggggacaagagcgagacttcatctcaaaaacaaacaggaaacctgtcaggtacgttcactgcccaaagctgttcagtgtctctccaacaaaagccaaagcacctatagggatcctgagaggctgcagccttccacccagattacctctctggcctccatctcttatgcttttgctttctctggccctaggactttttgtctagctgttcactattcctgcactatcccccagatactggcttgactaactcctgtgcccctcgagtctgctcacacctcatctagacccacctgtttgccctctctcacatttccacc

SEQ ID NO: 587490 - DNA, 4001 bp, Homo sapiens
ttaaaaattagccatgcattggtgacacgtgcctggagtcccagctactcgggatcaggaagccgaggtgggaggatggcttcagccaaggaagtcaaaactggagtgagtcatgttcaggccacagcattctagcctggacgatggagtgagacccccccctcaaaaaaaaaaaaaaaaaggccgggtgcagtggctcacgcctgtaatcctagcactttgggagaccaaggcgagcagatcacttgaggtcaagagttcaaaaccagcctcaccaacatggtgaaaccccgtctctactaaaaataccaaaaaatcagccgggcgtagtggcaggtgcctgtaatcccagctactcagcaggctgaggcaggagaattgcttgaacccaggaggcggaggctgcatctagctgaggtcccgccaccactgcactccagcctgggtaacagagcaagactccatctcaaaaaaaaaaaaaaaaaaaaagagaaactaagataatgttaagtgaagggaaatgtatttttccaatttatttcccctaattaaaggttcaggtatttttttaacggctcatggggatgtaaaaactgcccagaaagactacaactaacataacaaatactgcaccatattatcagagctagaatagctcaagtctcgcttttaaaaaaactcaaaatgtacaaaaacagtatactgtgaagtctttctctacccacttaccatgaccacccactttccctcccaacaggaaaccaatgctaccattttctctaacagtctttctgtagaaaggaaagagacatagaggaatgaagtctggacccaaatgaggtctgactgcactcagatcccttgccctgctagtatcttcctctgcagtgcttttctccacgtgaaaaactgtacattcgctttcttaaattgtctctcttccactaaaaagtaagttttataaaatcaaggtcttcacctagcttgttcactgttgtacctccagcacctagaacactatctgatatacaactggtcgtcaaatatttgttaaataaatgaatgctatatctaaatataaaaagtgacatctgccatatcaaataatagaagttattctgtagcaaaataattcaaataatgtagcaccggcaaagaaaagatgaagaaaactgaatgttctacaaatagactgaaggatgtacctgtattaaagatagcacgtgaaaaataacaccaaatgagggtgtagtctactggggacaaaaaccagaaatttattttctagtgtgtttactgaagcacatggacactgaaagaaagactccgatgttcaggcacctatcaagcctcggcctgagtcacatttgctactgtcctgttggcccaaaaaagttacagaaatcagccaggctggtccagaccagaagaacttggctgaatttgtctattcattcaataatcgcgtacgaataattttcttgttggaataaaaacacctcctatgcattcattaaacaaatagtacaggcatgaggcagataaaaatctaagtaaaaccaagttctgaccttccaccaaccacctagctaatccatagacgttagataactcattggaacttggaagcgtagataggcgattttaaaactcaggaagcaccgaggatgaagcgatggaaggcagcaaggcggggagagctccggaagaggtggtgaaactggaggagtcagacttcattccagaaacggccttcatgtgatgttatctgcatagttcattccgcttaccaaaaaactcactcgtcctctcccgcgtaacccacccacattgcctcagatgtgtaaccctcgggttaaaataccggtaagcgccgatgctcacggaggggacgaaacggggagcgcaaccaccgggaaccacgcaaaagtcgctcatgcccagggcggcttgcgggggcagggacaggtcagccaggacggccgcgtccacccgggccctacagggggaaggctcgaggaaagggggacgggaacacccaggcgtcggccctgctcgccgcgccccttgccccagatccgggcccggccgctcaggccctgaggccggcccagcgagctccttccccgccccgggcaagcagggaggctcggcccacctggtccatcttgggcatcaccttccgcttgcccccgatccggaagcgcaccaggttgtagaactcttcggggtggccaaggcatttcacgaactccatcctggcgcaggcggcggactcccgggcgcgactctcacctctgcggtccccaggcgctcaccggccggctggacctgtggagtaggtgcttcgaggggctggccggacagggggcaggcctagtacggcgacgccccgcccgccgctccgcccacttcaaccggcctcggccgccagcggggctagctgcggcctcgtggggtgggctgacgggcgctgattggccagggccgctcacactaggaagaccccggccaatcagtcgcggaaggagactggcgtgataacactctagaagctcattggaggccgagaaagaggccgacgagcgggattggtgccctgatggagccgggcctttgttttcttccgcttaccccggctgggagcgcgaacgctgtggggactggaggtgaggcggtggggcttaggatgcgcaggagcccaacggtggtccgcagtcgggagagcagtgcggggctgcttcctccccacttggtcaataagtcgcccacgtgtccggcctcggtggctcctgccagccgggtgagctctgcagccgctctctgtagagcctaaaaccgtgaaaaggccgggccagcgccaagctgggcgtctttactgtaacacacccgagcacagcccagctcgcctgcccgccaccgccatccagccccagggagccccacacactcctggagcttcagctgccccctctctagtgtttacttgagatccagcttagtcctagaaaaaggagctgaagccttagagagcctgtaacaggaatgtggaaacttctctcatcctagatctctccagccctagaaactactggctacccgtccaggcgtggtggctcacgcctgtaatcgcaacactttgggaggccaaggcgggtggatcacgaggtcaagagatcgagaccatcctggccaacatggtgaaacccgtctctactaaaaatacaaaaaagccgagtgtggtggtgggcgcctgtagtcccaactactccggaggctgaggcaggagaatcacttgaacccgggaagcggagtttgcagtgagccaagatgacaccgctgcactccagccaggccaacagagcaagactacgtctccaaaaaaaaaaaaaaacctactggctacctaagccatcctgcagtctgttttaacacagcaaccagtaatccttttaaaacctgtcaggtctagccgagcgcggtggctcatgcctgtaatcccagcactttgggaggccaaggcgggcggatcacctgaggtctggagttcaagaccagcctggccaacatgctgaaactgcgtctctactaaaaatacaaaaattagccaggcatggtggcaggcgcctataatcccagctacctgggaggctgaggcaggagaatcgcttgaacacaggaggcagaggttgcagtgagctgagatcgcgctattgcactccagcctgggggacaagagcgagacttcatctcaaaaacaaacaggaaacctgtcaggtacgttcactgcccaaagctgttcagtgtctctccaacaaaagccaaagcacctatagggatcctgagaggctgcagccttccacccagattacctctctggcctccatctcttatgcttttgctttctctggccctaggactttttgtctagctgttcactattcctgcactatcccccagatactggcttgactaactcctgtgcccctcgagtctgctca

SEQ ID NO: 587491 - DNA, 4001 bp, Homo sapiens
taacctttctccacatgtatggaggctaccggacaaccacgttagcaattatgaacacaacagtccgtagacaagatgcgtaaccccactcaccgttgggaagtcctccagcacctggcgatccttctccttgctctccatgaaccgccagtctggttggtaaaggaaagagtgaaagttgtgtaacagcgggaccttcttttccacactgatggtcatgtcatcttccagtgtgtccagagctcggagaaccagataaaatatgcacactgcgttgctgtaaaaaagggaaaactattaatatattggaacaaacagccaaagattttttattttaaaataacttgtgcctggccactttctaaacccatctcacccttaactctaaagaactataaggatatccaacgcttttcatacttaacgaaagttacattagttttccttccttacatgagagtaatgaacttctgtagtttattaaaaagcctactagttgaatgtcaccactactcccagaagtgagttgcatttaaccaatgtagaactatggagaccagaagaccaaacgtttagaccgaactaatatgtagcaaatagaaaagaaagtcaaaaaacacagtaacttctcagtataaatacgatcatacataaaggcaactggtctaagttcatgggtgtaatgtgcacagaggcagcttcaaaagaatcaacccaatatgctagaaatagaaatgcaaagttggataagggaagccgagaaatacacgacctgctcacaggcaggttcagctgccaagactaaaaaaagttaataaacatcaccccctcccccctcttctctgaaaggctgggcccgcagggactctactagatggcaaagagcctggaagggctttctaaagtaaacacgtagggccgggctatgttctggataagccacagcaacgaggctgcaacgctgagcgctatatcaaaaggtagcttccaacacactcaaaggtcccggacaagctttcctccaagccagaggcgctgcctccatcactcaccgcatttccccatccagcgcctggataacagctgcgaaactgcgactggtctgattgagatacttgtagcaagttttcaggctgctgctgagcgagtcctgcgggcagacaacacacacggcggtgggagacgtcgaggagcaggagtgggagtgggagtgggagtgggagtgggagtgggactggggcaggcggctccacagcctgccgccctctccccgaggccagtccttgcagggccaggcggcaggaggcaagcagcagccccgcggggcggtgcctgcgcccgggcccctgggcgccgcggcgggactcagcaccaaggtgcgcttgaagagggccatggccttggtgccgcaggcggctgcggccatgggaatcgcggaccccgcggagtttttcctccatagactcaagcagatctgggaagcgcccgacgaggggcgggacgggctcgccctctactcgaatacgcgctgggccgacccacaacgggcccgccccgcagccccgcagccccgcccccggcctcccgctccgcaccggcgcctcctcccgctgttgcccttctcaccagaacccactggccgctaagggaacccagcgcacttccgagcggctcgctcgtcctcccagtgacagagtctccctagaccaaactctactcgggctccgctgaaatcctcttcccaataaggcctggactttgtactcaacgcatctgtctttgcatcgcccagttttaccaagaatcctgctaaattgatttgaccagaatcccccaacttcagtatctgatcaccctagacagccgattaggttccacatccccctccatccctcaggtgatgtctgataactctggcctgccttcagcaagaatgcacacccctgtgtttcctcgtaataattttccatccactgacatccggctcccccgccatcaattcctacttttctttgtattcgcagtggagcagttctgtaccgaggtctctctcctcttactgcagtagtttttctgaataaaatctgttttgccgttttactaccactgtccaaccctggtttttctatgacacctattaagcctctactattctctagaaagccagccattcctttcaagatgtcttctcatctttcccttcgaaattaatgcaatgcagcgcactgacctttactcttccctaaagcaaacaaggactgtgtttttccaaaagggagaaaaagcctgattttaaatgcaagcatatcagaaagagttgctgtttgtactatgtattttttcatggactattttttagagcagttttaggcccacagggagtggaaaatacggcgggttcctatttgtcccttccctcccctcaccccacagtcttacaacagttctttttgggagagactggaatcatttatccaacagggccgggtgcagtggcgcacgcctataatccctgcacttcggaaggccaaggtgggagaatcacttgagcccaggaatttgagggcagcctgggcaacatagtgagacctcgtgttcataaaaaagtttttaaaaaattttttaaaaagccaggtgtggtggcgcccacctatagtctagctactgaagactagctactcaggaggctgaggtgggaggatcgcttgagcccaggagatacacgttacagtgaactatgatattgtacactgcagagtgggaccccatctcaaaaaaataaaaaacaaatatccaataggagtggttaaaaaaatatggcatatccacttctaggaaattccatagtcacttcagaatggtaacagtgaaccctgggctctggtgggaggtttaagtgaactatgttgtttttatttgtatatatttcctatcatgaatacgtattttgccaaaagggtcaatcttttaaatcacataatcctgaaaaagtcattttattgccataaaaaatattagtaaaaacaagtatttactgggcaccataatattagtaaacttcagcgtctggcacataaatatattcagaagtggtgtcatgaataaatgaagacattcatcgaggattttaaaacaattcaccaactccttccttctcaaaatatcgagaggcaggatttcagagtgaaagaaacagaatacccgctctggactgagctccagagcagctcttcacatagcctgaccattaccaggctacagcaggaagtgtttttaactgcactgccaaatgtcatgttcagtccaactaacagtttcggggtgatgttaagccaggagtttcaatcaatgccaagacacggtccccctagatttaaaccccaacactcttcaagaacactacccctcctttccatacagccctccattctgaaagagagcaagccaagccacttactcctccagctcgtacccctgctgctctttttcctgtcacctatttgtttcagtcccttaccttgtaaacaggtttcttcaaatcaccaagaacaaaacaggaagacacaactagtaagcatactatggaaaacaacactcactaaaaatttctactgcttgattcccatgagccaggggagaaagcaagctcaggctactggtgcctgtccctcttgggtttatctattgcagtctgagattcagcacactcccaaaagctcgcaagcgggagaaaaacagggatggagggaatttagaggaagggtgtgggggtggtcaggaagacgacaagaccagactcccaggaaggggctccagcctcaggctgaaagttccacaagtgaacagctaccagctaccagccctccacggagccttcctcactttaaaatagaatagatttctccaggaggggaaaaaaaccacaaacttgagaactgaatttacataaatttacataatcagattgataaccaccatttatcaagcacttaactccatgc

SEQ ID NO: 587492 - DNA, 4001 bp, Homo sapiens
cgccctagctgccaacagacaccgcccccatgccaggctgctgcccatcgtgagcagcagtcccatgctaccaggctccgggtagtcaagaggccagcagtgttacaggtaggctgcatcatacagtcggcaggcttttgtgagctagcctgagaatctttcacaacactaaaatttgactgcgtcttcccacaggaagaaacactggacttccaatactgataataacagcagtagctaacattctaagagcattacctacgttaattctttgaatcctcagaataccatgaggtaggtgttattattacccctattttacagatgaagaaactgaggcacagagagtctttgtaagtaaccaacagtttagtaagtgggagatttgagattccaacccaggcagcctggcttcagagtcttggctaccggagtttttaaccctcacattatgctgccctcagaatgcttatttaacctttctccacatgtatggaggctaccggacaaccacgttagcaattatgaacacaacagtccgtagacaagatgcgtaaccccactcaccgttgggaagtcctccagcacctggcgatccttctccttgctctccatgaaccgccagtctggttggtaaaggaaagagtgaaagttgtgtaacagcgggaccttcttttccacactgatggtcatgtcatcttccagtgtgtccagagctcggagaaccagataaaatatgcacactgcgttgctgtaaaaaagggaaaactattaatatattggaacaaacagccaaagattttttattttaaaataacttgtgcctggccactttctaaacccatctcacccttaactctaaagaactataaggatatccaacgcttttcatacttaacgaaagttacattagttttccttccttacatgagagtaatgaacttctgtagtttattaaaaagcctactagttgaatgtcaccactactcccagaagtgagttgcatttaaccaatgtagaactatggagaccagaagaccaaacgtttagaccgaactaatatgtagcaaatagaaaagaaagtcaaaaaacacagtaacttctcagtataaatacgatcatacataaaggcaactggtctaagttcatgggtgtaatgtgcacagaggcagcttcaaaagaatcaacccaatatgctagaaatagaaatgcaaagttggataagggaagccgagaaatacacgacctgctcacaggcaggttcagctgccaagactaaaaaaagttaataaacatcaccccctcccccctcttctctgaaaggctgggcccgcagggactctactagatggcaaagagcctggaagggctttctaaagtaaacacgtagggccgggctatgttctggataagccacagcaacgaggctgcaacgctgagcgctatatcaaaaggtagcttccaacacactcaaaggtcccggacaagctttcctccaagccagaggcgctgcctccatcactcaccgcatttccccatccagcgcctggataacagctgcgaaactgcgactggtctgattgagatacttgtagcaagttttcaggctgctgctgagcgagtcctgcgggcagacaacacacacggcggtgggagacgtcgaggagcaggagtgggagtgggagtgggagtgggagtgggagtgggactggggcaggcggctccacagcctgccgccctctccccgaggccagtccttgcagggccaggcggcaggaggcaagcagcagccccgcggggcggtgcctgcgcccgggcccctgggcgccgcggcgggactcagcaccaaggtgcgcttgaagagggccatggccttggtgccgcaggcggctgcggccatgggaatcgcggaccccgcggagtttttcctccatagactcaagcagatctgggaagcgcccgacgaggggcgggacgggctcgccctctactcgaatacgcgctgggccgacccacaacgggcccgccccgcagccccgcagccccgcccccggcctcccgctccgcaccggcgcctcctcccgctgttgcccttctcaccagaacccactggccgctaagggaacccagcgcacttccgagcggctcgctcgtcctcccagtgacagagtctccctagaccaaactctactcgggctccgctgaaatcctcttcccaataaggcctggactttgtactcaacgcatctgtctttgcatcgcccagttttaccaagaatcctgctaaattgatttgaccagaatcccccaacttcagtatctgatcaccctagacagccgattaggttccacatccccctccatccctcaggtgatgtctgataactctggcctgccttcagcaagaatgcacacccctgtgtttcctcgtaataattttccatccactgacatccggctcccccgccatcaattcctacttttctttgtattcgcagtggagcagttctgtaccgaggtctctctcctcttactgcagtagtttttctgaataaaatctgttttgccgttttactaccactgtccaaccctggtttttctatgacacctattaagcctctactattctctagaaagccagccattcctttcaagatgtcttctcatctttcccttcgaaattaatgcaatgcagcgcactgacctttactcttccctaaagcaaacaaggactgtgtttttccaaaagggagaaaaagcctgattttaaatgcaagcatatcagaaagagttgctgtttgtactatgtattttttcatggactattttttagagcagttttaggcccacagggagtggaaaatacggcgggttcctatttgtcccttccctcccctcaccccacagtcttacaacagttctttttgggagagactggaatcatttatccaacagggccgggtgcagtggcgcacgcctataatccctgcacttcggaaggccaaggtgggagaatcacttgagcccaggaatttgagggcagcctgggcaacatagtgagacctcgtgttcataaaaaagtttttaaaaaattttttaaaaagccaggtgtggtggcgcccacctatagtctagctactgaagactagctactcaggaggctgaggtgggaggatcgcttgagcccaggagatacacgttacagtgaactatgatattgtacactgcagagtgggaccccatctcaaaaaaataaaaaacaaatatccaataggagtggttaaaaaaatatggcatatccacttctaggaaattccatagtcacttcagaatggtaacagtgaaccctgggctctggtgggaggtttaagtgaactatgttgtttttatttgtatatatttcctatcatgaatacgtattttgccaaaagggtcaatcttttaaatcacataatcctgaaaaagtcattttattgccataaaaaatattagtaaaaacaagtatttactgggcaccataatattagtaaacttcagcgtctggcacataaatatattcagaagtggtgtcatgaataaatgaagacattcatcgaggattttaaaacaattcaccaactccttccttctcaaaatatcgagaggcaggatttcagagtgaaagaaacagaatacccgctctggactgagctccagagcagctcttcacatagcctgaccattaccaggctacagcaggaagtgtttttaactgcactgccaaatgtcatgttcagtccaactaacagtttcggggtgatgttaagccaggagtttcaatcaatgccaagacacggtccccctagatttaaaccccaacactcttcaagaacactacccctcctttccatacagccctccattctgaaagagagcaagccaagccacttactcctccagctcgtacccctgctgctctttttcctgtcacctatttgtttcagtcccttaccttgtaaaca

SEQ ID NO: 587493 - DNA, 4001 bp, Homo sapiens
tcacccagctagtcgtcataaattttctttcttctcttgaattgtactgtataaactcgaattattcttcagctattttcttctcatttgtattatgttgtactatatttgggctttggtacttaaggtctgatctcagcaatctgaaacagcctttgcaccgcaagagtcttccccaaacattcctttttttttttttttttttttttttaaatattgctcccattatgcccaagaatcaaagattcttttgtttgggtggaggactctctgtccacttagctccctcccaactcagctacagattaggtttgtttcaataacataaggactgttctccaaaagctctggcaactgtggacaaaaagggcttcttcgagctattacacaacatgtgactttgctaaatcaaacctttatttataagatatggaagaatcagttatttgtgtgataagacatgcgaattctaggatagtaggacctaggcagatgtccacatgaacttgagggactttaaaaatcttaggattttaactataacccactttactccaacaaaatagaccaaatagctaatacttacagaatacttaccctgtaccaggcactaagtactttatatgtgcgaaattaatcctctcagctctaactttacaaacgaggagacggagacacaaagcagataaggaacttgcccaggatcacaggtgaagtggcagaggctcgccctagctgccaacagacaccgcccccatgccaggctgctgcccatcgtgagcagcagtcccatgctaccaggctccgggtagtcaagaggccagcagtgttacaggtaggctgcatcatacagtcggcaggcttttgtgagctagcctgagaatctttcacaacactaaaatttgactgcgtcttcccacaggaagaaacactggacttccaatactgataataacagcagtagctaacattctaagagcattacctacgttaattctttgaatcctcagaataccatgaggtaggtgttattattacccctattttacagatgaagaaactgaggcacagagagtctttgtaagtaaccaacagtttagtaagtgggagatttgagattccaacccaggcagcctggcttcagagtcttggctaccggagtttttaaccctcacattatgctgccctcagaatgcttatttaacctttctccacatgtatggaggctaccggacaaccacgttagcaattatgaacacaacagtccgtagacaagatgcgtaaccccactcaccgttgggaagtcctccagcacctggcgatccttctccttgctctccatgaaccgccagtctggttggtaaaggaaagagtgaaagttgtgtaacagcgggaccttcttttccacactgatggtcatgtcatcttccagtgtgtccagagctcggagaaccagataaaatatgcacactgcgttgctgtaaaaaagggaaaactattaatatattggaacaaacagccaaagattttttattttaaaataacttgtgcctggccactttctaaacccatctcacccttaactctaaagaactataaggatatccaacgcttttcatacttaacgaaagttacattagttttccttccttacatgagagtaatgaacttctgtagtttattaaaaagcctactagttgaatgtcaccactactcccagaagtgagttgcatttaaccaatgtagaactatggagaccagaagaccaaacgtttagaccgaactaatatgtagcaaatagaaaagaaagtcaaaaaacacagtaacttctcagtataaatacgatcatacataaaggcaactggtctaagttcatgggtgtaatgtgcacagaggcagcttcaaaagaatcaacccaatatgctagaaatagaaatgcaaagttggataagggaagccgagaaatacacgacctgctcacaggcaggttcagctgccaagactaaaaaaagttaataaacatcaccccctcccccctcttctctgaaaggctgggcccgcagggactctactagatggcaaagagcctggaagggctttctaaagtaaacacgtagggccgggctatgttctggataagccacagcaacgaggctgcaacgctgagcgctatatcaaaaggtagcttccaacacactcaaaggtcccggacaagctttcctccaagccagaggcgctgcctccatcactcaccgcatttccccatccagcgcctggataacagctgcgaaactgcgactggtctgattgagatacttgtagcaagttttcaggctgctgctgagcgagtcctgcgggcagacaacacacacggcggtgggagacgtcgaggagcaggagtgggagtgggagtgggagtgggagtgggagtgggactggggcaggcggctccacagcctgccgccctctccccgaggccagtccttgcagggccaggcggcaggaggcaagcagcagccccgcggggcggtgcctgcgcccgggcccctgggcgccgcggcgggactcagcaccaaggtgcgcttgaagagggccatggccttggtgccgcaggcggctgcggccatgggaatcgcggaccccgcggagtttttcctccatagactcaagcagatctgggaagcgcccgacgaggggcgggacgggctcgccctctactcgaatacgcgctgggccgacccacaacgggcccgccccgcagccccgcagccccgcccccggcctcccgctccgcaccggcgcctcctcccgctgttgcccttctcaccagaacccactggccgctaagggaacccagcgcacttccgagcggctcgctcgtcctcccagtgacagagtctccctagaccaaactctactcgggctccgctgaaatcctcttcccaataaggcctggactttgtactcaacgcatctgtctttgcatcgcccagttttaccaagaatcctgctaaattgatttgaccagaatcccccaacttcagtatctgatcaccctagacagccgattaggttccacatccccctccatccctcaggtgatgtctgataactctggcctgccttcagcaagaatgcacacccctgtgtttcctcgtaataattttccatccactgacatccggctcccccgccatcaattcctacttttctttgtattcgcagtggagcagttctgtaccgaggtctctctcctcttactgcagtagtttttctgaataaaatctgttttgccgttttactaccactgtccaaccctggtttttctatgacacctattaagcctctactattctctagaaagccagccattcctttcaagatgtcttctcatctttcccttcgaaattaatgcaatgcagcgcactgacctttactcttccctaaagcaaacaaggactgtgtttttccaaaagggagaaaaagcctgattttaaatgcaagcatatcagaaagagttgctgtttgtactatgtattttttcatggactattttttagagcagttttaggcccacagggagtggaaaatacggcgggttcctatttgtcccttccctcccctcaccccacagtcttacaacagttctttttgggagagactggaatcatttatccaacagggccgggtgcagtggcgcacgcctataatccctgcacttcggaaggccaaggtgggagaatcacttgagcccaggaatttgagggcagcctgggcaacatagtgagacctcgtgttcataaaaaagtttttaaaaaattttttaaaaagccaggtgtggtggcgcccacctatagtctagctactgaagactagctactcaggaggctgaggtgggaggatcgcttgagcccaggagatacacgttacagtgaactatgatattgtacactgcagagtgggaccccatctcaaaaaaataaaaaacaaatatccaatag

SEQ ID NO: 587494 - DNA, 4001 bp, Homo sapiens
tcacggtccctgatgcttccctgagagccaggcccacagaagccctgcatcctttgctcctcagaggtgcaccttctgctgccctgtccaggctctgtggagttgcaggagactggcagctctgcagagtccctgggtagcatcactgtggcttcatcaaggccgcgatgttgttccttcttacatcgttctcagtgaaaaccagcctctgtgcttgacactgttgggttgtctgcagctttctggccttttcctcctccaggtcttcatcatagccatgagcatgtcacctgcatacgtgcaacttggataggttctctcaaaatatgttactccacgcttgcccgtggtgaggcgtacctacccctttttctctactcatccacccttgtaaaatctcccctgattaatacaataccccaggaaaaaagtaacaatttttcaacagccttgggtccaaatcatcatctgtatcatttcctcattaagacctttctaagaactgttgaataaaaatgatttcttctattttaggccgggtacggtggctcacgcctataatcccagcactttgggaggctgaggtgggtggatcgtttgaggtcagaagtttgagaccatcctggccgtcatggtgaaaccccgtcttctctaaaaatacagaaattagccgggtgtgatggcaagcacctgtaatcccagctattctggagcctgaggcacgagactcacttgaacctgggaggtggcggctgcagtgagccaagattgtaccactgcactccagcctgggctatagagtgagactgtctcaaaaaaagatttcgtctattttaaagtctgagggtgggcacagtggctcacgcacgtaatccgagcactttggaaggctgaggcaggaggatcgcttgagcccaggagtttgagaccaacctgagcaacatagcgaggccccgtctctacaaaaataagaataaaattgatctgataggtagctaaatagacacatagaatacatctatatctaatacatatttcatatatgatatatgatatataaccttagggatgattacatttgcctcaaaatccatctccaaaaattacaatgtgggattctggactggctcctagaacagaaaaagacattcgtggaaaaacttgtgaaatccaaataaagcgtggagcttagttaatagtaatgctgcattttcagtttcttcattttcataaatgtaccatggtaatataagatgttaccattagggaaaactgagtgagaaatttaagagaactcaattatctttgcaacttttctgtaaaataaaaatttatgttttaaaagtctaacaatcttgtgagaggccccacattttctatgagttcctgaggcaacttcctcatgctttttgtctctataatcccccaaaattttaccagtctctcttctttctcctccctctgtctctgtcaaacacacacacacacacacacacacacacacacacacacacacgcatgctcacaacatggagttcaagcaacaaggtcaacctggctacagcgaccactgagtacccaatctgccaacagcagagaccaatgctgagtccccaatatatggcaccattccctggggtgaccagccagctacctggaggcaggttgattacattggactgcttccattgtggaagggaggggaagcattttgtccttactggaatacacatttgctctggatatgaacttgccttccctgcacacaatgcttctgtagaatctattatctatggacttacaaaatgccttgtccaccttcacgatggtccacacagcattgctctgatcaagggactcacttcacagcaaatgaagcgcagcagtgggttcgtgctcgtggaattcactggtctcacggtgttcccaaccgttctaaagcagctggcttgacggaatggtggaatggccttttgaagtcagttacaggcaacctcaccaactaggtgacagtactttacagaagtggggcaagattccacagaaagctgtgtattctttgaatcagcatccagtcaggtgctagtcaggactcatgggtccagagatcaaggggtaaaaatgggatggcaccacttgctattacccctaatgactcactagcaaaatttttgcctcttgttcctttattatcctgttagcctagagatcttagttccaaaaaagaatgcttccactagcagatacaacagtgattccattgcactgaaagttaaggccacagccagccactttgggctcctcatacctctgaattgacaggcaaagttttggtgttgtctagggcgactgatcctgactaccaaggggaaaatgtgctactattccacaatggaggcaagaaagaatatgtctggaatacaggagatcccttagggcatctcttagtattaccataccctgtgattaaaatttgtgattaaattcatggaaaactacaataatccaattcacgcaggactactaatggcccagacccttcaggaatgaaggtttgggtcatcctaccaggtaaagaacctcaaccagctgaaaggtttgccaagtacaaagggaattcagaatgggtagcagaaggtagttctaagtatcaggtacaaccatgtgcccagttacagaaatgaggactgttattgtcatgagtttattttgtggtgaacatatttgtgtacatatatgtacattgcctcacacagaacatttcgtgactctagaaattccctggagatttggtggaggttccagcgcccagtagacctacagccatcaccattccctctcccctcctgctcccccggggaaatgatcgacatttcttgcactttcttattaagaattgttatgcaaaaacacaagttccccaaaccttttcttctagcacacacttcctgggggtactttagcaaacagaagaattccagggccagttgagaacacaagtatgttcatagcggctatattcataatacgcaaaagttgaaaacaacctaaatatccaacagccataaaaaggataactaaatttcagtatattttcacaatggaatatcacacagaaacaaaaaaaaactatgaccatgagcaacaacatgaactagtctcacaaactgatgagggaaggaaccagacacaagagtacaaattgtatcattccacatatatgaaactcaaagatacacaaaaggtgataaaagtcaaaataatggttgcctcggctgggcacggtggctcacacctgtaataccagcactttgggaggctgagttagatcatgaggtcaggagttcaagaccagcctggccaagatggtgaaaccccatctctactaaaaatacaaaaattagccagccatgatggcaggcacctgtaatcccagctgctcaggagacagaggcagagagctgcttgaacctgggaggcagaggttgcagtgagccgagatcatgccactgctctccagcctgggcaacagagcaagactccgtctcagaaaaaataaaaaaacgaagaatggttacctctgaggagggacattaattaggaagaagcacaagagtttcctgaggctactggaaatgttcatttcagacatgtgtaagcacatacatacacacacacacacacacacacacacacacacattgtatatgattcttccaatttcgtgaggacatctgagaaagggaagggttgaggggctatttcataaatatagcccagctggagcaatgattttgcggggaaggggaacatagactcactaactagccaggatccttttagactattctctctgtaacttctcattaaaaacacattttatctcagaataaatttcagtttatttcatcctttttcttggtgtttgaaatggattgagagatctcagcaggtacaagttaatttagagggctgtatcagatggaatataattaacttct

SEQ ID NO: 587495 - DNA, 4001 bp, Homo sapiens
ccaacctcagccatctggacagagctagacccagattagcatctgttaggggctactctctcctagggagggggtgggaaatatcacctttgaggcagggggagtgagggagcagctctcagagctggacatttaacctgcgcggggttaacacttactgtgcaccgttgctcatttccaattgcacctccccatagagcagcctctgcctagcctctgcaagacctgcccctcgccccaccctggagcatttggggtgggggacctgcccagcctgccccacgctggcctcccttccagggggtggggtcctgcctatcccagccccgcctcctggcccaggttcaggccctccgcccctcttggccgacggcctcctctggcagtctgttccaggtcaggagcagaaagcgcccccccgaagccccctcctttcctcgtcccccttcaagcttttcacaaaagcagccccacgcccccccacagcccacaacccacaagtccctctccccgcgggacctagcctgtccctttcatgttcccgctgcgggaggacctccccttccaccactgcagacagctgcttgtcagacagcccctcaagcatggctgtggtccggcctgctggccccccctcccaggggggtgagggggcacttcaagggggaaaggaccgctttgccaccttccctgagtcctgaatggggcctcagccaggccataaacgcccggccagccgcaccattgtgctagttcccctccagaacaggttgggcccacccccagccccctcccagccaggctgggggctttcttctggctccccctggatgtgtgaagcaaaaggcctggaacggggctggagcaaaagggggaaggaagggggggggaattgtctctccctctcccacccccccactgcttcaaaggctgcccctttccctctcccagagaaaaggcatttaccttcaaaaaaagtccccactggatatgaagagaagcgggcctctggcctgggaaagccaagcgatctctccccagagcggttctggaccagtgcattttaatagctgcacttttatggaggatcacaaaaaagggagcaagcctcgcactgggggctgagacttgggggtgggaggtgtgcatggagggaggtggggggccgacttggggtggggggagtgtggagaagcgaaccctgcatcccgtcccaaacaaacctctttgggcttgacctctgtgccctctaggtgaggagtcacctcaccctggccaggcattctggacatgctcacgagacccccaccccaggcatccatattgatgggagtggggtggcgagaaggacatacaagtggtcttgcatcaaaacctgtcctttcaggtactggcaaacccaagcctcacctgagccatcacctccacctgcttccaaccgctccaggctccatccctcaagtctgggggaacccgatggagagggaggaagaggagcagagacccaggggaagtggggagggtcctcagagggaggacagagacaaaacctcagtcagcccccttccctgcccacccggtcaaaggctcactcccctccaaacctcagtgcctcctggacccagggagaggccagactctgcctctgtccacctgaaaggagccggtcccttgcacccgccctggtcaggtagggtggaaaaattgggggaaagccggtgggaatgcccgcctacctgagtttgacagcagagaatcagcagctgtaagcacctgtgtggggagaggaggtaagcccaggtgtgggtgccagctgcaagcctagggtgcacccaggcccccgcccccgccctgccagccccgtgcacgcacgcgtgggagtcccgggaagaggagggctgccctgaggctggaaatggcaacgaaactccagtgggagaggtagcacacttacagagtgaggttgggcagcaggcgggcggctcccatcgctggagaggttcctcaggcggttgcccccctgcccccaagctcaggagcagatgtgggaagtccccaggggtagagtcccagagaagccaaggtctctccgagccacaggttttcaggggggcgaggaggagagaaaggggaggaggaggagagaaaagagggaggaggagggggaggaggagggcgtaattgggagactgaggtatgaggtgtccaccttcctggccagtgaggctgcaaagcagatgcgggtgggggcgtgcgcgctgtgccctctgggctgccagtctctcctgggccacccagtgcagggatggagcggtgggggccttctgaaggaggtggccctgctgtctcctgctctattcctgaccctcacagactggccaaactcgacgcagacaaactcgatgtgtggcaggtcagggagggggagcccttccaggtctgcgtctcctgcactcaggtctggcgccccacctccccaagggtgagccgcaggtgtcaagtggggctggggtctctggttctggctctggagtggaaattcccagaagcagccttaaaaggagccgcctccctccagggggcaggggtgggcttggcttggagcagctgattgcccgggaaggaggggttaaggctgtcctgatcggcagcaaatactgggcgcaacaggttgggggtcagaggtgggttggcaggtacagatggagatctaggaagaatcccaatggagagttgcaaaagctagcctgagacagacacttggagaagagctgggtgtcctggcctaagccccttttccttgggcctctgtagttccatctgagaaatgaggacagtaatgcctcagggtgttggggggtcaagtgtgaaatcagcacatagcagacttcaagatgtctgtgttctgagacccagctccactcaccattctgcatccccttccttccagtgcctgtccctagagcctctctgagctaggagcagctcggagtcccctccctgtgtcccatgtccctgagcagctgcctgggatgaagtgcctaccagcctcttcccatgacctccggtctcatactgctcggtacaatgccagcgactagcccattttgcagatgaggaaactgaggcacattgggaggtagtttgctcagaatggcccagctagtgaatggaatagccagaatggaaaagtccatgcttcttctgttctgcatggattgagttgccaccctgcagatccagccccaaacctgcttcattgtagggatacagaagccttcctgggttttcaggattaaaggtggaatccgaggtcctggagaccggtgaacagagagctccatgctgttccctccctacagaaaagtggatgacggtgactgcagaagataggagggcttgggggtctctgagggaagacccagtgtgagcaagcagagctcaggcctcagctctgggctccctggagttctcagcgcccccagggtgggaagggaaggggaagtggcggatgtggatttatttacctaaagagatgaccaggggagcgaaactctcacctgtgggtcccttctcaccttcctgagctccatcaatccacaaagtggtctgccacccctgcccccatgcactgaccagtgcaggcagctccggggtctcctctccgcaggctcttcctcgggaacccagcccaggagtgggtgctgcctgagcttgtgtggggaggatggggcaagccctggccttgcttacctgggggagtccagggttttggaatgcaactcaaagaatgtcaaacctagaaggggtcttagggattcatcatttgttccaacttcctcattccttggatgagagccagagagggcaagggactcgcccaaagcctcacagctagctggtggcatggctgggacaaggtaccaggtgcccgcgtgcccacctctctgctttccccctgcggatccttcaggtcacttctgttccgcgttcttcccatc

SEQ ID NO: 587496 - DNA, 4001 bp, Homo sapiens
ctcaagcctcctcaatttaaaaaccactttctaaaagtgaccccaggttggccactaggtcatgacagtcttgactgatagtcaatgggaatttggaagagatcagtggaagctgcaaacatgtgggttttaaaaagttaattttctaagcctttaagtgctaccaaatgaccaccacatgcttatttctacatctagagttacaaatgcccccttaaactgagatttacacttctccaaagttttaatgagtcctacaagtcaaaaagggaataattataagaacaagggggtaaggacacgataagagagggccattcagagatggggtgcattctcaaagaactccgtagcgctacggattgtgggtgacaaattaatggtatcttttttaaaaataaaatgaatttttccaatgatgtcaaaagtttgataatcaaaatcctttgacattgctagcaggttaactaatagaatggaaacttcagctatggggaaagatcctgggatattagaaccggagagcaccccatctttgtacagaaaactaagcctcagactgatgaaggcactttctagttacacagctagtgaggaagtcattaacaggagagaccctcccgatctagtatcttaacagacactgccttaacaatcattctcttgtttcttttaaccccttctcttcccaggcactgccggaggtattctgaaacacgtccgtctgtgttcccacccatatcttctttcgctttcccatttcctctttcctaaagtcgataccaagatacttgctttcaggttgcacaatttccaaagaggagcttggctgaagaactaggcatgctcagtagccgggtggtcttcctcctcccccacccctccccccctttccttttcttttctcacccacatagaacttaggagctgagggaacctcagacaggtgagccctacaggtagcgaatgtgcccacggaaagttaatctgctacctcttcaggtgaacatttgcaagtctctaggtagacacgtaaatgctcgcaatccatgcccagagcagccccgggtgcataatcagctgcataactgtggggcatgtttaaagaagcccggcgcttcctgttattaatttttgtaaagtggacggcatgggggaaaatgagaaaggaaatcggagagaaacatacagggattttttttaaaactgactgcgaggtaagcagtgcgagaaccgtgatgccgagtgcaccaggtcttggtgtccccggcagtgggaagggcaaggggaaggcaggaaggagcttgcgaagcgcccaccctttctcctcccgcccccagcatctggagctgctgccctgctagaggctgcggcgacaaaccagcaggaaaatttctccccgcggctgctctggccagcccttcagccccagcctgcgtcttgcaccggatgggtccaggggagctccgggctccgcgcggcgatgacgcccttggcaggcaaagagggaggtgcaaggggagggaacgaggagccgagctggggcgcagatgggggtggggtcgggatgctagtacgtaccgaagaggctgtggtcctgccgggtgccctgcacgctgccgtcgggcaggatctgcaggtggaagccggtgcggcaatagagctgccggcggcgcaggatgccgtgcaggtgcgccagctgcgcagcccccggcccgccgcgcgcgctccgctccgccgcgctcctgcgctcgcccagcagcggcggccgctccccggcaggaggcaacaggaaatgcgaacccacctgctggcccaagccctccaggccgcccagaaagcccccgacttcggctaagggagccatggagggggagatccggaacacaaaagacccccccagtaaagagtgttgtgggggtgggatggaggtggatagagaaaaattatagcaaaacgagcgcaaaaagttaaggcccggttactcctctgaggtcgctccggagggactttgcactgaaatggcagggaagctctcactgtcttggagcgatcttctctccttgggtaggtgggagccggctgctggctctgcagaaatatctatagctgccgctgccaatactaggactagggctgttggctggggctccaattccgcaaactgatcagatcagagtcctgtgtacatacacaccgagtatataagcgggtcctcttgacatatgctaatcaagtcctttcatgcgcgctggggaggttctgtttgaaatcttaaaccggtctcctctcaacacgtttttgctcttcggaagtgaccaaaaggggcccttggcacttctccatccatgccctcacaaaaaccattcctgcacttggccaaagccagccagcaacttcgaggaggtgcagtcgaggcccctctttggggttgtccttgggacagcggtgatgctgttcagctgcggccgtgcaaccgtctttgatgtgagctttgcagtgataaatcgcctctaaaaggagcccaacttggcagggatatagaagaagaggaagggaggagggagggaaggcggggagggagagaaagagaaggagggcattggtaggaggaggaaagagaaaaggagaattggactccttgggagcctgcagtggacaggtgcaaagaaaggtaagcaagggagaaggaaaaagggcgttacctggggcttacagacctgcccagacacacatgaaagaaaaatcaaagctttgacagtttaactcactaattttaaaacactaataaaatgtacaagcattgctcctttcttttatcatttagatgggggattttctttacataatcaaggttaggtaaggaacaccctccctccccctctttacaatttctctttaatgtttacctttactcagcacataatataaccaaaattgccatatatatatatacataatacacatatgtatttttaattgtgtgctaaggtcatgaacttctaattagtgtaaaataaagcaaaatataatcacgaatcaaaggatttacagtaaatccaaataggctggaaagaaatgatttgcatctctatattttgccgtgaatagaaaatgaatatctggaatattgtcataaatgatgagtggcttcttgggcccttatacaatctaagagcactttcctgtttttcttagttgcgtttttctaaaagctagatgtttttgtttacattttaattataaaatctaaaaataactaaatggaaatagtcttgaggcttgatgtgttttgagacttcaaaagttactggtaaaattgaagagtgcttgagcatatttgtaaaatcaaaaaccatggaagccaaggaattagatacatgttcatttaaacgttgaaactggttttgcaccactagttaaattcaagatctttctgttaaaatttttcagtggtagaagaattgagaatcattgggcagatttatgcttcctctgagcaaaaagttttagggaactgatgaagattactttctcagtcttgtttcatgatctgtttaaaaaaagcataagcctggcagctcagttggatttgactggtttattttatttgctctgaaggattttttctaattaattggcaggtgctctaaagtgggtatagttacacattttcatcactacaggcctaactactgacccttgtgtaaccaagttataaaagagttcttaaagcaagtgatttactgttgatagatatgaaataaaacaaaaacgctggctaaaaacaataaacagataaatcactttagaaacgtatattgctaagtctgttttaaaggttgcaccaggtaaatgttgtattatttcacctttcaaataacagcagtctgtcttgtggtaggaccccaaatccaccataatcaaggtttcaaacacatctgtgtaaacattatcacatcagtgtaaaacatcaaccaatgagcttttactttgaacca

SEQ ID NO: 587497 - DNA, 4001 bp, Homo sapiens
atgtttttcaaaagggttgatagcttctgggctcagaacaagaaacaggcttcacaccccaccccccccccaccaccaccaaaaaagtgtctggctgcctcatagggggtgtgtgttctatatgaacccccatctacaaggtccataaaattcctccgcaaacatgggtcgtagcctcacttttctcccaaccccaaacataacggtaggggaagcgaggtgcagaggggtctgggccagagaagcatacgcatcgctgccgagtgaaccacaccggacaaaaaccctcatcccttcccccacctctaggaaccagattgggaccgaacggtccttccgcccccatcccacacctcggcttaacgaccgtgggttgtcctcccgttccccaaacttccgaccctttcagagaccgtccaagtcataagatcaccccttctggaaaggggagtcgtttttcgctctcagctcaagcagattcagccatttggtgacgacacctccttaaaacctattccaagagaagctaacctagccctccacgtcctccgcagttcatctcccaccccatccgaccccaacccgcaccccaggctttcccgggggtggaaaaggacttaggaatgccccggatttttagcgttgagcccaaagctacctgctgaattgggggtgaatccccaaaaggggaccaaaaagacatggagtggaatgcaacacacacacataacacacacaacgcatcccacctcgccgcccactcccgccctcctccccagtccaggaaaccgcgggcctcgccgccttcgccccgggcctgtccctcccgggactcactgaggagccgccgccgcctcgccagctcccgagcgcgagttggaggaaaagttgggcggcgggaagagcggcgggacgagcgcagggagggggcgcaggagacgcggacggagggaagggaggggagacccaaggggcgcggatcgcccgggagggagccaggaggtgaaaggggcgggcggcgagcggagggaggcgccggccccggctgggctgcggcgggcaaagcgcgcagccgggaggctccggcgccgggggccgctcgggacgccaagcccgccccagatccgggggcgccgcggctcttacctcgctcggcgtggaggttccgcctcgggagagtccgccgtggcttgtgcgagcgggcgtgtgcccgcgtccccggctccggcccgccgcccccgggctctgttcgggtcctggcggggtcgcaagagctccgcggccggcgctcgactcccggcggcgctcggtgctcggcgcctccagcccgggcgggaacaatggagccggagctggtgccccggaggcggggcggggggagggctcccgtccgccacccggggtctccagaccttgtgcccccctcctccagaacgcagcggcggcgcctcactttccttgcagaccgggctccatcgccctgcggaggccccggcgccgcggcgtgcccgactgcagcacgggtaccgtgcgccctgcggggcgccccgagctcggaccggagaaaagtccttgggttccgcggcttttcaagcagcggcgcgctcgcggccggggaaggcgaggtcgccgcaatgcgctacgaggggtctcggtcccgtccggacgtggccgcccagctcccggcacacccgggttcctccgcgcgctgcggctgcaccggcgtcccggctcccgctagctgccgcccgccgccgaggacgccgcgcctgtggccgcaagagcgctccgagcgctatgcgccggcggggcgcgagggctcgctctctcactcccacccgcgctggtccctcctccgcctccgccccctgcagctgcctgctgggccttgtagttccccagccgcggccccaaaggacggggagcgggccgagctgtccggcgctctgcccttctcttcctacagcctggtctcctttggcgtttgcgcccctgcatctgagcacgtcccagagggcgccggaatgtcaggccctagacatagcagcggtttgggggctagggggcaggtgaagagacgccgcagccttgaggttgtacctggtagcgtgggctttggagtctgtgcgccttggggaaatgattttcgcgctctaaatctctgttttcccatctgtaaatgggggataatagtgcttttcacatagagttgaggcgtcaacgagggcctagcgcatagttaacacttagtaaatacaagccggttttattataaggtcagcccctcctcaaacccttcccttggatttcagctttccccagccacataatttaggttttgtggtccaccgggaactggaccctgtaaattctacagcgatgctgttggcttccagaagtctccagcctgcagtgaatgtctaggaagcaaagagtaagcagtgggagttgaggggagacgtgtggttggtttggaaattaatcacagcccactcagaacaccctccagtactgtggaacacaggaaagtggctaaaatgcttccccctgagtcttcccgcgaagtggtataatgtagtggttccctaatccagatggacacgggtcctagggaacgtctgaaaaatacaagttcatgggcctgctcagacatgaggaatcacgctgtcccaggaaggagccaagagcctttattttttccaaggctccttggggcgtgtgatgtgagcccaggctgaggccaccattggggtgggaagtaggcagcacttggtctgaaggattcctccattctgtccatcatttatgaagtttgatgtaggacaaatcatgcatctgataaaatcaaaacggggtatctgttgatactccttcacaagatggtcataagaatcaaataaaataatagctctcagtggaccaaaaatattacacaaatggaagtcactatgaaaggtagtggcagggcctgttcccttaccatcacccacctcaaccccgaaacttgtagaagtttgaatactgaatgagatccccccacccaactcctcacccaacccacccacgcctccctggctaatttaagaaaagagttggccgggtgcggtggcttatgcctgtaatcccagcactttgggaggccgaggcgggtggatcacgaggtcgggagatcgagactatccttgccaacaaggtgaaaccccgtctctactaaaatacaaaaaaattagccaggcatggtggcgcttgcctgtaatcccagctactggggaggctgcggcagaggaatcgcttgaacccgggaggcggaggttgcagtgagccgagattgtgccactgcactccagcctggcaacagagcaagactccgtctcaaaaaaaaaaagaaaagaaaagaaaaaatggtcctcgcgctatttttctaatccaccagtaggtgacagactagtggccaacacagtgttattcacatagtagacactcatgaaatcccttgactggccaaagagcaaatattcaataagtatttgttgaacaaatgagtaaataaacaactaaattacagctcacgcctgtaatcccagcactttgggtggccgaagcgggaggatcacttgaagccagaagttcaagaccagcctgggaaacaaagtgagcccttgtctctacaaaatatttttaaaaattagctggaggtggaggctgaagaaggaggatggcttgagcccaggagtttgaggctgcagtgagctatgatccagccactacactccagcctgggcgacagagtaagaccctgtctcaaaacaaaataatacaaaacaaaaaatgagaaacaagaactcatatctttgttgaataaatgaacttcagccactgtttatagggttttcccctaagagccaccatttaacctttcagctcctggtcaagcttggtttatactcctatgtaagctgcccacccattaggcctcctgcattttaattactacacatcac

SEQ ID NO: 587498 - DNA, 4001 bp, Homo sapiens
ggtccggaggtgcaaagggtagggcacatctgcggaggaaacagtcaccttaattaccacgtctagagaaagtgcgatttcattacagcctccaaaactaccgcccaaagaaggaaaccagagaagtgttttcaatttgaaagaggctggaaagaagcgggtaagacaccgactctccccaccctcccggcaactttggaccacaaggcgctttcctgcctcaaagactattaccaaacacaactcgaaaatccaaccccgctttcaaacctgtagccgttatttaaacggtaaaacaccccactttagtttccgggggatgcggcccaaatcagtccttaaaaacacacagagagcgcctctggcagcagccgcccacgcccccggccctgcgcaccgggcttgctccgggaggggcgcgtgacgccaccgcggggcagccgagaggggaccgcgggctccgggcagggcaggcgctcccgcagctccagctataacacaagggagagaaagcaacgctttggttccagaaacttccatcgtcaaggccagttctggccagacgcacagccaaagagcccccctagtctagcggatgaaccgttcgcgagtggcaccccctaaaaccttggccccatctcccaagatgcctctttactgcgcaatccagaaagcacccggaccgccgccacccaccagcggcggcgaataacttggtgagatcttaaataactcgggatccaagggaactttcttttctcccccgaatctcaacgccgcatctccaagtctccagaaatgttaaggagggaggtggtcaagacaggctgaagaatctgagttttaatttgggggagggggaggggaggaagagggaagttaataatgcggctgcggtgtacccgtgtggggtgaaacggaaccagatgcggctgctacatctggaaattgggggtgggggagtgctgggggagaaaggcaccgtggtaatgtttttcaaaagggttgatagcttctgggctcagaacaagaaacaggcttcacaccccaccccccccccaccaccaccaaaaaagtgtctggctgcctcatagggggtgtgtgttctatatgaacccccatctacaaggtccataaaattcctccgcaaacatgggtcgtagcctcacttttctcccaaccccaaacataacggtaggggaagcgaggtgcagaggggtctgggccagagaagcatacgcatcgctgccgagtgaaccacaccggacaaaaaccctcatcccttcccccacctctaggaaccagattgggaccgaacggtccttccgcccccatcccacacctcggcttaacgaccgtgggttgtcctcccgttccccaaacttccgaccctttcagagaccgtccaagtcataagatcaccccttctggaaaggggagtcgtttttcgctctcagctcaagcagattcagccatttggtgacgacacctccttaaaacctattccaagagaagctaacctagccctccacgtcctccgcagttcatctcccaccccatccgaccccaacccgcaccccaggctttcccgggggtggaaaaggacttaggaatgccccggatttttagcgttgagcccaaagctacctgctgaattgggggtgaatccccaaaaggggaccaaaaagacatggagtggaatgcaacacacacacataacacacacaacgcatcccacctcgccgcccactcccgccctcctccccagtccaggaaaccgcgggcctcgccgccttcgccccgggcctgtccctcccgggactcactgaggagccgccgccgcctcgccagctcccgagcgcgagttggaggaaaagttgggcggcgggaagagcggcgggacgagcgcagggagggggcgcaggagacgcggacggagggaagggaggggagacccaaggggcgcggatcgcccgggagggagccaggaggtgaaaggggcgggcggcgagcggagggaggcgccggccccggctgggctgcggcgggcaaagcgcgcagccgggaggctccggcgccgggggccgctcgggacgccaagcccgccccagatccgggggcgccgcggctcttacctcgctcggcgtggaggttccgcctcgggagagtccgccgtggcttgtgcgagcgggcgtgtgcccgcgtccccggctccggcccgccgcccccgggctctgttcgggtcctggcggggtcgcaagagctccgcggccggcgctcgactcccggcggcgctcggtgctcggcgcctccagcccgggcgggaacaatggagccggagctggtgccccggaggcggggcggggggagggctcccgtccgccacccggggtctccagaccttgtgcccccctcctccagaacgcagcggcggcgcctcactttccttgcagaccgggctccatcgccctgcggaggccccggcgccgcggcgtgcccgactgcagcacgggtaccgtgcgccctgcggggcgccccgagctcggaccggagaaaagtccttgggttccgcggcttttcaagcagcggcgcgctcgcggccggggaaggcgaggtcgccgcaatgcgctacgaggggtctcggtcccgtccggacgtggccgcccagctcccggcacacccgggttcctccgcgcgctgcggctgcaccggcgtcccggctcccgctagctgccgcccgccgccgaggacgccgcgcctgtggccgcaagagcgctccgagcgctatgcgccggcggggcgcgagggctcgctctctcactcccacccgcgctggtccctcctccgcctccgccccctgcagctgcctgctgggccttgtagttccccagccgcggccccaaaggacggggagcgggccgagctgtccggcgctctgcccttctcttcctacagcctggtctcctttggcgtttgcgcccctgcatctgagcacgtcccagagggcgccggaatgtcaggccctagacatagcagcggtttgggggctagggggcaggtgaagagacgccgcagccttgaggttgtacctggtagcgtgggctttggagtctgtgcgccttggggaaatgattttcgcgctctaaatctctgttttcccatctgtaaatgggggataatagtgcttttcacatagagttgaggcgtcaacgagggcctagcgcatagttaacacttagtaaatacaagccggttttattataaggtcagcccctcctcaaacccttcccttggatttcagctttccccagccacataatttaggttttgtggtccaccgggaactggaccctgtaaattctacagcgatgctgttggcttccagaagtctccagcctgcagtgaatgtctaggaagcaaagagtaagcagtgggagttgaggggagacgtgtggttggtttggaaattaatcacagcccactcagaacaccctccagtactgtggaacacaggaaagtggctaaaatgcttccccctgagtcttcccgcgaagtggtataatgtagtggttccctaatccagatggacacgggtcctagggaacgtctgaaaaatacaagttcatgggcctgctcagacatgaggaatcacgctgtcccaggaaggagccaagagcctttattttttccaaggctccttggggcgtgtgatgtgagcccaggctgaggccaccattggggtgggaagtaggcagcacttggtctgaaggattcctccattctgtccatcatttatgaagtttgatgtaggacaaatcatgcatctgataaaatcaaaacggggtatctgttgatactccttcacaagatggtcataagaatcaaataaaataatagctctcagtggaccaaaaatattacacaaatggaagtcactatgaaaggtagtggcagggcctgttcccttaccatcacccacctcaaccccgaaacttgtagaa

SEQ ID NO: 587499 - DNA, 4001 bp, Homo sapiens
atgtttatctcactaccattaagataatccaataatcaaaaaggcaccccctagtctggtagcatataaacaataaagcatttcaaaatgtaattatttacatttagaaagtcattatattactttgattagctttagaataattcctgagaatatcttaagttctctaaaattttccattttcctcctttgcaattctaaccaacattctctgtaatattgaagaaatgctaagcattaagaaacttgctttgaaattctggtctccatcattcattatagtaaaccattatttcttctgcacatctggcttacagtaaagttgtatcaaattattctgttcatttattgcacaattagttgtatttcttttataatatttttgccttaggcagtatcaaaacttttaattattataaaattaaaattgttatcaaatggctgttctttggtggactatattattttacataattttaatgctataaattctaattccttccccactatatttaaaaaaaatttaattaattacgctgcattaaatttaaagatgaagacattaaatttgtaaatgaaaagttctaaaaataatatataatttttaaaaacaattacaaaacagaagtacattagtagcatgcaaacatttcaaaactggtatgttttaagcaagcattgtaaaaggatatataaaagaaataaaaaggaaggaaaaagttattgaacgaagtatgtttaataagttagcattcacaaacgctataggactataatgcttaggactataacctaagtcagtgagttaaaaatgtacccataaacacaagcttagagactccttttaagctatttccttccaaattttttcctctttctgaaaatggaatataactgtgcttttgtatttttcttaagaatccatactcactgaaagccttacaaagctaaatatagttgatccctcaagaaatgcaataaagaaaaatgtttctgaagttttttgacttctgaagtgaaaattgtcatatagtccattttatttttaattttttatactgaaactgtaaacctatcatttacgtcaaactcccatgcaattcattcaaaatgtaaaggaaattatacaaagtgagactccatctcaaaaaaccaacaaacaaacgacaacaacaaaaaacgcctagagcttaaaaaagaaattttcttattccaatgtttgattctggctcttgcataaatggaagtatgttttgaaaatgctctgggtgatgcacctatatatcatataattttacctgcgcacactgtatatatatgtatatgtatgtacgtaacattattatacataattatgtatatattatagattatatatacattatataaggtatataaatattgcttagcattagatttagtaaaaaataaagggctaatgaaatttttttgacaggcctctgtctcttgatgtcctgaaatgttcatctcattaccattaagataatccaataatcaaaaaggcaccccctagtctggtagcatataaacaataaagcatttcaaaatgtaattatacatatttagaaagtcattatattactttgattagctttagaataattcctgagaatatcttaagttctctaaaattttccattttcctcatttgtaattctaacataccttatttgtatatctgtatatttgtatatctgtatatctgtaacaaaagatacataattctaaatctcttctccaagtagcagaagcagactccttgctagtcaacctgacttcttgcaaaagctaatggttgttacctgagttttggttactatcatacctgtgaaataaattagcattattacaagcatgtcaaaaatgcagagacattaaataacttgcctaaagtcagaagtgagtcagagacccagctcaggttccatccagacactctgcttcccaggatcctgtaactgcattgggaatttgtaattatttctccattatttgattagaaatagggacaatgttgattctggcttcaatccagaaacaaacatgtggacacaggtttaactgaaagaaagctaaaagagaagattcaaggacaaatcccaatactctgatatttttcttttttccccacttgtatgactttttgtgaaagatccaataatatatctttataaagatatatatattttacaacttattattatgttcattcagagaatttttgtactgtaacttcaataatgttccattgaagattaagtaaaaacgaagtccagctgaaactttgctttgtattaagggtaataacattttacccacaaaaatatgaattaatatgtcatctcaactaaaatatggagataagccaaatttttcctagttataaaaaacaaggcaggttaataattgccaaggtgaaatggtcagtttatttgctctctaagaaaaacaaaagtattccctgaggtgcaaaattgtgaaatttaactggaagcatcgattatactctggacaagttgttccttttgttttaaaatcctctagaagattttctaatgtgtaataggcacttgttagctccattaatcgtattgtgtaacagtttcttactggaaatctgggttcatcatttcttctttccttctgatgtaactcaagcagttgtttgccatttgtcctgtggtccctatttattcactcagattccagtaaaataccaaagttttgttttctttctgttctttgttatctactggacttgagcactgacgatgtttggtcttcccattaaacatcttcctgtccttcacgtggacattttgaagattattaagggaaaggtaatcctgttgatttactggaaaaaagaaggaaaaaaaaagccagttagactgaagtgatttgcacacacacagaagaagtggaaattatacattcataattgtagagaattcaagctgctaatgttaaatttcaaaagcaaaaatatgggattattcggctaattcaataatgatctctgtggtaaaatgacatattttgaaatacaaacttatctttccttcttgtatgcctttagctttgtccccattcaagcaataatttagccttgtgttcatttcctcactggagggacataacattaacagcagctaacatgtggtatacttatcatgtgctaaacatggtaattttatcaactcactcagccacacagccctataagtaggtactgttaatgatctccatttcacaaatgacgaaactgagacacagaggtttaagtgacttgcacgaggtcacacagctaacaagaggtatagctgggctcaaaggcaatcctgctcagaatctgtcctcttttctactaaaggtagactatgctgtctttcggaaacttggctagcatcattacctcaggagaaacttgcaaaagttaatcaggcagtaaggactactctagggccaatactttgtggaggaattccaaaagccaaattttcttggagtaacattattccatggatgtactgccataacatggtggaagaactatcatcaggaaaggtcaaaattatggccaggtgcggtggctcacgcctgtaatcccaacgctttgggaggctgaggcaggtggatcacctgaggtcaggagttcgagaccagcctggccaaaatggcaaaaccccatgtatttttagtttctactaaaactacaaaaattatccaggtgtggtggtgggcgtctgtggtaccagctacacaggaggctgaggaggagaattacttgaacccaggaggcagagattgcagtgagccgagatcgcgccactgcactgcagcctgggtgacagagcaagaccctgtcaaaaaaaaagaaaaagaaaaaaagcaagaaagaagagttgtgaccttgcacaactgcaccaaagctatgaaatgagaatgagacctgagatcactggctgaaaaaagtacaa

SEQ ID NO: 587500 - DNA, 4001 bp, Homo sapiens
aatatgtatatattatagattatattatatatacattatataaggtatataaatattgcttagcattagatttagtaaaaaataaagggctaatgaaatttttttgacaggcctctgtctcttgatgtcctgaaatgtttatctcactaccattaagataatccaataatcaaaaaggcaccccctagtctggtagcatataaacaataaagcatttcaaaatgtaattatttacatttagaaagtcattatattactttgattagctttagaataattcctgagaatatcttaagttctctaaaattttccattttcctcctttgcaattctaaccaacattctctgtaatattgaagaaatgctaagcattaagaaacttgctttgaaattctggtctccatcattcattatagtaaaccattatttcttctgcacatctggcttacagtaaagttgtatcaaattattctgttcatttattgcacaattagttgtatttcttttataatatttttgccttaggcagtatcaaaacttttaattattataaaattaaaattgttatcaaatggctgttctttggtggactatattattttacataattttaatgctataaattctaattccttccccactatatttaaaaaaaatttaattaattacgctgcattaaatttaaagatgaagacattaaatttgtaaatgaaaagttctaaaaataatatataatttttaaaaacaattacaaaacagaagtacattagtagcatgcaaacatttcaaaactggtatgttttaagcaagcattgtaaaaggatatataaaagaaataaaaaggaaggaaaaagttattgaacgaagtatgtttaataagttagcattcacaaacgctataggactataatgcttaggactataacctaagtcagtgagttaaaaatgtacccataaacacaagcttagagactccttttaagctatttccttccaaattttttcctctttctgaaaatggaatataactgtgcttttgtatttttcttaagaatccatactcactgaaagccttacaaagctaaatatagttgatccctcaagaaatgcaataaagaaaaatgtttctgaagttttttgacttctgaagtgaaaattgtcatatagtccattttatttttaattttttatactgaaactgtaaacctatcatttacgtcaaactcccatgcaattcattcaaaatgtaaaggaaattatacaaagtgagactccatctcaaaaaaccaacaaacaaacgacaacaacaaaaaacgcctagagcttaaaaaagaaattttcttattccaatgtttgattctggctcttgcataaatggaagtatgttttgaaaatgctctgggtgatgcacctatatatcatataattttacctgcgcacactgtatatatatgtatatgtatgtacgtaacattattatacataattatgtatatattatagattatatatacattatataaggtatataaatattgcttagcattagatttagtaaaaaataaagggctaatgaaatttttttgacaggcctctgtctcttgatgtcctgaaatgttcatctcattaccattaagataatccaataatcaaaaaggcaccccctagtctggtagcatataaacaataaagcatttcaaaatgtaattatacatatttagaaagtcattatattactttgattagctttagaataattcctgagaatatcttaagttctctaaaattttccattttcctcatttgtaattctaacataccttatttgtatatctgtatatttgtatatctgtatatctgtaacaaaagatacataattctaaatctcttctccaagtagcagaagcagactccttgctagtcaacctgacttcttgcaaaagctaatggttgttacctgagttttggttactatcatacctgtgaaataaattagcattattacaagcatgtcaaaaatgcagagacattaaataacttgcctaaagtcagaagtgagtcagagacccagctcaggttccatccagacactctgcttcccaggatcctgtaactgcattgggaatttgtaattatttctccattatttgattagaaatagggacaatgttgattctggcttcaatccagaaacaaacatgtggacacaggtttaactgaaagaaagctaaaagagaagattcaaggacaaatcccaatactctgatatttttcttttttccccacttgtatgactttttgtgaaagatccaataatatatctttataaagatatatatattttacaacttattattatgttcattcagagaatttttgtactgtaacttcaataatgttccattgaagattaagtaaaaacgaagtccagctgaaactttgctttgtattaagggtaataacattttacccacaaaaatatgaattaatatgtcatctcaactaaaatatggagataagccaaatttttcctagttataaaaaacaaggcaggttaataattgccaaggtgaaatggtcagtttatttgctctctaagaaaaacaaaagtattccctgaggtgcaaaattgtgaaatttaactggaagcatcgattatactctggacaagttgttccttttgttttaaaatcctctagaagattttctaatgtgtaataggcacttgttagctccattaatcgtattgtgtaacagtttcttactggaaatctgggttcatcatttcttctttccttctgatgtaactcaagcagttgtttgccatttgtcctgtggtccctatttattcactcagattccagtaaaataccaaagttttgttttctttctgttctttgttatctactggacttgagcactgacgatgtttggtcttcccattaaacatcttcctgtccttcacgtggacattttgaagattattaagggaaaggtaatcctgttgatttactggaaaaaagaaggaaaaaaaaagccagttagactgaagtgatttgcacacacacagaagaagtggaaattatacattcataattgtagagaattcaagctgctaatgttaaatttcaaaagcaaaaatatgggattattcggctaattcaataatgatctctgtggtaaaatgacatattttgaaatacaaacttatctttccttcttgtatgcctttagctttgtccccattcaagcaataatttagccttgtgttcatttcctcactggagggacataacattaacagcagctaacatgtggtatacttatcatgtgctaaacatggtaattttatcaactcactcagccacacagccctataagtaggtactgttaatgatctccatttcacaaatgacgaaactgagacacagaggtttaagtgacttgcacgaggtcacacagctaacaagaggtatagctgggctcaaaggcaatcctgctcagaatctgtcctcttttctactaaaggtagactatgctgtctttcggaaacttggctagcatcattacctcaggagaaacttgcaaaagttaatcaggcagtaaggactactctagggccaatactttgtggaggaattccaaaagccaaattttcttggagtaacattattccatggatgtactgccataacatggtggaagaactatcatcaggaaaggtcaaaattatggccaggtgcggtggctcacgcctgtaatcccaacgctttgggaggctgaggcaggtggatcacctgaggtcaggagttcgagaccagcctggccaaaatggcaaaaccccatgtatttttagtttctactaaaactacaaaaattatccaggtgtggtggtgggcgtctgtggtaccagctacacaggaggctgaggaggagaattacttgaacccaggaggcagagattgcagtgagccgagatcgcgccactgcactgcagcctg

SEQ ID NO: 587501 - DNA, 4001 bp, Homo sapiens
caactgcctaagtcgtaacattggctggagcacttaatagctgtgtgaccttcagaaagttacttattggggcctcagtttcaccatttataaaatcagggcagtattattacctaccaaccttagaagggtatttggaggattaaatgagataagcacttaaaacatccacagcacacaggcggcattcaatgactacttaataagcaatgctaaaataactgtatagtgacaacagtgagtgcttacagaaatttctgtgaactacctacccagtgtaacaaaatttctcttaaacactttcacttatattcttttcctttcactttttttttttttttttgagatggagtcacgctcttgtccaggctgtggtgcaatgggcgcaatctccgctcattgcaacctctgcctcctgggttaaagcgattctcctgcctcagcctcccgagtagctggaattacaggtgcccgccaccacgcccggctaatttttgtatttttagtagagacagggtttcaccatgttggccaggttagtctggaactcctgacctcaggtgatccgcccgcctcggcctcccaaagtgctgggattacaggcgtgagccaccgcgccggcccttcctttcactttttatttctctataatgatcagctgttgacagcagagattctgtggcatccaatgcgcaatgctagtaattgtgtccattatacagggagaaatacaagtgaaatcatgacctaagacgtgacacctagagcctgggggagtggcctgggaaaggtaaggctgtatttagtcaccaggaaatcacccacagtcacgtgagaacctgagtatttcacaatccagagagcagacttgaggattatggggctaccaatttaaatcagtaaaacactatctccaatcaaaaaaatatatatgggtagtgacttctactcattcacaaaatcaaggtaaacaagccatcgaatggatttacctagaactacagaagtaagacctaaggcgattatctctgcaggttcacagggaattaggaatcaacattaccatctgaaagcaaagaactgatggaactgggtgtcagcaaagacggggtgacagaggcaagaaagttaccgcagtccccagtacacctcacttgtattatgtacgaggcgatgcagggagacttaagagaggttcagtagcaaatctcttttcagcctttagcctggctgatacgaggcgctaaaatacagattggatgaaaatgtctctgggctccaagcagagccagccactggaagccctcacacttcgtttttagggtgagcaaatctggccctggtttcctgcccggctaccagaactgcaccctagcccttgggtcttcactggttgttagcgacacagcgttctgggaagccgtggaagagagcgggaaatttcttatatttacgaatcgcgacgcctgaacagctgaacgagtgcagtcaagggtgcagcagtttccgcgtggcttaaagcaggcggaaagccgagacctcgctgcttcgcgtccccgcggtctcgcgccggcgccgccctgggaagcggcgacgtcccggcagccgcccgggcccagcgccatgcaccggcccacgcggcgccacgggaacttcggcctggcgcgccggggccggaagcgcgcgccgcgggtcttggggccgctgggcctccagggagtgtcccgagccgcggccgccgcgggggcgttacctgtacaggacataggagggcgagtccaggctcacaaacccgtcgtccatgggggacgccacggcttccccagcctcggccgccatctcttccttgtgctgctgctggggcggcggtgggtgcggctggggcgggggttgcgccggctgcccgggctcgcccccttgcgcagcctccccgaccccctcggtggccgccatctcgcctcggtccgcagctgaggtggtggcggaggccccgcccctcccttccccctctcgaggccacttcctgttttctgggtttcctaccatagaggtgcgggccagagagtcttggcgggctgccggggtatgggtgggagtgtgcgggtgctggctgcgggtgctggctgcgtccgccgcgagtttgcgcggctctcccgagatcccccaggctcccacgcgtcttcccatctgtcgccgttcccgagctttgccgatgccattcggaccgtgttagtgctgttagtggccccagcagggagagggcgattccttctttggacggaagctgcaactgagggtgactgggggacactgagcactcagccctttgcgtccatctcagcattttcaaaacgaaatataaagcccgggcgcggtgattaacgcctgatcccagccgctcggaggccgcggcgggaggatcatgtgagccagggaggtcgagaccagcctgggcaatctaatgcgaccccatctctaccaaaaatacaaaaattagctgggcatcatgtgggtgcctgtggttccagctactcggaaggctgaagtgggaggatcgcttgagctgggagtttgaggctgcagtgagcagaaatcaccactgcactccagtctgagggacagagatcctgtcccaaaacacacacaccattagaaaaagaaagtaatatttggtgaagtttttgtttgtatttatatatgatcggatataatggtgtaaaccaaaaaataaaattctgaacccaacaccaaaccatctgaatagacccttcctctctgccaagggctttccaaagttaacctgaaaaacttgttcaggccatgatggaaggaggtgggggtgagggtgggtcattaacatcaaggccgaccttaagtctgatgagaaacatttacaatctattctttctgaagcctgttacttggaggcttcatctgcataataaaactttggtctccacaaccccttatcacaacctggacattctattgataacaacttaaccaattgctaatcagaacatatttaaatcggcctaggacccggaagcacccctctccctacactttgagttgtcttgtccttccaaaggaaccaatgtgtatcttacatgtatttgattgatgtcttatgcctcccgaaaatgtataaaaccccactgtgccccaaccaccctgggcacatgttctcaggatctcttaagggctgtgtcacaggccattaatcactcatatttggctcagaataaatctcttcaaatattttccagagtttgactcttttcattaacaatgggtcatatgaatgtatgttgttggggctcagaaaagaatatcccaaatgaaggtctaagcatcagcttcacaatcacagtctctctctgaccttctcctgccctcctctctgtggccactcatcctctctgaagcaagccacagcaactagaatctctcttccccctggcaggtcatagaaaccagaacccttttcccccaaagccagccgtggcacctgaaaatactactctaaccttcctccagccctgcctttctatgtgacagctggctgtaaagaaactaaaccctagttccagagggctcctcttccactgggtgttgcagggaggaacagtgaggccaaggaaacctgaacagacaggccttgttgaatttctccactccatatattagcattaaatcatcctctttttgttcaaatagggtatagtattagggcagaaatagctacatcaaataatgggacacagtagagaactcacaaacagatccatgcatatgtggatgcttgagactagacaaaggcttcattgcagaagattgagaaaaggacggtgttctgaacaatggtgctgggtcaattgggcacccacagaggaaaagaaattgcatccctacgttatactacatagacttcaatgtgaaaggcaaaacataaaagcttaagattctgcacaaaacagaaaacccaaaatggcaaataa

SEQ ID NO: 587502 - DNA, 4001 bp, Homo sapiens
ccccttggaagagggcgtctagatcgcagagcagccctgggggccctcgggtttcaggggccaccccccagtaggcagggctggttgacggacactggggacaggaggtgggtggtggtgccaagggcattaccacattgggagtgtagataggcaagtaggaggtgggcagctgcccccagagggaggccctgtgtcccccgctggaccgtcccccaggaactgcggtgccctgcagtaagtggagaggccaggccctaggctctggggagagggttgagggcccgatggctcccccctgcacagtctccccctccactctcgtggggccaggaagggggcagaggggccacagaggcctctcagaagagggaaggggtggggtgggcaccgcctcctccccactgttccctgtgcctgcaggaactgggctgctctgtggagctagccccggccagggtgccccctccccggaccctcctagcagggacttgatgctgaagccctcactgggtggtggcgggggactgggcggccggtatggccggccgtgcagcacgtaggggcccaggtccttggcgaaggctccacgcgcacctccgttctgccagcgccggcacagggcggtgttctgcagccggagcgcctcagctgggatcaggctcacgtcgaccgcccagaagttgcccttggcctggggctttgcagggtccttgggcacctgggtgtgggggtcagacatgggtggggctgcccaaccttggatgctcaggacttccgcgcgcgctccgcccccgggctccgaccctggcctgccccaccttgcggaagcatcggttggaggaaaggttgtggcgaatggagtctttccagccctcgtagtcttccctgaagaaggggaacacggcctggacctgacggatgatctgaaaccgccaggcggccggccggcgccgtgagcccagacggggagggggtagcgccctacccctcccccactaccgggctcaggggcgcgcggtgccggcccctgctgtccccgaagaaggacatttctgcgcggaagcgcggcagagagggcaaggggctcccggagaagggtcgtgccttgaggccctcagctctcaggactggtcccactggcatacctgggtgggctaggaaggggtgggggtcagggcttgaacctggaagtgggtggggaacgagtctggggaaagagagagtgggggccggggcccgctcacctgggccagcttcagtctgcgggagggagcggcctgaatcaccaaggcgatcatggccaagtaggtgtaggggggcttgtcatgtcgcaggtacctcttcttcctcctcttagggggctgggagggcgactctgcctctgggggccccaggcgggagccgctgcagggccccatgcgggacggtagacagcgtgggcaggggcctggccgggtggagggtgcagggcggtggggcagtgtagaaggcagggccgggacctgaggccgggctggggcaggcgggctggggcctttatcattcggatggaagggggaggggagggaagggaggaagaggctgtgggggaggggagcatgccgagggcttccacaattagcaggttttggttaatctggaagggaggggcagagagcattctagtgggggcttctcctgaggcctcagtctccacccctgagttgcctttgggtggccaggcccggcttcaaaggggctgcgatgacccatggctactttatcccgtcttccctggtcaggtttcaggaccccatttaacaaatgggggagtatttagcccatgccaagctcccaaggcgtggggcgctcctggagttcaagatctagcagctgctagtaggccctgaactatgggggctggatatccacccaggacatgatcaggtggagcttcctggaggagaaggccatgaagcccgcaccctaggaacaagagggggacacattgactcaactgatttcctgggagttgcttcaggagcccaggtggaccgctcacctcctcctccctagccatctctgctcctccacccaagcaaggctggtattgtgtatcctgccccaaagcccaggttctcctccctcacaaggggcaagtttgcccaagaggatagcagctctgggaattagcagcggtggttggtgctggcaccaggccaagggcccccagacacacgggggcccagggatatgcttttgcccttcactctgagaattcagcttttcttgtgcagcctccaccatgataacctcaaagggctgaaaatctgcagcatacggtggggtccagcacaccctgaggtgtggaggggagggacaggcagcaagtgtccaggaggaggaggcctgggccgcaaggggccttgtatgtggggtaccacactgctcctgccccccacacccccggtcgggtggtgccccttttccttctatctctgactctcccctcagacgccacgtggtttccctcaggactcctgccaccacctctctgctgtgttccctaggttatggctgcacaatcctgtgcctcatgaggctaatacttgtggccacttcaccccattcggtcagcaaggcgtcgttctttcctacaagtgtttgttgttgttgttgttttgagacaaggtctcactctgttgcccaggctggagtgcagtggtgcgatctgggccccgtgcagcctccacctcccccgctagggcgatcctcccgactcagcgtcccgggactacaggcgtgcgccacagagcccagctaatttcttaatttttggtagggaccgggcctgcctatgttgctcaggttggtctcccgggctcaagtgacccactggcctcggcctcctcccaaagtgctgggatcacagacgtgagccaccgggccgggcctttcccataattttttttttttttttgagacggagtctcactctgccgcccaggctggagtgcagtggcgtgatctcggctcactgcaagctccgcttcccgggttcatgccattctcctgcctcagcctcccgagtagctgggactacaggcgcccaccaccacgcccggctaatttttttgtatttttagtggagacggggtttcatcaggttagctaggatggtctcgatttcctgacctcgtgatctgcccgcctcggcctcccaaagtgctgggattacaggcgtgagacaccgcgcccggtctcccgtaagttttaaggcacccccctctccactggcgcttccttggtggggcgctggaggctccccaagttctgaccgctcttctccgaccgcactgtcctgggcccgaaaccacccccaaagctgccacccattccgctggcgcccgtcccgttgcccgcgatgactcggttttgtccagcataaatcaatgaccaccgtcccgggagccttggagcactttgagccattcccgtcccacccacgccccaaggaggtcccagccgcggaggactcgcccggccgcccgcagctgtccgcgttggcccccacccccgaccgtccctccccaggccccgcccccgacatttcctcctcccaggctccgcccccggctcccacggggcaccgcggcttccggctatgggtaccgcgggccggaagtgtagcgttgccatggcgagggccgggtgcggggcccgcccccgcagcgcctcagggagcgcggggcccactgacccgcggaagccagcggacccacttgtgcggcggtcggcgcggggcgcgaggtgaggcgcggactcccgggtcctgcggcgggagcggagcgagggagaggggccccggccagggagagcagtggcgggcccgggaaggaggggcactgggtcgacaccgagagaggaggccgggccggggaaggatgaggcagaggagagggaggaggccgggaagggcgggaggaggaggagaccgaagggagagaggaggctggcga

SEQ ID NO: 587503 - DNA, 4001 bp, Homo sapiens
tatatttatatattatttttcttctactcactgttatttttaaaatatgcaactaactaaaattacagtttctacatgtcgttttcaaattataaaaacctatacctactaaccaaagggtacagttttatacctgcgatgcaaaaaacacttttctccatggttcaagggagagaaaattctgcataagtagcacagtataaaacaattttactgcgtagttttctggatatctagctattgggatttcatcatttgtcatcacagtgaacattttaaccagtggccccaagaattaatccactgtgtattcatgtcctggattcccactggtgatattttttttactgtgctatcaagtagaaataagcagtatctggtaagaagctaggctcaaaaatactttcctagtaaattaccaaaataacatatgcacttggctacaaagtggtttttttctgcttctctcctaatttcaaagggatttcatagtaatcaataatttgcttatataatgcctcttccaccaatagaaaagcacattgtgtaaagctttgtttgaaaggctcctcaaactaacaaggagtttacaatttgtttaaattaccctaaatggttcagaataagaatgtagctgccatttttatattttgccagaggttacaatctgaattagtggcaagataatacttttgaaaattccaaggcaaatagttacatagaagacaagtttaaccaaaaaattgcttctaactctaaaaaaacccagttgctcttaggggtattttaaaattcataatttgatatccttgcaaagcagtaagagaaagcttactctttcctatacgacccaagatcaaagtgaaactagactattaaggaataaaaacaacaacaacaaaaaacttttaattttattaagtaaactgaatccctaattaggcattaactccctttagttgtgttcatctttattttaaacgtgttagaaaaataatttaaactgtcttcatatacacaatcatgccattaacaagtttacttattgattttgtttatatttgttagttaacatatattcaataagtgtagacaatgacaattcataaaaaagcaaggttccatttctctagaaactgctaactttatataaattttatataaaattgaaaattccagtgaaatgtaatcttaaatgagaaaaaaagtatctctcagaagcaaactaaataatttaattttaaagcttaagaagtttatgaagtgatgtcacaaatttcaacccacttattcctccctaacctttacttttagaaactacaggagggaagggggaggggaagacagtaaaaagtagcttaaatgcaacagaaaaattcctcatagcctcacttttctctttttaaaaaatgcaaaacaaagacactattcattgctcccgttgtggggatgcttactatgcatatctctatcacgactaagccaaagcccaatagataggaggcgccataattttccataacaaaacaaaataaagcttacctttgtatgtggttcctgtctcttaccaggcaaaaactggaaatctggggaatcatctccataactttcttggttggctcagaaatattgcttttaaaatctgattgggtctctttttgctgcaatagctcctgtttggcatattctttgagccttttataaagggtgcgtaggccctgtgctgttcgaggagggcggtctactccaattgcattatagttaactgctatgatatcccaacatctattcttttctactattactgaatgtttattagtgtgttcttcgagaattttcacatatggcttcacaagctttagcaaatcaagcttttcggataaggtaaaattggaagatctagcctttcctaccattgttcttttcaaattaagtaggcagtttctgaaaccaccatgcagccttcagctctgctcagctcttttcacaaacagaaaaagatcaggcttaactaggctagcctcatttaggcccacgcctacaggggagggtttattaaaattcctccagcttaagctgacgcaggttcaggaaatctgcttaagccaagcctgacctacataaagcttctcactgaagaagacaggaaggcacaagcaaaacacacttgtgtataaagggaacagctcgagacaggatttaatacacaaaggtctagagataagcatggaacacagctaaaaattagctaatttagtgagaatatcaaatttcacacatgtatgcctagctgacagactgaactgcattgcagtatcactttaataaaaacaaaagaggaactgttttgtgctatttatttacaaatccagtagacagaaaactaaaagatatgagtagtgaatgtagtaattcctaacagagcctctcatcactgtttctgagctgagtgttctcccttacaaaatctgcataatgctggatctgctgtcaatcaggaattgcatatcctctagctagttaggttacacccagacccagactccacagtaaagctaagcttctccttcattttacagtctacattagcctctgcatatttttttcacttaagaaaaaatttttatagaacactcaatctaaaaagcaggtaaaaatcatgtttttaaagcaatggattattctagccgtaatgtatgtgaatttgctagcctgccttatcatgtgtaaaaaatcactgttcatggtgagaaacagtataatcacgccttaagactccacatacaaaatcacatttgctattataatagagccagattttttatttagctatattcacacagtttggactatgaaaggaaacagctagtctagccattttcaaggccaccagtttcggtgcttagaatatatttgttaaccccagtatgaaaatatatgatacataataatgtaagcaagacaaacctattttctcacaatatacatatttttccagataggggaataaattagaacatacttgaacatagttctatccaataaaactattactgaacaactgtgatagttattaagaggtaggaaaaataaattgtttttaattactgaccacgtatataaatgctcccaggcactgtgcaagacccaatgaaatcaaaaatgaatctagatacagcacctatccagggaactgtagttccacagaaatgctataaattctcaattatcttgtttttcattcttttaacaatggagaagcaaattacatttactgagctctcactgtgagccaatgtgttaaaagctttaagtgtattatctttcagaaaacagtgaaagattgctggatgttctacggaatgctagatgttgtctggtatacgctactgagtaatttgattccataatagttctaccctttcattgtctttgagcagtttcacagctctgtaaattgtagaaatcagtaatgcaaatgattcttgtccatagagatgcaaaaagaaaatcgacctgccccaacaacaactggaccacaggtactcaaaatcattctagcattttctgagcttttggaacattaaaagagaaccaaagaaagaacatagggtatatactttatttagataattattttgttattttcagaagaaatacaggtattacagaacacagggtatatactttagataattattttgttattttcagaagaaatacaggtattatgttaagaatgaaacactactaaaatatgaaaaaatgttcaatctcactagttatcagggaaatgtatactaaaaatgattttcattcctagattagcaaaattttttaagacttaaaatgccaagagtgaggccaggctcagtggcacatgggcctgtaatccaacagttttgagaggccaaggattacttgagcacatgagttcaagaccagaccgggcaacatggagaaaccccatgtctacaaaaaatacaaaaattagccaggtg

SEQ ID NO: 587504 - DNA, 4001 bp, Homo sapiens
actgtagaatgctggtaattgaattagatattgaatatctacccgaaatcaactctttacattccgaggttggtttttttgtttttgttttttgttgttgttgttgttgttgttttgttttgagacagtctcgctctgttgcccaggctggagtgcagtggcgcagtcttggctcaccgcaacttcctccttccaggttcaagtgattgttctgtctcagcctcccgagtagctggaactacacgcacacgccaccacatgagcccagctaatttttgtatttttagtagagacggggtttcaccatattggccaggctggtctagaactcctgatctcgtgatccgcccgcctcggtctctcaaagttctgggattacaggcatgagccaccgcgcccggccggcctacattccaaagtttaaagcatttaaatatgggttggaaatatctgcctactgaacaacatttgtacatatataaataacattgtttttccaaactatattctttttacttcctgaatttaaccatagtttgaaatttttcaaaaatattgtttgtaagataaaacttgaaaacttacttttttttcttattgtagaagacaagcaataacaacacagtaaaagttgagatcgtgtttttaattcactgttacacactgccatctagcaggaagcgagcaagagttattacagcaatttcgaaattggaagacctgaatgatcacctgaggctacccaatcgcctctggcttctccttactcagaagaaagttttaaaacggagactacggtgctgctagattggaggcagtgaaacttcagcgttcaaagagctgagctgcttattcaatgcgagaaaggcctccatttgagactacggtagaccagggagaaaccctgccctagttgtagtgtgacgttactaacaagcccaagattggtcgtgagtttcctgggtgtctcattggaaagaaaggtgtacgaagggaataaagtcctgaaagccaacttgccttattcaaaactgtggccagccagagctggatgcattccacaaactaaattaacaatccaagtcatttcatgcacaaaacactctaaccaactattattgcagggagctgcagcagggagcagggggcaggctgttggggccgtggtgttagaaaaagtcattctgtgtgacatttgctttattttaaagaatcattaaaagattcccagaaaatgtcataaaatcacagaaaaattacttctatagtttacaaaaaatgagctctgttctgagggtactaatcgggtgcaaaatacctaacacatggcttgcaaatgggataacccaggcctgcggttgccggtgctttcctggggcattttctccattaaatacgccgtattctctgcaactagaaagtcacagttgctacgacttcaacacaacattcctgcaacaagtgattctctgggaagacctgggggagaacaaggcaattcgcgccccgcaaaggcagattaggttctggaatggacggccgcggacctggggaggaggccgatcggggcaggcggggaggcgccgggaccccgcgctccttctccgggctccagcagaggctccggcccggcacccgcctcccgcctggtggatcaggcttcaatctcaggcagtggctctgcctttgcgccactaagtctccaaaacagacttggattattttgcacacaccattccgtctcttacacgcaccccctgctcggtacagagagggagtttccttaggctgtgactcccggaggtagtgtcccagcttccgtgggaccagaaaagcgtctttccgtgtctcagcatcaagcccctacccccaccaagagaccacagaggccagatgtgatgcggcgctcgcactcacctcgcgcggagcagggttcgtcccgcagaatgcagcgcagcttcctttctccctatgagcccaagcctgggcgccgggaagacccgaagagccgatcaggagcggaagaggcggccgcgcgggcgagctcggggcgcgttccggcggagccagcctggatccgggttttcactcgtgccctgttcacaagctcttgggacccgggttctaagaacaccgggccgccccctgctgatgatcttggttcgcagtccgcctgaggccacggccctatggaaagttctcgggaaggctgcgggggccctcttctttaagacaggggaaactctccgcttctccaactggactaggactggagcgcatgcagtcacctattcaggccaggcgtggcagcggctcacacctgtaatcccagcactttgggaggccaaggcgggcagatcgcttgagcccaggagttcgataccagcctgagcaacatagcgggaccctgtctctacaaaaaatgcaaaaattagcagagtgtggtggcccatgcctgtagtcccacctactgggaggctgaggtgggaggatctcttgagtccaggaggtaaaggctgcagttaaccgagatcaagccactgcactccagcctgggcaacagagcaagactgtctacaaaaataaataaaataaatttaaaaaaaaaggtcaaagtcatttattcaagaaaagattgtactggttgctatggtgtgaatgtttgtaccctgccccaaattcatatgtgaatttcgtgcctttatagtctatataaatttacaaatgtactgtgtctttatgaaagagaccagagcaagcttctgccatgtgaggacacatagagggtctcttgtatgaggcacagacgctaacagatgaggaatctgccagcgtgtttgttgatcttggacttcccatcatccagactgggagcagtggagttccgttgttcatgcattacccaaactaaggtgtgttgtgatagtagcccaaacggactagacactggtaaaggaaagctaattgacttcaagctactgagttccaaatccaaaaactcaaataaaattattgtgccctagtctaggaggtaataaacctaaggaggtaattcagcattttgggaggggtgggtctagggcaaggcaaatgaggtacttagggctcaaaatctgaggaggtgctgaccctgggtgtcctgcagtgctgggtgcactgcagaagcctgagagcgatttgctgtttcgggcctgcctccctctggtcccgaccctgcggagctctggtgccaagaaactcaacttttctatgaaaacaggttgataataatggtgtccacatctaaaaaacatcaaacacacagaaaagattgataaattagatatgattaaaagtaagaaactctattcatcaaaagacaccattaagaaaataagaaatgggtgcagtggctcacacctgtaatctcagcactttggtaggctgagacgagaggatcacttgagcccaggagttggagaccagcctggacaacatagggagaccccgtctctacgaaaaatttttaaaaattagccaggtgtggtggtgcacgcctatggtttccgccactcaggaggctgaggtgggaggattgcttgaccctgggaggtcaaggctgcagtgagtcaggattgtgtcactgcactccagcctgggcaacaggattagatcctgtctcaagaaagaaaaagaatgaaaactgatctacggaatgagagaaggtatttttgatatattgtatctaacaatgaatttagaatataacaagaactcctaaaagcaataagaaagaaaagcaatcaataagtacagcacttcaccgaagacgaatccaaatagccaggcagtatgtgaaaaagatgcttaatgtttttagtcattaaagaaatgcaaatgaacacgatgatgatatatactacacatccactaaaatggctacagattttaaaactgacaagacaacacaaggacaaagccgtgaagcacatagaactgttatgcactattgttgggggtgc

SEQ ID NO: 587505 - DNA, 4001 bp, Homo sapiens
ctctccttccccagtgataaagctttcactttgttctatacaaagaaagaatgtgcactttgctattaaattcccctagccctctctacttcaaatatctcaatcacggaactcccaagaaatagccacctaaatgctcaaagcacaaaataaagctcagaagcatagagcagctaggatgaggaaacagctcattgtccttctccttttataaatgggacgatttaggagagatggagatagagaattttagtagtggatgagggaaaaggggtaggaggaaagagagggtagaatgataggctttaccagtaatttacttattttcctaatagtttcaaacaatggggtgggggggtatggtagaagaaaggctgcatcttagttatattttatcttcagctcttttatccttccagccccacccagtcaagctcttacacctctttcctaggctctccgactctgaattttttttatctttgtgggtttttgtccttttttctggaggaaaaagatagtattgatttgtttaaaagtaaagacggaaagcatcatcttcaggagtaaccacttcttaataatagaactaaggacttctattctttttccagactaaaatgcaggaatggcaccagcacaccaccaaggactaaaggagggtgagggaaggaggtaacatccccaggggtagtcaggtctttgtttccttgctcatatcatattggctttacaaagtaactcaattcccatcaataagcattcccgatcagaactacttctctaagatgaggctgtatctaaacacttccccgtaacagtcactgatgcggctactctgctgtgctgctgctgcatctccctcaacccagacgggaaccaaaattcaaagagtcattctacactgggcaaaccgccggacctccttcatggagccagtctctctaaatctgaaatctactcctctgcctcaattcatggcacgtgcttttgttcttaaaaacaaagccaagaaaagcacccttggcttctcttacaacagagggatcgaactcaagactcctaagatgtaaaacaccgctaggaagatgtttacatgtcttgaaaggacacaaggctccttcaccttgctggctatttcacagcagcttcatttcagatgcggaccctcggggatccagcagcagccaccccacggcaaacccacagcccgcggaggaggcagccgggggaagctcgcggaagggagcaaggactttgcaaactgatggacgggaggggaaactttcaggcgtgggcaggcaaaggtgggcccgaagctgacccgagccggggccgggagcctggcggcgcgcgcttcgggcggccgggagcccccggagcattgtcttccgcctacggcccccggcaccccgcgctgccgccggctccggccgggcccctctctccgccgcgcagggtctgagccggggtagaggcgagcgaaccgcggtccacactcgcacaggttgccgagccgcgggctcagggcggacagggttaacagtctcccggggcagctccccccttagccctcagccctcagcccccagcctcaaactaggcgtccccgaggcccccagccgccaccgcgggcccgggcccccgctccgcagcccgccacagtccggcgcccaaggcttttgttgtggccgcgacgagaggaacgatccctgaggaggaggcgccgggctgctgctggctcctcggcgcgggctgaggcggagcagcaggcagccgcgcggcgcctcctcgggctccacactcgccgctccttctcccgctgccccggcccaggggcccacacgcttcgcggggctcacctcagaccccggcgcctggctccaaggggtgggggggctgcaccgcctgccgcgggcggccgcgcgtccctcaggtacccggagcggccgaggaacgccggcgcgcgcctcccagcgacagcgagctttcgcgagcaccggggcgcgcggcccggagagcgagctcacgagcgcgcgcgcacgcacggggcaggcgcactgagtacgctcggccgaaagctccctgccggatcctgggcttgcgggcctggcccggcgcgcctcgttgttctctgcctctcgccctgagtgacgcctggagctcccttgctccggcgtgctcgttcccagccctggaggcgctcatctgagatgcactcggggccctcctcgcaatgcactccgtcccctgatgacacagcgcggaggtgtgattgcaggaccacctacacctggtctgagaaccagaggtgccgacctccggacctggggatttggggtgctcaagaggcagatccccggatgctgagggtggaatggggtgcaggagctctggcctgctgcagagctccacgcgaaacagcgtagcggacagaataggctactcgcccgggatagttcatagcctcttggccaagaccttaggaaacaggtggcgctggtcgttactggtgcgcgccccaatttttgctccttaggaaatgtttctcctctccttttctacataagctgctttagagctgaaagaattcttaaagataatctaaaccgaacctctcatttttcagacgaggaaaagaacgcccccaaaggttagatgatttacctaaagccatgcagcgttttaacaacagggcctggactcgtcccaacctagggctgtctttcttttcactgcaccgtttaacctgtcttttctttctcttctttttcgttcctcgtcaacctggatttcatgggcatcattttgttctgtcggtagcacatagaacttaaagaaattgaacgatgtgaatggactattagaattgtacacttaaaaatgtttacagtggtgcatttatgttatgtgtgttttacaattttttttagaaaggcgcttgatacgtgttaagtaaatgttgacgaatgttgaacttagacctagagtttcacatcagaaggtgaactgtgtgaacaggcctgataaatgagatctgaaatgacagttacagtttctctaataagtaaatacttgtgcagtaaacaatgtttaaaataatattgattcttaggttgattctaggcagggcagtgtatcctctggagccagcggtgcctctgtggagagtgagtgagggggcagatagcgtgggggaaatctgtgtgtgtcagatcccttgtagctggggaacctctggagatgtgctgcgaggtgcatttttattcaatttacacaccatcctgtaaagactgtcaggaatgagacacatcataatagctcaacatcgggaggtgggaatgacgtagaaatgatcgccactgtatcagcatgactaaattgcagaaaaagaacattgagtgaaaaaaaaaaaacaaaccacaagatatgtaagtgatgatgcctctttagaaaaaaaagactagcaatactatacaatgtttatgagggcaaacgtacatataataaaagcatgaaaatggacagaaacgctgcacaccaattttgtgacaatgactgcctctaggcaggcagggagggggatgaaacctgggaatgagacaaaagaagcttctactgtatctgtgaaatacatacaaatgtactatttaaaaaaaatcttcgtggagaatcaagggtgtttcttatgaaagtgtccaaatctttctttatgtttgaaatatccctcttaaaagtaattaatatttggggctgagtgaggtggttcagacctgtaatcccagcattttggaaagccgaggagagaggatcacttgagccaggagttggagaccagtctgggggacatagcaagatcctgtctctacaaaaataaaaactaaaaaattagcctgggaggattgcttgagcccaggagttcaaagctgtagtgagccactacactgcagcctgggcaacaaagccatccctgtctcttaaaaaaaaaaaaaaagtaatgt

SEQ ID NO: 587506 - DNA, 4001 bp, Homo sapiens
gggatttaattttcaaaaggacttttcaaaacacaacttgtacacaacttgaagaaatcggctctgtttaaaaatagacttatttttactagtttattctagaacagagcataaactactattcaataaacgtatgaagcactactcacctccatttccaccgcggcaatactctggtcataatgacccatcagattagggaaaaacgtcatgttgtaggccattttcatacatctgggaacagtaattggttcacaggtgaagagactgtgccctcttaggaggggtagaaaaatacacgtcaacaaaaatgtaaacatttccattttcttcaaattcctgattttaccacatggcttggatgaatcactctttgcatcctcagaagatccccatccaaagataaaatgttcaaattcctcatttcactattttactcattttcaggctttcctgaaaatgagtcctgggtcaattactgtaaaaacaaaaggagggtgtatcagcaacatttgtcataaactcaaatgtggagtcaaagtgcagagttaagattttcaccccaggtaacaaacactggaaaaacaacggaaaattctgtcctaacgagatactcttccacctgccttagcatggaatatatcatttgctaaggaagctgcacctctaggaaaccgatgctaggaggttggtgctgtatggaagacagggttaaaaagagggaatggcaagagtaagatggaggaaaaaaggaaagctggtgattcggagtaaattataaaggattaatataagcatacaatctaagggcccctgttggaaagcttattaagtacaagaaaactaaggccctgggaaattccttaagacccaaagagttcttaaacttgtaaaagactctgaagagtcagtttttgtggcagtcttctgggtatgtagttttctcgattttcgtaaggccaactagagggagacttttaggattcctccagtggaggagcaacattgcagttttcactggctaggagggtgtagtgctgccgtcgaaaggaaagtgcgcaaatctgtcccgggggaagggcgaaggcagtccccttgcgggaggaaggctgtaggccccggattacgaattacccgcgccccaacacacactgatgcccggtccgccagcgccccacacccgggaacctgccccaggcctagagccagacagcagcgttcctggcctgcgcggcgccgcggggccccggcatcgcctttcagagccggttcccgcttccgaggaaactcaggtgcgggccgtcccgccgttgcctccccagcacctgcggctcccggcgcgcctcatcccagccgcggcccctcgcccctcgaggccctccccgcttcccccggcacccgcccggcccctgcccagtcccagccgtggaagcctcacctcggggggcggtcgaaggccgctgtcccttcccgtccccgtctaacccaccgttccccccagggacctgagacggctccggggttgcgtccgggactggagctgcctcgagagccgcacggggagcgagagctgagcgatcccgcgagactgcgccgccaggtcgggcgggcaggtccgggctcgcggcggcggcggcggcggcggcggcggcggcggcgggactggccctgcgcccgggcaccgcctgcgctgcgccgcccggcctcactccgcggcccgccaggacccggccccggtgaacgggctcggggtgccgaggtccggctgcggggccgggaagccacctccaccttgccgtctgttacgacccccgaggcgcaaggctgagccccatctcgctatccgggtccggaggggttcaccttagaaggattttttgaagctcttggcgctggctctaaaagaacccacttccttgcggatttcaggagtcaagaatccttaaacggagccaatttgctttgtaaagccaattgcccaagtgacttgagttcgaaaggagatacttcctggacaactgctataaaaacaacaacaaatacttttattaattcggggagcctggtcaccaactggatgctcaggtagcagtgggattccagccctggcgggtcccacagttttattgatacaaaccctaataggaagttgaactgctgtagaaatcaacctagtttggggtaccaactctgtcatagatattagataaattaccctaatctttaaggggcatagtttcctcacaatataggaatgacaatagttgtaatgatggttaacgttaattgagcactggctgtaagtcaaatagtgccaagttcgttacaagtgtttacacctaacctgtaaggccctcctatgaaacaggcagaatagtatgagaagcaaatgaacttgtagaagtactttgaaaaatgcaaagtaacttgtagatggaggctattcttgtcagataaatcatcctgttgcagaaaaggaatgtcatatttccatacctagaaggacaaccctgaacaaccagagtaagagttttggaatctgtggggaaagacgaatttggagtggggaattcctccccagttttatcaaaagcttactgatgttgggagacaggtagtgatgaagaaatattaacatcattaagagctggatagttgatgtattgcagaataaatttctatgtaggaagaatattttcccctaaatttctaattttctacattggaagactatttctctccagtttctacgaacttaatgagatctttttgtgatcaggctctagtgactaccaggcagtgaagtatcactaaaagtatcatttaaaaacgatactttttaaaatatcgtttgaaaacgatacttttaaagtatcatttgaaaacgatagttttgaaattcaagtgaatacttgttccattatttggaaggaaaaattgtagtaagttgatttatacagaagtaaataaagcctgttttatttttcattgtatttaattatatagtgagcagtgatgaactagaatgattttttttttgtcaggatggatttggaatacttaggcaatcatctatatcatcgcttgtctttcactgtacaatttcatcccaatggtacgagattaagaacacaaactttggagttcaaaatccctgggttcaaaacctagctccagcatttacttgctgtgtgaacttgagcaaattattcagatcctctttagtttcttcatctgtaaatatggaactatctgacggttttcctcattttccttctctttctctttgcattgttcctctgggctgatgctaggggacagtggtgaccaaaagtagaagaaacagacttttacttttaaaggctaattttgcaaggtacagaattataggttggtagtttttttctctgaacacttttactccacctctcttcttgtctacgtggtttctgagaagttggatgtcattctttatttttgttcctctataggtaagctcctcatcattaagtatattgttaccttagggtttttgtagatgttctttagcaagtgagaaagttccccctctgtccctagtttgctgaaagtttttatgatgaaaatgtgctggattttgtcaaatgcattttctgcatctattgatgtggtcatgtgatttttcttctttagtctattggtatggtagattacatgaatgaattttcaaatattggaccagccttgcatacctgggataaatcttggttatgctgtacaattctttttatgcattgctggattctactagctaatattttgttgaggatttttacatctttgttcaagagatatattggtttatagttttctttgctagtaatgtttttgtctggttttggtattagggcaatgctgctaggaagtattccccctgcttctatcttctggaagagattttagagagttggtctaacattgttggtgactgacattaatttggggaaattttcagtcactat

SEQ ID NO: 587507 - DNA, 4001 bp, Homo sapiens
ttataaagaacatataagtgctatgcttagaaaacaaagtcactttttagtgactttgtgatagccttaaaatacagtctacagcaacaaaatattctgataatttatttatttcagaaaaactgtaccaagtgaatattacaactacttataaaaacttgtaaatttcttcagttttagtccaggcaataaatattacatgttcagtgaagtagaaaaatattcagaattcgcatttctagaagaactatcatacttgattcaggaaagcaaaatattttctaggtacaaggtatttagaaatcatgtgtaaccatacttcattatataaaatgaaccctattcaaacgaatctactaaacagggccgcaaaggtacacaaaacataagtcagtagagggatttaattttcaaaaggacttttcaaaacacaacttgtacacaacttgaagaaatcggctctgtttaaaaatagacttatttttactagtttattctagaacagagcataaactactattcaataaacgtatgaagcactactcacctccatttccaccgcggcaatactctggtcataatgacccatcagattagggaaaaacgtcatgttgtaggccattttcatacatctgggaacagtaattggttcacaggtgaagagactgtgccctcttaggaggggtagaaaaatacacgtcaacaaaaatgtaaacatttccattttcttcaaattcctgattttaccacatggcttggatgaatcactctttgcatcctcagaagatccccatccaaagataaaatgttcaaattcctcatttcactattttactcattttcaggctttcctgaaaatgagtcctgggtcaattactgtaaaaacaaaaggagggtgtatcagcaacatttgtcataaactcaaatgtggagtcaaagtgcagagttaagattttcaccccaggtaacaaacactggaaaaacaacggaaaattctgtcctaacgagatactcttccacctgccttagcatggaatatatcatttgctaaggaagctgcacctctaggaaaccgatgctaggaggttggtgctgtatggaagacagggttaaaaagagggaatggcaagagtaagatggaggaaaaaaggaaagctggtgattcggagtaaattataaaggattaatataagcatacaatctaagggcccctgttggaaagcttattaagtacaagaaaactaaggccctgggaaattccttaagacccaaagagttcttaaacttgtaaaagactctgaagagtcagtttttgtggcagtcttctgggtatgtagttttctcgattttcgtaaggccaactagagggagacttttaggattcctccagtggaggagcaacattgcagttttcactggctaggagggtgtagtgctgccgtcgaaaggaaagtgcgcaaatctgtcccgggggaagggcgaaggcagtccccttgcgggaggaaggctgtaggccccggattacgaattacccgcgccccaacacacactgatgcccggtccgccagcgccccacacccgggaacctgccccaggcctagagccagacagcagcgttcctggcctgcgcggcgccgcggggccccggcatcgcctttcagagccggttcccgcttccgaggaaactcaggtgcgggccgtcccgccgttgcctccccagcacctgcggctcccggcgcgcctcatcccagccgcggcccctcgcccctcgaggccctccccgcttcccccggcacccgcccggcccctgcccagtcccagccgtggaagcctcacctcggggggcggtcgaaggccgctgtcccttcccgtccccgtctaacccaccgttccccccagggacctgagacggctccggggttgcgtccgggactggagctgcctcgagagccgcacggggagcgagagctgagcgatcccgcgagactgcgccgccaggtcgggcgggcaggtccgggctcgcggcggcggcggcggcggcggcggcggcggcggcgggactggccctgcgcccgggcaccgcctgcgctgcgccgcccggcctcactccgcggcccgccaggacccggccccggtgaacgggctcggggtgccgaggtccggctgcggggccgggaagccacctccaccttgccgtctgttacgacccccgaggcgcaaggctgagccccatctcgctatccgggtccggaggggttcaccttagaaggattttttgaagctcttggcgctggctctaaaagaacccacttccttgcggatttcaggagtcaagaatccttaaacggagccaatttgctttgtaaagccaattgcccaagtgacttgagttcgaaaggagatacttcctggacaactgctataaaaacaacaacaaatacttttattaattcggggagcctggtcaccaactggatgctcaggtagcagtgggattccagccctggcgggtcccacagttttattgatacaaaccctaataggaagttgaactgctgtagaaatcaacctagtttggggtaccaactctgtcatagatattagataaattaccctaatctttaaggggcatagtttcctcacaatataggaatgacaatagttgtaatgatggttaacgttaattgagcactggctgtaagtcaaatagtgccaagttcgttacaagtgtttacacctaacctgtaaggccctcctatgaaacaggcagaatagtatgagaagcaaatgaacttgtagaagtactttgaaaaatgcaaagtaacttgtagatggaggctattcttgtcagataaatcatcctgttgcagaaaaggaatgtcatatttccatacctagaaggacaaccctgaacaaccagagtaagagttttggaatctgtggggaaagacgaatttggagtggggaattcctccccagttttatcaaaagcttactgatgttgggagacaggtagtgatgaagaaatattaacatcattaagagctggatagttgatgtattgcagaataaatttctatgtaggaagaatattttcccctaaatttctaattttctacattggaagactatttctctccagtttctacgaacttaatgagatctttttgtgatcaggctctagtgactaccaggcagtgaagtatcactaaaagtatcatttaaaaacgatactttttaaaatatcgtttgaaaacgatacttttaaagtatcatttgaaaacgatagttttgaaattcaagtgaatacttgttccattatttggaaggaaaaattgtagtaagttgatttatacagaagtaaataaagcctgttttatttttcattgtatttaattatatagtgagcagtgatgaactagaatgattttttttttgtcaggatggatttggaatacttaggcaatcatctatatcatcgcttgtctttcactgtacaatttcatcccaatggtacgagattaagaacacaaactttggagttcaaaatccctgggttcaaaacctagctccagcatttacttgctgtgtgaacttgagcaaattattcagatcctctttagtttcttcatctgtaaatatggaactatctgacggttttcctcattttccttctctttctctttgcattgttcctctgggctgatgctaggggacagtggtgaccaaaagtagaagaaacagacttttacttttaaaggctaattttgcaaggtacagaattataggttggtagtttttttctctgaacacttttactccacctctcttcttgtctacgtggtttctgagaagttggatgtcattctttatttttgttcctctataggtaagctcctcatcattaagtatattgttaccttagggtttttgtagatgttctttagcaagtgagaaagttccccctctgtccctagtttgctgaaagtttttatgatgaa

SEQ ID NO: 587508 - DNA, 4001 bp, Homo sapiens
tatagtcacatggtaactcctaaaagcttatttgctttcaaaatatgcaataacttattggtttggcaaatagttcattccagcaagtttggttagagaatagatttttttaaaaattgacctgaggtcaccaacttttccctttgaaaataaagttaaagaattatgggtttaccttaataaaagatccagtatttgacttttaaaatcaagtagctgacctatttcattgcattttctggaatactcaactcctgcagttcttcaagataatgtaattttttttctttcataactttggaaaagaaaggagatttagaattttataatccaacttccagtatacacacaggtagtaacttgcagactttaaaaggtaaatgcaaaaaatgtcatcaatctaatatttgtctttatcacattctctgccttttcaaatggctgatatagtgcctgagttggattactagaacaacagaaggtggagaaaatactcctctataactttctggaaaaacaaggaattagctgctcttggaaaacgcctctggctggttgttgaaattgagcctggatcctgcagttggcggagaaagcccagcagctcccgaggctgccaaaatcggggagtttttgctctccttctgatcacttgtcccagttcaccccaaattcgcaggccaacaggaaatgcgctcccctttcaagaatcaaccaatagccctcttccgatctatttttcagaatgggagaattgcaagcgccgaaaagtccccgtccctttataggacactcctcgctggcctgggtttacgcctccgctctcggcctgcagcgaggaggacggtcgcacgctagccggcacaaccaagccggccgcagcaggggaggagacacagacgtgtgcggagcatcacctccacaccccaggctttctttaaaagcctgaaacctgctctcggttgtcttccttttctgggaacacaggaaacacttccccgaggcgcttccccaacctccacggtgcgggccgcgctgccccagggattccatcggccgcgggtcccccaccacgctctttccccagccaaaaggcccctcctttcctcaacctggtggcagtccgcgaccccggcacccccctctgcccacggtgacccctgagcccaaagccaagcgacataacccggcggatccgggcagccccgtggccggcggagggaagtcacggctccggtccgggctcgggcccttggccagtttcaggtagaagcagcgcgggcaggtggggtggtgagcttccagaggagcattcagtccctggaccccagccccgagggcgaggaggccggccagaaagggcatgaatagttccgccactcagcagcctctccgcacctcagagcggctcccgggggcccctgaggcccagcggagctgcctggcactgccaccctgcgtccccggagtcgctggtgggcgacaagcctccgtctacttccctccatgtgcgagctgccgtgcagcctgtcccgggcccgtcagtcccggtaacttcacgcggccaccatcaccacccaggccccggcctgcgatatgcaaacaagggttggagaatgtgcacacggggacagggattgaaagcgttcaagttcacacggaaagaatccaaaggcgcttccaatatttctctgttttgcccccaagtcttactttgacttaaagaagttgctaaggcaaagtcaaaagcagagcaggggttgggcaatttcggtgaagtgagtagcgcacgtctcttttcctcccactagctacctctctacctccagacaagcaaaggcggagaagctccgagtttgggggaccgcgggaaggagcaaagaaagggaagaaaaaagccctacctgctgggcctggaggttccgcgcacgctcccctgggagcccccggagctgcagcggcgacgaagcctctcgcggcccctgcgccggccgcctccaagtccccagctcgcggctcgggtccccggcccagcaactcggccctagggcgctgactggcctgtgggagtcacgtgcaagggcggggcgggggtgcgcggccccggctacacctccgctgggcgcaggctgcgggactgtgcggaaagctcccccagcaggcaaagtccaggctctggggtctccgcggaaaatgcccaagtgctaccgccagggagcggggaatcacccgcaacccagccggaggtcgattgggttcgctgtggtgcccagggtcagctttattaatgagttccctttctccctccccgcccccccttcctgtggtcctcatcccgcagcggcgggcgaggggcggggccagtagagaagaaggtgacctcttgggctcaactctcgatcttgtgtggggcactgggtcacccggggtgcccggctggatgctagttcctgggcaggggtagtggggatcctcccagccccggattccttggaggttcaggagacacccagactgcctcctaaaatcagagcgtagagaccgaagcctcccttttgccttcccaaaatcccagggagatggtcgggagcccaggcctcagcctcaattttatgtatttatgcaatctgcatcccttcctggcgacacttcccatctcctgtggcctcctctcttctaatctttcccccttttttctgcagcctgcggcggctctgcaccaatccaagggacgtggcaagggctggggagccaggcggtccaggggagcttcttcatggagggggctcttccagggtatgggggaggggaatgtgtcaggcctgagttgggagtcggcgtcagagcctggaggccccagcgcagcggggctgcgagccggagagtccctcagacaggtctaaaggttaatagagcaatcacagggccctattaccgcgtaaaaataacccatcgattaccgcagccttcagccccagataacagccggcgggtggctctcacgctttcggttaaacttttttttttttttaaggccgcgtttttctctccagcacgggcttctcaagccagattagagggatgggggaaggggtcgggataacaccctgcacgaaacccgtgctgctccgaaagcaggctgggaacgccacccgcttccgtagtaggaaatcaatcgtggattcccagcctgagtgaaggcaacccgggggttaaggacgaggccaggacgcggggctgggtagaaggaaaccccccatgggatcgtggccaactcctggggattctcaggaaaatcccagaggaagaaacgagcgcggctgcgcggggaattctcttccctgaatgagaggtgcggaggttcactggggcgcaaacagaggaaaggaaactgaggctgcctggggcgccgagcggcgaaaggcctgcgcacaggctggacgcacggcagccgcccctctagaccccggcgggcctgcatcccggaagctgggggcgacacacttagggtttcttctccgacttcccccaattcctagcctgctacttagcagaattggcgccacggacccgaaacgtgggaacttaaggctgaaggggtgctggggatctcggaggccggcgctgcggaaaagcggtctccggagcacgctccaatctgcgatccttcggactcagcggagaaggaagcagactccctgctcccggtttgaaaccggcaatcatcttcgtggggggcgagcgagagaggcgcgaagccaaggcctgcggcagggacctgcaaggccttcctggagagtggaaaatctgggcttgggcgagcgggaagctatcccggcctttcttttctcggaggaaatctgtggctccagcgctacccggggtctcagagctgcctcccacgcgcgacccttaaagggcgaaaagggctgagtctggaccgggcagtgaattttcttagcaacaagccaggggcttggggcttagtgtctggcggggtg

SEQ ID NO: 587509 - DNA, 4001 bp, Homo sapiens
aagtaacaatctcatacagcctttttagaagagcattcagctggaagctctgagcaccatgttctgctctcatcaatgtccattgtgatcagctgtgtagtctttggtaactctttgaagctacagttcacttcaaaggattattattaggaacaagcaagacaatgtgtaagtggcaaggattatgggagacagtcagtgtagtatgaaggctttggagaccaaagactctgccatacaatagctatattactttgggcaaccctgttgctttctcctcatttacataatgggaataacttgtctaccatgcctgtctcagacagatacttttgaagacattattgaagaaattataaaatgtctgacacataacaagctgttaataaatgatttacctaaatgcactatacaaatttaagccctataattccttagtaaagatataaaattcaaacaattcagaagtgactggggcaaagaactcaggtatactaacattctattctcctttaagatttattgctcttttttccctcttgtttttaaggtgaaaccatttggtatattagatgaaatcgtcacagtgcacatttagaatattatgaatttaagactaagaaatcaccaacacaaaccacacatttgcagttttttgcaagtgaatttttttaagtttcaacattaacatttgtattttgcattaaattattttaaatagcattacactagcctatacaaaatttgttattgacctatttgatatttgtgtgcttatggaaatggaaaaggtttttaatcccaaaccaccatcatgacacaagagaaagagagagaggagagagagaaaaagagaaagggaacacatagttgtgttgaaagtaaatccaagaaatcgcaagtagccttaacattaccatccaggaaagtctgttcaagataatcaatgatctgagtggcctcacaaattatgttttccccgtggataaggacaggcacttctccagttgagttcaaacgcataaaccaaggctcattgtgctcactcaagggcagacttacatcatgttcctcgcacttcaatgccttttcagcaattaccaagcgcacctggaagagttcacactggttactacaacacatgtaagctttcaattaaatgacttccctggacaccgctaagcagcctttctgggcttccctgtgttaccgacattttcaacagtcgttttaacaattcctattcctggaattaacaagtaaggaaagaacaatactcaacaaattaagagaagaacacaaaataagtaatgaaatgattctgactgtattcattaaacagtcaccctcctcatcactaccactttctcggtgtcctaaacctgattatgggtcctccccagacaagaacctgacatgtaggtacatcagctcttgctgaagacagtgaatgcgagagagcaaaagaagagatcgcagattatgagggtccacaaaggcacctccctctgcctctctccgaagaccagcaggcaaggcctccagaccaaatactgaaaatgatgcttttttgtcgcatttcgcgagaggcggagcctgggccatagccacataggatcatctccgatcgattctccccgctccccacccgggcgcgtccccgcctggagggagcgcctgcccggggtcaggacactggaggcggatttctaggtggaccggcttccctgggcgggactcagaaggagctgtcccagtgctgaagcccgatccgcgccaccctccgccgccaaggcctgttgtaccttttgagagctgaaggaatgcgtccaatggtacagaatgagcttaacctccgcgtcggccttgccttccgccctcaagggcgggctccctctctgctcttcctgcctctcagccatcttggggtgcgcgagcacgggtgcgcccagcctgtccgccctggacttctccctcccacactgccccgcaaggcgtttccgggttttgaggggtacctgccggaaggagggcgcgcggcccgctgggaaatgtagtttcgccggcggcagagtctgcgaacacgcggggtctgcgactggaaagcccctggcaagcctgggagtgcacctgggaggtgcaattgaacggttgttttttgggtttgtttttttttttagaagaaaaaataaaaaatatgagaccctggttatgaagggcagtaaggaagaatgatgatagcaaattactcttcggtttggaggttgctcaggtataaaagcagcaatttcccaagatactgagggttgctcttggagcctgttcctttgttggaaaggaagttccggtcgacaagcaaagcaacaggaaaaggatctatgagctttcattagaagatgctactatgacattagtggactaattccacaaatttgactaactgctgtagattagagaatagtcttgtataaacagtaagtacttgattttgataattaaactgtgctttgtaaaagaaaaaaaaataccactatggagtcatgcaaaaaaactgtttttgtcataaacagctaataaacaatggcgatataaaatagcctagttgttaaacacaaaaattctacaacagtactgcctaagttcatatcctggtttttccattttctaagtaagaataataattttattgtttccctcataagatttttgtgaaaaattaataataaaatgttaaacactcagaacaccctgtcacgttgtaggcactcagtcttagtcacaggttcagttgtcttataaacattctgttataaccatagtcagaatcataattttatattagtctagttattattgtatgtctttaaaaatttggcatcatatagtaagttgattttaaaaatctctttcagtaatatgtataaatatgaccatagaataaatgcctgtataatttatctggcaaatatttattgagcacctacactgttccagacattgtgctggctcctggtaatataaagatgtgtgaaatctaatatctaacactcaagatataatctggcagtagagacgaccaaggaaatagacaatcacaataaagatgagaactgtcttagggtgaacacagagtactatgagaaaggaggggcaggcagccaacccaggtcagagaagggcccctggaaaagacaaaatctcatgaggttcttccttgcctttacagtacttcatttgttactctctgtaattctttcataattttttaagatttcataatgtcttttatatccttcagttaattcaagtgctatagaaaaggtgaattccttgccaaaattgtttttatcagttcacacttaagagtaagagcggaaagaggaaaactttgaaatcggacagagtggggtttaaattctagctctaccctaacttgagctttcttgagctttgacttcattgtgtgtaaaaaatggatacataaaaattatatgcctacccagatggctgtgggaattcaagaaaggatatatataaagcacctagggtattgcctggaatgtagccattgataaaaacatatgtgtaaaagccccttcactgacattaggagggcattatattacatttcatcctctctctgtaggtctcaaaatttttacaactacccatataatcctcctctcccattcctcttcagaacttcattttttaattatccaccttcagattcctagttttctattccattaccttcaatagcaaacaccacgcttacttttgcaccaaccttaatactaaatcatcctaaatatttgaataaattccagtactcgtgataagccatgtgtcacctgcagctgaaaaagtcctgacaataaagccctggtccctcaaacacaacacttttctccatcacatcctgcccacagcaaagccatagaagaaacactgaatgacttgattacttggtgtttagtacaaagcattcatagatctca

SEQ ID NO: 587510 - DNA, 4001 bp, Homo sapiens
gaagaagccacatgtctttgcaaaggtgactttagtagccctaaaatcatcataaaatacctggcgttaatttgccctctggacctttcagcagctcatgaacctcgctgacctcgggctgcagcggcgagaccctcgagcaaggaacgcgactatgagtgagaggcggggactggagccggggaagagctcggggctgggggcgggggggccgttagcctgctctaaaaagcttaagagatgtgcgagcacccagggtagcagtggctgaagcagcttccgaatcccgaaccccagcgctgcaaggtttccgggcaaccccacttaactgggagcaggtcaaagtcatggagctaagtctagggaggatggaggagtggatatctgcctaaatcgcttttatcccgtcattttcttccttccttctctttactcttcctttcctttttctcccttcctttcctgtctccttccacattattgtctctctcctttaggagcttagtttccgatgcctgtggatccttccctgatttctgggaccagaggtggtgcgaggttttcttgagggcactggccacgctgcagatcaacgccggtggcaagaaggggccgcaagggtttccgcagacacccacacatgcaggcgttcccacagagggtaccagggatttcccagacccccaccagccctcaggaatagcgtagagagaggaacgtcgcctggctgagaaaggtggatgggcatacccatgtacctttgtgtattaagtacccacaacctccgaacttagccgtccctgtcccggcccgcccaactgctgccgccgcatctgcagaaaccactcgtgttgaggcctcggagcagccgggagcaccacgctggagcaaaaaagccggagggcgcagggctccagcccggctgaccatcccacccagcgcagggaccaacggaaaacccgcgcggcgccaggaccagggggctgcccgacgccgctcgcggactagttcctcagactgtgggactccctagtgccggctttgcccagggctttccaaggctgtctcatgccctagatctgccccagcagctcaggccttggactgcgaacccagtatcccgagacaccgattccatcagtccccatcccgacccctctccagccgggttcatccgcctgctgcctcccgtcctccacgtttcccccaccagccaccaacaagcggcaaccacgctgccttctgcaaaagaggaagaaggaaagaagggagagagaaagaaagggggggaaaggaagggaggtttagagactggaatagaatccgcagccacattcagaaacttactcgagcttgagaaaaacaatttaagaaaagtaaaaaggaagtgtccagagcaggaagggaattcacaaatgtagcctccagcgggaacagctccctggctgccgagctccagcgggaggggagtcgagcgttttctttgccacttacctagtcccctgtctacaaagctggtgatcgtattagccgacttggaagactggaaaaagctggcattgatgcccagcttctcagcgatggagtaagtcctgtagattgacagcatgtactcgtggggcaccacgcgcggacccctgcctggcggctcctgcgcccggggctgctgagcccggggttcgtcctgaggccgcggctgtggttcctggccctcccggcccgcgtcactgtcgcgcggcgcccgctgcatcttgccttccttgcggcttcgcatgcccttggtggaacccagctcggcggacgacgaggaggatgagatggaagcctgctggaaaccgggcaaatcccacagaaaactgatgaggaagacggccgagagcaggaccctgggagtatccatggcgggcaagtggctgcgtctccccaggaggcggtggcggcggcgcaggacgcgcggggcacggagcggctggacagcggccggggcccggctcctcgggcggactcggagtgcgaggagccgggtcccagccacacaaaccccggccccgccacgccccctcccgcccctcgccgggaggggaggaatggggagggagggcagaggaggggtggggagggtgggaggagagccgggtggtgcgggccggaggtgtgggggagaggggccgcggtgcgccggtgtggcaggaagacgcagcgcccccgcgggacgcgcgcggggttgccgggcggtgcgcgcggcgcgggccgcaagcgctgaccgggggaaggcgggcgctgccggcccgtggccggggagcaaaggctggcccgccgcgccagggtccccctcgaactcccggaggtgtggtccctccgcagcgcggccccggctctcggtcctcgccagccgcctccactttcctgggagcgagcggccccggaggagggaagcggcggcggcgcccccaagagacagcttggagcaggcgcctctgctgcaggctgcgtgctgcctcggggcggtggtaccctccctcctcggccccaaccgccaggcctgccgtttgcgcccctcaggggccagcccggagccagagaagcctcgccctgggccaggcgcagggcccagctcggaacagccccattttctcggttgggtatcgctctccacaaagacaggcgtctattcccgaccctcgaggtcaggcaaaggccacgagtctttagagtttggatcgatgctaaaagctgctgcgctcccctgcaggccccagcctctcctctcgcagtccccaacctcttctgacgcagactttagctgctccacttcttcgtctgctcccgggatcctctccctctcgcggcctgccccccgcctccactgcatccccattttccctctcttctttccctcccgcctgcaggacttcctccttccccaagttccttctgcattccaatccctcttccccagcctgcttttcttctcacactgccctcccatctcacactgccttcccaccctctctcttcccggcctcccccctcgccttccagtggacccctccctttgcagctctaccccaatctgtttctcttcagcccagcctcgccccatcacgagtttcctttatctgtccccagattccccgtgcctgtcttccccgcccactgcctcgctcattcctgggcctgcacgctgaaaggcgatgcggcgtagcgctgcttctgtctgccacagtgctctgccctggactgctatgggcagaagagtttccctcagtactgattgggtgctcaggcaccaaccataaagtaccctcctttaatcgtgccaacagctttgtgaggttggcgttgactattttcaccttcacggatggaaaaaaaaaagactcaatggaaataagtgacttttccaaggccactctgccaagaggttatgcagcaagggacagaacccaggctcccaccccaagcccaagattcttcccactacagcatagacagtcattcctggcccaacttctctatttcagttctggcttttttcttctctttatggtttcacttgatctcaggtggcttctttctccgccatgctactttctgtgtgtgttcccagtctctccaatctcctccctctcactttctaaccccttcttccttttgctttttcatcacctcttctgtcctgcagggaccactcacatgacagcctgcagggggagggagttttgctgcgctgctcccctcatcctttaacttccttaaggtctgggatatgccctccaccctggacactggcctcctccaggtaatggcaagcacccacagagaacttgtgtgtcagtcatggtttgaagcccttcgccaatattattttacttaatcttcacagcaatcctgaaataagtgctgtattattcctattttacagatagggaaagtgaggcccagggtcacactactccagagtctgggctcttaatcactgggctattgagcttggctgc

SEQ ID NO: 587511 - DNA, 4001 bp, Homo sapiens
agtcagaggaccagcttcggcggcagtggtcctcaggggtagcagaatggcggttgcggtggctgtactggtggggctctttctggaccatcagatgcctgccatcagctgggatgctccagcgctgctgctgtggctgcatgcccacagtgccctggcgcatggtgacattattcagagtcatcgttgagtcctggggagcaaagcagccaagatggcagcattagtaagcatgagtgagagctccgctcaaatacatggtcagtcatcagtaatattttattagatgagatgagaagcaagtatccctaacataaagaccaccaattaaacagtcccccaaaccccaacaagacaggctttcaactggacacacacatgctgcccacactgtcagtaaccagctcctcaggcagactatcatttgcatgggaaaacaaatacggttaacatcacccactgcccatgggcttcccccttcctcaaagcagacttggatgaaagaagagctgcactcagagctggcacaaaggcagctggaaagaaccagcagactccaaagatggcttgaaaagcaacaagttaatgttgctggggaccagctggtcaggttagctgctcttgtctaaacttggctcttaattgcaccagtgtccagcaggttttgtgcctcagtgggaaacacgtggcaatgacatcaccctcccctcccctgcccactgcaaccctggctggactggacaggcacttattggaacttccatgtttagtaaagttgccttgatgctctccagctgcctggagagcatccacctgccattattgggggtaggggggaaattttctgtttaaagtttatgcctcagctgtgccctcttacccacagataccacttttaaaacatcccggctccaaacctagacaccctggcagagaaatgacctgctcatgttcagacctatgaaatttgcagagaaagtgcctcattcttaaaaaaccacatccattctcaagagttctttaattcaactcagattccttttttgagtcagggtcttgctctgtcacccaggctggagtgcagtggcacgatcatagctcactgtagctagcctccaactgccaggctcaagagatcctccacttcagcctcccaagtagctgggactacagacctgcactaccacgtccactagtttttttatttttatttttattttttggtagagacagtggcctcactatgttgcccaggctggtctcgaactcctggggtcaagtgatcctcctgcctcggcttccgaaagtgctgagatcacaggcctgagccaccattctcagatccccttcttgaagcaaatcagaaggctgaagactcccctaaatgatattcaacaacttctctacaactttccctttgcagactgcctcccctagccgggaggtctgtttttccggctactggtgataaagtataagtacttacgttgcaatcagcaagatgcacaaacactcctctcccaccctcacccccacactccgtaccccaacatctcgccactaaccaggacgaccagccggttttttagtctcaaaagcagcacctcagttggcagacttacattcaaacaacaaatacataaagcatcattaagggctgccctctctgaccactcgatctgtagagggaggtgacccttctaccgaattgaactaaggaacctgctgatgagaagcgacatcctttgcacttgaagctctgacccctaccagaaaatcccagtgctgagcgcacgttccaggggttcttttctcaacttcgaaagttctgcgggctgggaaactcccactctctcccttctccgtctcgggccgtcccccttacttggctcggccggatcggcgtcggggcgtcagcgtatcgcgtgggtccgcgctgggatacccgggccaacgagcggggagtgctgcgctgtgcccgccgtccttgcccgccgcctgcagccgccgcggccgggcggtttataaccagcccagccgacccgccgcggggcttttccgtgacgtcagcgcccccgccgggagggggcggctctgcagcaaactcggagttgcagccacttggctaaatcagttactcgcagtcatgtgaccccttctctctccatttaaaaaataatgacagttcaatcctgggcctcctttattttgttttattttctttttaccagatgaacacaggaaaatggaaaaatacactaagtgacacttaatcgtccttcccagcaaagcacttgcgagctgtcgggataaaggatggaagggagaggcaggtttgagttgagaactcagttttgccaagaaaacagagatcaacctggaatgcgcagagactttagcctccaggatgagactgcagccaccttgaatagccaaggcttgttttaaccacatcttctgcaacgaagacagccttgtcaccttcttctggatagggggaagcagatggagccccacaaggctttgtttcccttctctggcaaggacccagagagaaggggccagaaagaggtgaggaaagaggacaagaccttgaaaagggcagtttggaaaaacaatttaattgaggatccaagcagattgtgctaaatattgctggccctcctgctctgggccagaatgctgaggctcctcaatcagggaatttaatcagcatcccaatcagcagcatctctgtaccaggctccctggcaaggctacgccttgggcatgagccaatacagcctggccatggggaggagcactgagaccaacacccctgtaagagactcctgtgaacaaagggcacaggataataactactactaccatttattaagtacctctgaggacctctgcttagtaggtactgttaggcctcctgggaccttaatccttactatacttctgcaaggtggctctatttctaccctcattgtatggaggaggaagataacatagggccagagaatttgcccaaggtcacaccgctggtataagtggcagggtcaggactcaaagcctggttttcctgagtctctgcactgcaccaccaagtgaaggatttcaatgacctctttctggggacatgggtatttcccagatgctgtgtttagagatgatgctggcctctccaacatatctgcttttccagccagcttcaactctgggttggctggtggctccgggaagcagccaaaggcaccagcatctattgaagcagctggactctgctgtgattagagtcaattcacagttatcctgcaggcatttatctgctttgagaattagctacatgaccagctgctgagacctgccaggtcccaagctagcaaaggtggaatccatagagtaatgaaaacttagaattcctttagtctcaggtgttgtggccccaatctcctacttatcttatacataagaaacctgagacccagagaggagatgaccgcttaggacatgacagaactggaactacaacctggggatcataattctctggatgccctttgcttctgtcaagtttttcttctgggtttcgctgacaggaagtggctacagatgtggggaaaggaaaaggagaggagatggggggtgggggagatcatctccaagagtatatcactgactccattctaaaacacatgtaattgatgaataatccatgtttcaaaatgatccatgctttttccatactgacactcctactctgtcaactggtctcaacagaaacatcataggagtaaaaactaagaagaaatcagtttataagcatatgatatagttcctcagttctacttttgccgattgataagaatctaatacttcacatttataaaaacctaattctggccaggcacagtggctcacgcctgtaatcctagcactttgggaggctgaggtgggtggatcacgaggtcaggagttcaagaccagcctggccaacgtaatgaaaccctgtc

SEQ ID NO: 587512 - DNA, 4001 bp, Homo sapiens
acctccccactcgtggccttcccagatcccctactgcaggagggagagggtgagatcatgaccccgctgggcagcctggctcaacactggctacacagcaagccaaggtggtagaactacaccctcactgaagcagacgtgtgctccttacaaacacactcacacacacacacacatacacagtagttacccggctccctctatgggagcgtctactccctggcagcagccctgcctgggactcccggtggtgcacagccttgcaaacaaccgcctttcctcacctccctccggagattgccatttcccaagcagctgcgatttcacctagctttaaagggagagaggagctgggaattctgtgtggaaaagaaactgcgtggggctcagtggcgccaggcagcctctcctccctgtcttggaggcggcggggggggcagtggggggggtttgcagaaggagcagtggtctttgttcagacccgtttttcctccctcgcctcccaccctcttcaacggagaaagcaaactttggcctccctcccgcctcttcccaccagccacgggggtccgcggcccccagaggtggaggagggaaggccgggaacggctgctcacaaccctccgctcccgcccacccatctggctcggggctcggtggggagaaacttgaaaagtgttccggggagtggagccgccggttaggggctcagggcgtggggacgcgggctccgtttgccaggcgcggctggcaggtggggagtgactgccagcgctccccgcgcgatgtccaagcgggagccgccggagaaacccgcgccctccaccacgaccgactcggggagcagaccaggaaaggcggaccccgcaggactgttctctccccgcctaggagcctctctctccctcccttcttgcagatcaagagttggatatttttttttcttaagttgccgcaattcgaacccattatttcgggggagatgcgcgctatactggcgtgtgagcgagcgcgggtgtgtgtgtgcgtgcacagtgtctgcggggctggttcggatgttgagtctccctcccgatccccctgcgtcgccagccagccgcggctccggtccctcgtccgcgtccctgccgcccggccccgctcggttcgccagcaccgggcccggctagctccgcggcgcgctctccccgccgacctcccgccagccccccaccggcgctccgctcgccccccgcctccccggcttctcgcctccccctcgagctcgccgcccgcaggtactcacctagaaagaagaagaggcagaagacgtttgccaagatcatgttaaataaatcccaccgtttttttgtctttctcccttgggtaaaaaaaaataatagtagtaacaacaacaataataataggcaagcagtggtaatcagccccaaatccaatgcggagatcccagctagtccacccgatgaagatcccgagtcctgcgattctcgcctctggctggagggggtggggtgagaggcgggcgatgggctgctgcctctcgacgccccccttgcccgctacaatcaaatatacgcgtatctgtgtatcggctttctaagccaacagcccagtcctggggtcagccctcccctccaatcgtccgggaaggcgtgagtccccgcgggtccaattcccctgcgcttcccaggaggggcctggggaggtggggagagaggcgatttgcgagtgaagggctggaaggaagcggcgagggagggggtcggaataaaatgcaaatagaaaagaaatccacagacgggtgtcagcgcccaagaacaatccagtcggagcttcgaggacgagagactggagtcgcttctttcgcaccaagacgaagacaagattcaaaaaaatcttctcccgctaacccttgctcggctcacttttttctaatggaattccagtgaccgtgtgtctctgcgtgcgtgtgtctttctctctcctctctctctctctcctctccctcgctcgctctttgctctcgctctctccagctctccctcgctctcctctctccctcccccttctcccactctccctgctcctccctccgcccgcccccttctcccttcgcggctccctcgcccgggctctcgcgccagcgcccctctcctccgccccgggctcggcgctcgggctcccaggcggctggcggcgcggggcgcggggcgcgggagcgcggcggagctacgatgctctgcagcggcggcggcgacaaggcgaaggcggtggcggtggcggtggcggcggcggcggcgccggggatcgcgggccgagaggagagcccagccgccggctccctcggctcaatcgcccgcccttcctgggactgacctgctgccttggccggaaactgactggctcccccggctacggctcgggctcgaacccactcaagcgtcggcaccctcctcctcctccccccgcagctctccccaccctggggaccggctgcgccctccaacccccactgcccctgcccccgccccctgcgccgctgggtctgggaagcctggggagctgagctgaggctggagggcgcggagtccgtggggcccgagccatccgggggctcggggggcagggcgttagaaaaaccccagccggtggcccgggtctgaggggggctccaccctccgtgggctaaggcgtccctgcgcccaggagccgaggccgacaaagcgtctccccgatggtgccagggaaaggaattatccccttcggcgccggccccgcgcgcccccgaacccaacgcatcctgccggccccggcctagccccgcgcgcacatacacgtgtgctctccgcgcggacctcgggaactttgccctcacgcccgcggcgcgcttgcctcccgcccgccccggcctccaccccttcgagatgccccttccccagccggtctcccctccccccggctcgggaagaagcctgctgggccagggcgccctgaccacctcctcggaggccggcaaacctgcctgaaccgccccagaggaatcgggcaggggctcgcaccccaccccggcaggagggccccgagaccgacccgggccggggctccgcagccggctgggctccgaggagctcgtcccgaggcagctcccggctccctaggctccggggttggggggttcctcctcccctagccgggaagggggcgattgatccatctgtcggtgggccgggctcaccggcgtgttttagtcgcagaatttacaataaacgcccagaaggacctaaaaggaagcgtctggctgggaaagggctggaggagaggtgcggctgcggtcacgttccggcgagagcgggagaggcgcggggtcgcggtcgcgcgagggctcacacccacgcagcccggcatcccccggccctcgcgccacgttcctcgcactcagctcggcgcgcacacacggtgtcctggggtggggtacacgcagcgcctcagaaacttttcgtgctgcccaaaacaatctgggctgcacgtaacatgaatttgatagtaccgtttaagatgcattcttaaataacaagactctggaatccagtaaatgctagaaatcgacttggacgagaagggaggggtcactaacaaaaccagcagccttagctattgggaaagctagagggagcaacttccatcttgaggatttaggcgggaaggcggctgctcccggccttggaagcacagagagcgagtctcctgtgaacgcctctttcctgtggtccgtcctggggcatcgaccttcctccctccatcttctcccccagccatccagttgtgcctgcttcgagcctaggccctagctgggtagtgacgagtctgggacagagggcttagggattggagttggggaaagcccccttcaggcctgccctccctgtcattcctccaagcctctcatgttctaggaagtgacttcgcatctgacaaggtctcttggctttttttccaaaaat

SEQ ID NO: 587513 - DNA, 4001 bp, Homo sapiens
ttcagcatttggaacactttcagtgtctctgtaggccacctgataggaagagctgttgtctgtattactcacttttgtattcccagcttcttacaattggcattcatcaggtattcagattaacatgtcaaacgccaaaatttgttcagtaaaactttttctccttactggtaggtaagatcatcttcactaaggaataacaaagtttggctagggaacgaagaactaggagtgtcataggaaatggagtggtacagggtacatggggtgaggtaccacaaaggagacatggggcatcatgggagcacaagggtaccagaaagagaagtacatcagagtgagttccaccaacatctccccttcccctgggcccacgcatattcacttttcccatccctgggaaaagagctcaagctgttctccctgtccctcaaaatatgaccaaaattccaccaataatttaaggccatctcacaacttttgtggcttgtcatctttcaatcctttgcacttcccagagcaagattgtgtacatagtcggtactcagttaacgatgttgtgctgatctcagtgaccaaaagcaaagtcccttttttaaatatttgacgcagggctacccctgattctaggaaaggggaagaatcccctctgcttttttttctcttctctggacacacaatatgcaacctgttacattaattacagcttgagttaattcgtggagaatcaaatcaccatgttaaacagctatgaaataagttccaaatattagtaagcaacccatttgaaaactgggcactacctatatgaaaaaacattcatctactttctgtttagttacagaatacagtgataatattcatagaaaaaaatagtatgaaaggcataatcctacagccaaaataaaactaatcttaatgtccacacacaaatttctttgggcaaattttaaccccaggatgatttctcctaggtagctttccttgggcctgtctcaaatgtgtgttttggtaacacagactgattttactacctctttaaaacacaaatatgttggaaacgaaaaattgtgggctgcattttaacaccaaatagaactcacattaggatatcagccactgttgtcctctgctactgaacatgacaaaatccaagttataccttaatttcttgattttctattacaatgcactggtattttaaatacgccatcaatacattttgatgaatgcaatgcatgtacagaatttgtagatgtaaatgagtaaaacttcccaactatgtgcgaaaaggaaatgttttattttagtagaaattcctagctgtgtacaaaaaaagaaaatccgcaggattcttcatggtgcaccctcctccctcccacctttaagagtcatatgagtctaaaggaatgaacgaggtacctcaaccaggtacatttcagtacgacctaaatggtgcccagcccgggttcctccttgcaccaaaagcgaagcacatctgggggtttttcccggcgggacgcgccagctggagcgcggcggcgggaggcgcccagcgccaacacccagctcctccccgtctgctgcggccccgcacagcctccttaccgatgatgggcttcttggcggtgtcgccgtggggtctagacagctcgaggctcgccgccccgcagagtagcaggcccagcacgcacagcaggcagcccggactggccatggcgctcgccgcctcccgccgcctttcaaaagctctgcgggcgggcgggggctgcggcagggacacctcgcggcagcgcactcgcgtgagactcgggtgggcggtgctccgcagcgtgggcctatgggaaatgcagtcccggcgcgcgctaggcggccgtggggcggcggtgggaggctctgggagtgcagccggcgctgcgcgcccgccccattgctctgtccccggtccgcgaccgcgaccgcgaccccgacccccacgggccgcctaagcggagactctggaaacgcctggggcgggtaccgggtggtctccgcgtccttccctttcaactgttacgtcgatgtggacttcagtcacccgtacaaagctgggctggccaacccaggtcctcgagaggggaggttgggtgtccccggccgagtttggtaaccaggcagcggggaggctggcaggggattctagaaggcgcctgagaactgcgcgccaaccgcaccgcccccttgaaggtcggggccctatctccgggaatggtgacaacgttcgctgtacggacagcctgtgcccctgaatgtgaatgtccacacttgctatttggggggtcgcggcatctgtaggaagtgaagacgggacggcgataggaacacacgcacaggcgcatcactagggtcagaactgggccaactccgggcgtctactttgaagcgggcacgcccaggccacgcctgcaaacggcgtcagcttcctctgatcaaccgcggtcagcgccatccaccgaccaccactaagcctatccaccggggcagaaaagatgactggttcctattcgttaaaactgttgattgttcctaaatacatggatatatagcttgtactcagtgaaagtttccatctataagggccaactgaaattcagcataaaacaagaatatttgaaaacctgctacatcaatgctcagtattaagggtgaaaacgtaaattggacagtctttttcacaagaggtttaaattcagtaaggaaaaaaggcagaaagcgtgactcgtagagacaacaggaacaattttagcatgttgcaagaagagtaaatgcagtgaatagtctggtttaacaagaaaataacgcttctgtagaagggtgtggtgagaggtaagcaacaaaggatgtgatgaaagacatgaaagggccgagctggttttgagcatgattaaatagacaagtagccttgtaaatatgaacttgtggtgccagaataattgactatccacataggaaaaattttttacccggcgttacacacaaaaataaactcgaggtgaagtgcatatgtaaatacgaaagcaaaatattatactttgataagaaaatatataaatatatcttcctaacttaggctgttggaagagtttcataaaacattaaaaataaaaatgttaattaaaaattgactatataagaaaattaaagttaaagcacaaacttggaaaatatagttataaaatataaagtatttctaaaatatgcgaagaaataataagaaaaatgacacaatagaaaaatggaaaaagaatgtgaaaagcaaaccaaactttctgtagtcatcagaaaaatgcaagataatatgtcacatccattagactgtgtagaaaaacagcctgtttcctggcaagagtgacaccatcttgaagcaaaactatcctggggactgatgtttgacccacagcataccgaggtgttctgcagcaaaggtctttaaacaatgctcataacatatataacccctcataaagatgcttatctaacgtccccagtgatcacaatagtctaagagctaactagttgcacttgtctttaccctagaggcttgctaaataaagcatactttctggagggcaagtgcaggggtcgcttctgtttgtctctactaagtatttctttctgagaaattcgattggtcagcctctttggtctcccagcttcctccatctttggaagcaggtttctgtaaattgacaaaaatgtaagcctttgataataagtcaaggatgtagtaaaatgacagttctctgcatttcttgtggaattgtaattattataactatttttgagaaaaattaagcaatatctggtaaaggtgaagatctaaatgttctgtaacccagtacattctggatataagtgtgtacctagattaatgcgtgctcatgtgaacaaaaaaaatatgtgtaagtatgctctttggagcatctttttgtaatagtaaaatattaaatgtaaatgaccaa

SEQ ID NO: 587514 - DNA, 4001 bp, Homo sapiens
tctgcctcccaggttcaggtgatcctccggccttagcctcccgagtagctgggattacaggcatgcgccaccacatccggctaatttttgttttttagtagagacgggattttaccatgttggtaaggctggtctcgaactcctggacctcaggtgatccgcccacctcagcctcccaaagtgctggcattacaggcttgagccaccgtgcccggccctattgtctcaattttataggcaagcaacggcttgagacaaactccctaacttgctcaagatcacataacagaggagtgtcacagacagatttaaatccagatagtctgaactcctgttaccagagcatcatgagatataagtgtaaagaacacagttactggcacatgggaaatatgcagtaagtcatagctattacaacttaaaggagaaatatttcagaaaggattttagataagcagtggacatatggagagcagacgactcaagaaaaaacatgtgagaaaaaggaaaaatatgaccagttttcccttacaggcatttcagcattttcttgctaaacaggcattctccagggaaacagcagatgttcaagggactaaggtaaagaagttcagggacctctacagtccctgaaaatatcacgtggatccttgctctgtgaactgttcactgaatgtgcccaaagctgtcccttactgaccccacttggggatgctgtgtttgatatgatgaggtctctaacagaggatgtccttcttgcttcccgtttccatgtagatggtaagatccagtccctgttctaaagtaagccccaaattccgtttcctcatcttgtgatccctgatattcacagttgaactaaataaaaaggctgactggagcaaagggattcgatctgggatgcttacctgctccaatctttcaatgagctctgcaggagttaggaccacttcctcactacccccatcagagtcctgtcccaggaaatccacttcttcggtcatcttctctgaaaccaggaacctaatgagagggaaagaaccaatactctgcaatgcgttttctaattatctgcaagaacagacatctatctggagaaaggaaaggtttattgaggtttcctggggttgtagaggccctttagcaagtggtgagagaacgcagggactctagttttccagtgtctgcctcttcctccaaggcttaggtcaggtatccgtttctcaaacaagcctcccccttacttctgtccaccaagagctgagcacccatcacaccatacaatcactattcatttctttgacttcccagtagaggtcttgttcctcagggacggggttcgttttagttcaaatacgaatcgcgcctctgctcagtgcctggcactaagcactggggacgcaatgacgtgggaagcccctgcgctcagcacagcgcttgactcctagcaagcacttaacattattaggagctggccgggctcacgcctgtaatcccagcactttgggaagccgaggcaggaagataccttgagcccaggagttcgagaccagcctgggcaacatagggagatcctgtctctataaaaacaaaaattgttaggaagattaatcaatgctaatttcccagagccacaagggccggcgacattagaccagtcggcgatcccaaaggcctaaggaggtggatggcggggacaaagaaagtccctggggtcgcaaggaaactgcgaacatccccctcccctcctccctctcagtgccacccacacaggcctgccctagccacagaggtcccattcgacgctcactcggggacctgggagacagcgaggcactccacagcagccggcggtaaggacggggcgttcgtggggacgcagtcggggcaccaggaagcgggaagacagaggaacaaactgctcaaggacttgccgggaccaactcaaccctgcaacttctcagctcccgcgctactctcgcaaagtttccgcccaggcacgacgtcatcgcgcaagggcgacgctgaccaatcaaggcccggggggaagagcggggcggtctccttgggcccgcccacccggcgggcggggactgtcttcgcggcggcctgcagtcccagcaacccaaggacttgaggcggcgggaggctggtccgggttggccccgcccacctgggggccggccgctccgctgtgcggtccgggttgcactacccaagagcgtcgggagggggcgcccgccaccgcggccaaggggagcggcggtgtccgccccggggggtcccacccagaagtatgctgttgaaagcaggccgctgcagcctcctgggccgtctccacccacagctctcgtggctctttgggttcctccgtctttgcggggtttcacctgtggtcagtgtggtcattgccttcagaatctccagtatattccttttcatctttcttgagacagggtctcgttctggtgcccaggctggagtgcagtggcaccaccacagctcactgcaacctccgcctcccgggctccagcgatcctcccacctcagcctccggagtagctgggaccacaggccagcgccaccacgcccagttattttttaattaaaaaaaaaaaaaaaaagaactgtggcggggttgggggtggggaggttctccctatgatggccaggctggtctcgaactcaaggatccaagcaatcctcccacctcggcctcacaaagtgggtactggttcttgaagcctgggatcggacgaccagcagaagcatcgcctgggaatccgtgaaaatgcaggttctcaggccccaccctggcccaccgaatcagaaactgggggtatttcaccagacccaggccctcccggtgaccctgacacagctgaggtttgagaatcactgctttggggccgggcgcggtggctcacgcctgtaatcccagcactttgggaggccgaggtgggcggatcacgaggtcaggagatcgagaccatcctggctaacatggtgaaaccccgtctctactaaaaatacaaaaaaattagccgggcgtggtggcgggcgcctgtagtcccagctactcgggaggctgaggcgggagaatggcgtgaacccgggaggcggagcctgcagtgagccaagatggcgtcactgcactccagcctgggagacagagccagactccatctcaaaaaaaagaaaaaaaaagaaaaaagaaaagagaatcactgctttggggcaatgctttcaactcaccttctggaggggaaaagcacaaaaacccatgtctgtatatgtatatattttttccatctttgtgtgatccagtttttcttctctgagttgctgattcttttctctttgctgtcctttgttttctgtgcaaagcgttgcttctggcttccctaaaagtatctcttctccatcaatctgagggctctttgcaaagctgccctatgatgtcatattgattgactagtaaaatgattggctaatatagtatgatcgtacctgcctgattacaatcctgttatgaaaatgacaatagaataagccgagtgagagagtaggcatctttacaaagcgctgtgtaagctggggcatatcagcacgggattcccaaaaggaagggacatttgagctgtgtcttatgaaatgaattttgtgagtggcaaataggtggttatttcaaggtctgtttcaacggtttggtaatccagtggtttttggttgtggcagagtgtgtttcccaaacatagctgctctaatatggatctcaccccacatacccttcttaccatgtgacattgacactcctccatcaagaggtggggtctatgttctcaccttctatttatttatttagagacagggcctcactctgtcgcgcagcctggagtgcagtggggcggtcacggctcattgcacccttgaccttcctgggctcaggtgatcctcccacttcagcccccatgagtagctgggactacaggtgtgtacca

SEQ ID NO: 587515 - DNA, 4001 bp, Homo sapiens
gggacagaaggggactcctgaatgtcccctagggctgccatcttccctgagacctgctgaaggtgtcacacctgggacctggggaaaatgaaaaccatggcagatgaggggattgggaggaatgtcggggggatggtgcaggaggaggcaacatgccagctctccaaggggagatggaggtttatccactccaggaggagcaaggatggaggatgaacccacagagacacataggcctggggtgaggcagttgggggacctggcacatttattcagtaaggaataacgctttgagtggctggggacggtggctcatgcctgtaatcccagcactttgtgaggccgaggtgggtagatcatgaggtcaggagtttgagaccagcctgtctaatatggtgaaaccccatctctactaaaaatataaaaattagctgggcgcagtggcgggcacctgtaatcccagctacttgggaagctgaggcaggagaacagcttgaaatcaggaggtggaggttgcagtgagccgagatggcgcccctgcactccagcctgggagacacagcaagactcaaacaacagcagcagcagcagcagcagcaaaggagtaacgccttggaaggcgcgcttaggaagcagccaccgcctgggcggcacagcagacgcctgtgggggctgaagcgaagctcctgtcccagcagaggctctggcatctccttccagcccgtggcatcacccctcccccagagaaaggcatagggagtcttccagaaaaacctcagctgctggccctgtgggagggctgaaaaccgaaccatgcctgctgcgcatgagtgttttggaggaaatcttaataaggtttttcccgaacagcagagaagagacgtttccagagggcaactctcttcctcagaccctacagagccctcagagactgcaggctggaatcccctagtccagccctgcagcagcactgggagactcactcagggctccaagacacttcttagtttactttgcaaaaacggcttgagtccaatgtgaaaagtgacttttctttcatactgtgatagagtaggaactcctaatctggggcagggagtgaagaaaggaacgggaaaagaggacaaaagttaacggatactcagatctaagaacagcagacagtgcctgcttcgaggaagtgggagaggcagctcccacacggccgccaccccagtgcccggcttctgggccagcctccatcccctaatgatgggaagggtcaggtcaccaggtaggtggccactgggtgcaggtcctccaccctgaagtcacatctcaagttacttagttaacttactggggacacctggtaaaagggcctgctcgatcaccccgaccctggcttggcccccaggactgagcagaggcgaccatcacagcgtggacgccccttcacccccagggacgcacaaactctgagctccagactgaagggggaagggcactcctgccagcggctcgggggaagcatcctctgcccctctgttcccagccccgtgggagcggacccaatcgccgggagctcggcacagagcgcgtccgcccggcggtgcggcgctggggtccggcggctcctcgctccggagcggcgggacctccgggcctcagtttcccatctgcagagtggcgatgacgacagctgccgtcactgggtgcctgggaaaggcgccctgcgaacggacacccgctatcgccagggccgctgggcggggcggtccgctgctgctccgcgacccccaggagcccaccccgctccccgggcttggcccaaggccaaggtcacggcgagcggcggctgcaagggccgcacggcccggctgggcagggctgcaccgcggagtacggcgcacgagctcggactgggctggtcccaggcacccggagccgccgccgccgcccgcgcccactcaccttccgagcgggaggaggacgccgcgcgccggacggaagtgtccggccccgccccactccgcccggccggcgcgcacttccgggacgctctgggccccgggaggaccgcacgcctcggtggccgtgtgggggcggggccgggagcgaagaggaggcctttccccgcccctcccctcgtgggctgcgcccgcgcgtggctttcgcgtacacgctggcccggatcccgcccgcgcctgcaaagcgcccgggcgcggggagcggcgctgcgtggggcgcagaagccggcgcctcggagcctccttcccgacgccggccctgcaccgcccggggagccagcgcggggccgggcttcgggagatgacggcgccgtccccacgctgcccgcggcccctccgtgcactccaggcctccgggggtcctcggctggagttgcttccacgttcagctcgcgagtcccccccgccgccctcttgggttccctcctcgggatgtgtccgcagcgatggtcaccggcggccgggaaccgctgcgagacgcgcgacctcccgctcccctcgcgggggccccagcgccctcgattctgcctgctttccaggggcgtccccgggagcctgaggaggatgttacaggttccccaaagccccttcatggactccttcctcattttcctcttgttcagccacagtttctccctcagttctgtgcttacgacctgaaaagagaaaattgtcactttctgggaaaaataaacggccggggagggttctttgaccgttttgagcaggggtgcagagagccgaggcgaggggacccctgagctggaggggcacgcggagcagagggcgggggggcctgcagacgggcaacagctgccagggtggacgctcagggctgtgtgggtggaggagcccccaggctgataatatgtaaaaatctctaaactctaccgcaagaaaacaaacattccagttagaaaattggcaagagccgcaacagacgtttgaccgaagagggcacagggatggcaataggctcgggaagggatggctgtcagggaagggccggccagcatcgcggtgggtgccactgcacacttgccaggtggctcaggtaaaaactgctaacaagtgccaagcatcactgaggtcgcggagcagcttgggacatcgccagtggtaaggcaaagtggtgctgccattctagaaattggcttggtagtttcttaaaaagttataagtagcgccgggcgcagtggctcacgcctgtaatcccagcactttgggacactgaagtgggtggatcaccagaggtggggagtttgagaccagcctgaccaacagggagaaaccccatctctactaaaaatataaaaaagctacccggacacggtggcgggcacctgtaatcccagctacttgggaggctgaggcaggagaatcacttgaaccgggaggcggaggttgcattgcgccgagatcgcgccacttcactccagcctgggcaacagaatgagactctgtctcaaaaaaaaaaaaaaaaaaaaggaactagtactatatctgatactgtttggaagtgagccccctgcacatctcatggaaatgtggcccctgatggtggcggtgggacctggtgggaggctatttgggtcatgagtagcttggtgccctctccttggtgatgagtgagagctggctgttaaaaagagcctggcgcctccgcccctctcttgctctggctcttaccaagtgacggatgccctggctcccactttgccttctgctgtgagtaaaagcttcctgagccctccccagaagcctcttcttgtacagtatgaccagggacagcagcaccctctgaacgctgatctgaactgtgagccaagcaaaccccttttgttctttatttacttttgagatggagttgccgctcttgttgcccaggctggagtgcaattggtgcgatctcggctcactgcaatctccgcctcccaggtttaagtgattctcctgcctcagcctcccaagtagctgggatcacaggcatgc

SEQ ID NO: 587516 - DNA, 4001 bp, Homo sapiens
gctccagaggcagccagggtcaggttgaagctgcaagcatcccacttggcctccacctttgagcaagccagtagtccaggccttcccacaggctcctggagagaggagagggcacacatccccagtagtaacatacaaccacctccaagctttccagctattttgtacgcaacgcaagatgttcaataaaaacatcacaggatatgtaagaattaggaataaattattgctaatcaataaaacaacaatagaaataaacccacagttcactcaaatgttgacattagcatacaagtactttaaaaattctaatgagagcattaaagagaaaaagattactaaattgattttttaaagatgaaaaaattttaaaaataacaggatgtgtaagaggcagaaataagggactatagtatgaattatttctacaccaccatacttctgaccctaaatatgtgagtttttacacacaaaccagttctccaactctctggacactgaccgtccaacatttcaattcaattctgacactgccttgagcagggcagaccccacaggtgaagggctcagtcccaccctaatgcccccacttcagatgccaatcacaagtctgggccacgtgtacttctgactgcccagttataaatcaagggtttccaagaccacctcctcctagataatttgctagaacagcttacagagcacaagaaaacagtttacttactattaccagtttatcacaaaggtgacaactcaggaaccgtgaaacggaagagatgcatggggcaaatacagggtaagcttaagatggcttcagacaaaaagagtaggaatatcttattatcagcagacccactacaagaaatattgagttcataacatatatagaaataaagtatatgacaatatcacaaagcaaaggaggctgtagaactgaaaggcagaaacagttacgtcagcgtcggcgagtgcaggcttccaggcaaaaaacattgcaagaggtgacaaggacagacacttcagagccgaatgcagtttcggacactgagagtccattttctgactatggtggcattaagcaataagtcaccccagaaggattaactggaaaatcctcatctgtttggaacttaagaacacacctccaaataagaaatagacccccaaatccttctcaatagaagtcaagaatattttgggcaaagtcataataaagaatgaaaaatagaaacctggcagaagtagcctgaagggacacggaaggaaaagcagggctccattagaaaaggcaaaaagactggaaacgaaggcctccttctctccttcgaaagcaaggagccagaaaagaacgagcagcagaacgtggaacaggctgcggcccgagacccgcgccttggggaatcacagacagtgtgggggtgggcggccccgggacaccccgagggaaggggactcaagaactgaacggagccccagccccagactctcgagggaagttgagctgtaaggggaggggggccccagggaagcggagttggggtgctggcatctccctgggacccctgagcatagttggggggtctccctgggaccctgatgggagtggagctcgagaggtcccccagtacccctgagaggagctgaattagggggtctccctgggaccctgaggggaatggagcagggggcgtctccccaggaacctgcggggagtggagttttgaggggtccccctggcacccctgagaggagctgagttcggggggtctccctggggctccgaggggagtgggggcaccccatccagggaagcgcggcgcacccccggcggcgtcctggcggcccaagcagctgacgaggaggctgcctcagctgggcccctgggcagactccagtctcacgcctgggtcccgacccgcctcaggaaactgacctgtgcccctcggagccccgcagtgtgcgtgcccgccgcctccagccatctgagcctcccgcgccgacctccccacccgctttctggaactttcgggggcctccgccggccgcacagccccgccctccttccggaccctcaaagccccgtccccaggctccaggcctccagcccatctgccagtgttcaaaggtgggcagggtcccccttggggctcccaggtgaaaatatttctcacagaaatctgcacaccctggctccatccacgctccctttaggaaagccacggggaatgttctagaagcgcacggccctggctgctggagaaacgggacagcagccaccctcggcagcctgttggcaccgcccaggcccaccctgccctcaaggtcccagtccacctgcctcgttcctggaccctccctctagggggtcccgccatcaccataacccctggggaccccgggagcccctccgctcagggtgcgaccccgtcgcctctggagccggccctgtccctaaccctgaccaaagccagcttgagcggtgcccttgcccttcagccccgccagcgcccacctgtgcagaggtttcagggggagacctgcctggctttcgcttgagctcctgccattttgccttcaagctgtgtgtggccagggacagctggcttcacccgagcatctcctacacagtgtggcttggctcttgtcgaagtcatataaaataggtgaatttctgaaattgaaatgttttatttgggaggaaataactgcaattaggggcacgggggcagactggctggccttcagtatgtccaaagaacaaagaaaaggcttttttaaattcgcggtggcttacacctgtaatcccagcattttgggaggctgaggcgggcagatcatttgaggtcaggagttcaagaccagagtgatcaacatggtgaaaccccgtctctactaaaaatacaaaaattagctgggtgtggtggtgtgtgcctgtagtcccagctactcaggaggctgaggcaggagaatcccttgatcccaggaggtggaggttgtagtgagccgagatcgtgccattgtgctccaacctgcaggacaaatcaagtctctgtctcaaaaaaaaaggaactatgtctcttttttataaagaagagaaatagtacatattgctgtctgagtttcattggcactagtaggattttggggagctggcaagctctggttgatgagtgaatcagtgacggcagtgggtgaaccgaggcttagagttgcagcaggtggtctcagtagccatcagataaaactggtttcaggttaccgcagacagtttcagcagtcaggcctcagagaagtacattcttggagcaatgttttctatcctgagtgctgaatggtctccctacctggcactctgccttagttgggtgtgacaagggtgacccaatttgtatgctcacctttcacaccgaatcctcagctcggacgggtttccctttctaggctttgactttccccttgaacctcatcccacacacctgttccatcggggccactggcttatgatggagaccagtggtatgactgtggcaggctccttctaggggcactctgtctcctgggatctgccacactgggggggattctacttggccttctctgactccccagggtccctcccaccacagcacttggaggctcttccatgggaaaactgtcttgatctttaggtacctggagattctgggccactttggttccccgtgagccaagacggcactctggtttgcattccctaccggagtccctgtctgtagccagcctggctttcagctggtgcccaaagtgacaaatgtatctgcaatgacaaagggtaccctgggaagggctcgccctctgcggaatttcagttcatgcaggccttggtgcttccacatctgtccaagggcctttcaaatgtgacttttaactctgtggattgatttgcccggttgtcacattctgagcagccacaacctactgcatcccatgtagaagtggaagtgacctgattttttcctgac

SEQ ID NO: 587517 - DNA, 4001 bp, Homo sapiens
gggacttctactttgtaagtgccttatctcacctggagcatctagggtacaacatcatagaatattgacattggggctatcctgaatgtttaatatagttaaattgaataaaatcactatgtcttattttgaagctgagagaaacttacctcttggaaagaatcaatcaaattttcggcatctctctttcctccagggcgcagtccataggaccagtgctggctggagcagccttccacgcaccaagtcagtagaataaggccagctaggagtttttgaattggcttcattctaaggcacatgaatgcacaatcaaattagatccagacaaggttgagtataaactaaaagacctctttagtgaaaaagctagcatctgtatcactaaccctgcagaagatggaagtcagagtcagtttttacatacagacactgaaactcagagacacttgctggcttgcctttagtttcttagccactggggacaaaatgagtacttaagctcacatgttcaggacctttttagtactaaaatagtctatacttttatttttattgtttggttatccaaaccccataattcatcccttatcaagttcatcattttgccttaacatttcccctgttgtggattggtcttcaactctttcattcctgagataaagagaactgagtcatctgttaagaaaagtagctcctactaggaatctctggctaatataaaattgcttgacattacatggctaccccatggtactaatgacatttttctatttatccttcagtcttcctagcattactgctggctgaaccatctgtgggagagaggactcaacactgttcaaagtagttagtcccagaccagatgccttcctagccaagggggcctctaattttctaatgaaatgtgtctccaagttaattttcatttgatgggaaagaggctaaaaactaaatcaaacactggtcgataagctgtgggagtccccaaagcctggatctctgtggctggtgatggcaaggacagtgaaggacaggacatcattagataccgtcacacctggatttagcccttgggctgtcaaatgccctgtagacatacaatagcatgcaatctaaagaagaaaaactcgtgctagaaataatacaaagccttttacctgtttagaggcagagagccaaaaagatcccaatcttcccttgaagtaggttgagtactgtgacttttctgttttcctatcttcctttttatagggaatttttccaggacattgaaatctttcctgctggtaaattatactgcaaatggactatgcttttttttttttaatggtaatttttaaaaatcctcacataaagccctttaatggtgtatgtaattggaacaccccctggtatatctgttagatttacttaagtgcagccattaaaacctcagctaaaacttttatagctgaggacacaattcaaagagattaaaatccagctagattggattcccttgaggaaaccagcagacctatcaagagttcaaggaaaatagatgtcttagattaagtgaagtcaaatgcatacataacttccacaaaggaggctatacaacaaatataggacattgagtcaggatgtctgggagcttctggctcttggattcttcatttgtaaaaggaagggtgtagactagatggactagatgatcacagagttgcttccaattttaaaaatctgatttacaagtaagtgacactatataccaagtccatgtaggatcctaaatcagacagttgtgtgtttgaaaattccctcatctacccaccaggttccctgcttgacttaccttgaaagccttctaaagcatcaaaaaggcaagaaacatattctgagagcaagaccatattgagcagacttacatcaacagatcaactcatttcagtagatgcttattgagttaaatatgcaaatcactcttaagggcagtgggaacagaaagatgagaaattatagttatttaataaatagcaaatgtataagagcattcattacaatagccatgcaaagtgggtatcattatctaaattttatagatgttccaccccagaggtgcaaccgtggacgtgttatttacacaggacaagcatgtaaaatacacacacaaccattactcttaattacatttatttgaatacatggttgtcttcccctaatttacccctaggctgaaacctgtaatagtcaaagatcccatcttatttaaatctctcttaataaacccccggcatttagtgagcattcagtaagtataggtttgaatgaatgaatgaacgaatgaatgaatagaaagcaaaaagcttttaaccaggtaaggcctaatgctgcctctatttctgcatcaaagatatgctttatctgacacagaattaaactttcatgtataattggctgtaaatcctgttatattagctaagctgtaagatggctaaaaaaaataactggatatttgttcattttacagctgggaatggcaatttcccctcatgtaggatgctaaacccatcagtcattgcacagtctcctctggaataactacatttgcagggatttcagagtaaagagaaatggtgtcttacctaagtaaattcccttgctttgtccagccatctctgtggaggctgtccagtcctcatgataggatagagaagggagtacactttaaagtataactgcaaatagaggagaatttaaaaataaaatgtaagtatttgactttgttccatttaaattatttcatttagacactttgactcatgtaagtgccattctgacatgaagagtggaatctcatctcactacaatatgcaagtagggacagactgtttttcaaccagagttcattatggttgaatagtgctagtttaaattgtccaattggtttgtgtttgctgagagatgtgcctctaagtattgcttaagtagaaaatgtggtctctggataggactaatgaaatgagagttaagacttgtgatgcatattgtcaggtgaatcacttatctctgggtaggtaggcctcactggatttcttgtaggttatttctaacagttgggattaaatttttgaaaaatgttttgaaattattaagatgaacacagcaatattgtattactcagcattctctagagggacagaatacatacacacacacacacacacacaaacacacgcacataggagagtttattaagtattaactcacacgatcccaaggtcccacagtaggccgtccgcaagctgaggagcaaggaaagccagtctgagtcccaaagctgaagaactttgagtccaatgttcgagggcaggaagcatccagcacaggagaaggatgtaggctgggaggttaggcccatctagacttttcacgtttttctgcctgctttatatttgctggcagctgattagatggtgcccacccagattaagggtgggtctgccttccccagcccactgactcaaatgttaatctcctttggcgacacctttatagacacacccaggatcaatactttgcatgctttgatccaatcaaattgatattcagtattaaccatcacaaatatggtctatgaattcatccaatatgctgttgtccttaaagtctccattagcattgtcttaggtcacacagatctcaaggcaagagtcaactttgttttgtcttactttctatagcaccaaataggttatcaagccactatgcaattaatgagtttttgatattgaatgacaaacttaaaaccatttaaggattccatggttaggtcagtttatcaaaaagttaaatataataaattgggtttaaataattggattttatatttgtcatatttttttctaaatttgaaagaatggctttagagaaaaaactgcttcatcaacatcaaaacacctcaaaattattacagcgatgatctcataatatcactgaaatgacagatgaaaaaaatc

SEQ ID NO: 587518 - DNA, 4001 bp, Homo sapiens
agtcttgctctgtcgcccaggctggagtacaatggcatgatctcggctcactgcaacctccgcctcccaggttcaagaaattcttctacttcagcctcctgagtagcggggattacaggtgcccgccaccatgcctgactaatttttgtatttttagtagagatggggtttcaccatgttggccaagctggtcttgaattcccgacctcaagtgatgcacccgccacggcctcccagagtgctgggattacaggcgtgagccaccgggcccagccagattccatgtcaatcttaacatgtaaaacacatcaattgtgatgttaaattattttaaaacaacattcagtagctctacccaactggccacttgctgaatttctacctcttcaaaccactgtagatagttccacctattgtcacgctcagttaactcataacatagttgacaacatactgcagcatttaaatggcatttcagaaacaagtcacctcaccatcttttaaaggcatatttgatccatttgcaattcaagaaacatatttgggccatgaagctgcccatggttatgtcaaactgaaggaaactataatggatcattgttgatttcccaaccatggaaatcgggcagtgcaacccacctcactgcaaactgactgtaaataactgctacacatttctctacacagactcatccacacccacttatcccatgaccagcatctctcagtcccacacccaaggaatgcctaatcacctctcaggccctcgtcctccctgtcacagaggagagagccacaaaacctgcttccagctaaccagaaattgatccctgaacgggaaacacaatctacataacatgggtcaagaccaaaagaatctttggttgaatgtacatatgtgggcacacaaaaacacaggcaggcacgcacacactccattacctctacaacaagatacaatgattttttttttttttttaaagttttgctaggtctgaaggggaagcaaatcccattcttccatttttgcctgcaatgttgcccaaaggacctatatcctgatgaccattttgatatgcaagacaaaacaggtggctcccagtgaatgtgacaagtttaaggccttgttctgagacattttcctgtccaggcctatctaacgcccgacgtctttaaggttccaagaaagcctgaacgcaccgcctggccatgcacctaataaaccctttcagccaaacagtgcggccagcacagaggcagcaaacaccagtcacgagaatgatgatgatttatcttgcgcggagaggtaggaggatatagtttacaacctggtgactgagacgacctggagcctcaggaattggctcctcatcgctgccgacaataacccggggtggggatttgggggagtgcagcaggggaacactgctggatccagattcccggcaccgggcaacaaagttccataaggtcgtcaaccccggcgatcggcctatattattcttcctgctccaaacacctgtcttgcttagtggctctcttcttacacgtttggccaaggccccttctgtgcctggacctccccagaactgcgggaccctcaaaggcccggttgtcgcccacacccttcccgtccccggtgagtctctctccctcgccagagcaggcgtggggagccaggttgcgtacccggttctccagctccgcagggaacttggtctggaactggcagcgtgtgccactgctgtagtctcgctgaatgaacacctttccggacaccggcgcctgctgcggcctcatggcgaggacaggacaccccgcgctgcggggtcgggggaacaccaaccgcgagtcagagccccggcctggacccgggactctgacccgccagcccctcgcccccacccgccgccgaaaacagcccaaggcctcctctgccccgctccccttcacccatgctgtcaccgcgggccttagctgccgcctggcccaggccccgcgccccccacaacccggttcggcccgggaaacacaaacccgcctcctctgccctccagctgctgtcgcaccgccttcgccgtcacttacgtcctgccgcaaaaagcctcttccccgcccctcagctcggcctcctacctcaggtctgggacccaccctctcctccggccgtaaagccaccctgccgaagctgcgcgctgtggggctgggccgaggaagggaaatgatgtgggcggggccagggccgaccccgccttccgcccgcgcggggattgtttccggaaggagagaggcggggcgagctgtggggctgcggccggggcgagctgtggggctgcggccggcgcgagcgcgcgggggtgtgaggggcggagtttcccggctgtgtcacttccctagtgattgtggcaggtggttcccgatcactgattgtgaggggtcattttcgttcttgattggacgtcgcagcttacgtgtgggttatgccacccaactcatacacaaaacaaaaaacaaaacataaagaaaaaacaacaccccctccccaaaccctcaaacacaaactgctcattgtgttcagaagtagaaagcaggctccaaggatggatccatttggtccctagactcttgagaaagggtcaggaagtgaggacgaagaacctgcctgggccccagcgttgggcgcccctgccccgactcttctttgggggcggcgttcctctcaccccccatttccacccagctcccatccacatccctcaggtgaccaaggggacaagtggttccgccctcgttgcccactggcccttacttgactcagcatttctttgcaaggcagccaaagaaaccccaccttacccttgtctcctgctaatacaacctgttagtaccactgtcttttatatatttaatatagtttaaatatcctgccttttaaatatgaaaaattctcttactgtattttaaaaacagctttttcgagatataaatggcatacaataaaccacacatttaaagcagtggatttgataactttggacatatgaatacacccataaaccactgtcacaatcaagatagtaaagctccattgccctgaaaaggttcctccagctcctgtgtaatctctccctcctgcctctcccagaccccatttcccaggcactgatccaccttctgtcactcaacattagtttcatttccttgaattttatataaattgaatcatatagtgtgtaccccctttttttgcctggcttctttcacatagactattttgaagtccatctgttgttgtgttatcaataattcatttatttttgatgctggatagctattccattgtatggccatcccacagtttgtttatccattcatctgttgatggacatttggattgcttccagttttgggatgttacaaataaagctgctatggacattcatttgcaagtctttgcataggtgtgtagaccttaatgctttcatttctcttgggtacatacctaggagtagaatggctagattgtacggtaaaaacacgtttaactttttggcagactgacaaactgttttccaaagtggtgacaccattttgcattcccaccagagttccagttgctccacatctttgccaagacttgggtagtaatatcttctgcagctataattttcatttttccatgactaattattttgaacatattttcctgtacttatttgccatccatgtatcttctctggtgaagtgtctatttaaaacttttgcccatttttttgtttgtattttattttcctgttgttgaggggttttttgttttattttgttttgatttacatctttattggctgggcttaaggtcagttttaaatttttaaggcactttaattcttggatttttgtatgtttaaagatgttttcctgaggcctttatacttgcgtgagaacttggccgggctgtttttgagttttgagttctttatacattctggagaaaaatcctt

SEQ ID NO: 587519 - DNA, 4001 bp, Homo sapiens
agcctcctgagtagcggggattacaggtgcccgccaccatgcctgactaatttttgtatttttagtagagatggggtttcaccatgttggccaagctggtcttgaattcccgacctcaagtgatgcacccgccacggcctcccagagtgctgggattacaggcgtgagccaccgggcccagccagattccatgtcaatcttaacatgtaaaacacatcaattgtgatgttaaattattttaaaacaacattcagtagctctacccaactggccacttgctgaatttctacctcttcaaaccactgtagatagttccacctattgtcacgctcagttaactcataacatagttgacaacatactgcagcatttaaatggcatttcagaaacaagtcacctcaccatcttttaaaggcatatttgatccatttgcaattcaagaaacatatttgggccatgaagctgcccatggttatgtcaaactgaaggaaactataatggatcattgttgatttcccaaccatggaaatcgggcagtgcaacccacctcactgcaaactgactgtaaataactgctacacatttctctacacagactcatccacacccacttatcccatgaccagcatctctcagtcccacacccaaggaatgcctaatcacctctcaggccctcgtcctccctgtcacagaggagagagccacaaaacctgcttccagctaaccagaaattgatccctgaacgggaaacacaatctacataacatgggtcaagaccaaaagaatctttggttgaatgtacatatgtgggcacacaaaaacacaggcaggcacgcacacactccattacctctacaacaagatacaatgattttttttttttttttaaagttttgctaggtctgaaggggaagcaaatcccattcttccatttttgcctgcaatgttgcccaaaggacctatatcctgatgaccattttgatatgcaagacaaaacaggtggctcccagtgaatgtgacaagtttaaggccttgttctgagacattttcctgtccaggcctatctaacgcccgacgtctttaaggttccaagaaagcctgaacgcaccgcctggccatgcacctaataaaccctttcagccaaacagtgcggccagcacagaggcagcaaacaccagtcacgagaatgatgatgatttatcttgcgcggagaggtaggaggatatagtttacaacctggtgactgagacgacctggagcctcaggaattggctcctcatcgctgccgacaataacccggggtggggatttgggggagtgcagcaggggaacactgctggatccagattcccggcaccgggcaacaaagttccataaggtcgtcaaccccggcgatcggcctatattattcttcctgctccaaacacctgtcttgcttagtggctctcttcttacacgtttggccaaggccccttctgtgcctggacctccccagaactgcgggaccctcaaaggcccggttgtcgcccacacccttcccgtccccggtgagtctctctccctcgccagagcaggcgtggggagccaggttgcgtacccggttctccagctccgcagggaacttggtctggaactggcagcgtgtgccactgctgtagtctcgctgaatgaacacctttccggacaccggcgcctgctgcggcctcatggcgaggacaggacaccccgcgctgcggggtcgggggaacaccaaccgcgagtcagagccccggcctggacccgggactctgacccgccagcccctcgcccccacccgccgccgaaaacagcccaaggcctcctctgccccgctccccttcacccatgctgtcaccgcgggccttagctgccgcctggcccaggccccgcgccccccacaacccggttcggcccgggaaacacaaacccgcctcctctgccctccagctgctgtcgcaccgccttcgccgtcacttacgtcctgccgcaaaaagcctcttccccgcccctcagctcggcctcctacctcaggtctgggacccaccctctcctccggccgtaaagccaccctgccgaagctgcgcgctgtggggctgggccgaggaagggaaatgatgtgggcggggccagggccgaccccgccttccgcccgcgcggggattgtttccggaaggagagaggcggggcgagctgtggggctgcggccggggcgagctgtggggctgcggccggcgcgagcgcgcgggggtgtgaggggcggagtttcccggctgtgtcacttccctagtgattgtggcaggtggttcccgatcactgattgtgaggggtcattttcgttcttgattggacgtcgcagcttacgtgtgggttatgccacccaactcatacacaaaacaaaaaacaaaacataaagaaaaaacaacaccccctccccaaaccctcaaacacaaactgctcattgtgttcagaagtagaaagcaggctccaaggatggatccatttggtccctagactcttgagaaagggtcaggaagtgaggacgaagaacctgcctgggccccagcgttgggcgcccctgccccgactcttctttgggggcggcgttcctctcaccccccatttccacccagctcccatccacatccctcaggtgaccaaggggacaagtggttccgccctcgttgcccactggcccttacttgactcagcatttctttgcaaggcagccaaagaaaccccaccttacccttgtctcctgctaatacaacctgttagtaccactgtcttttatatatttaatatagtttaaatatcctgccttttaaatatgaaaaattctcttactgtattttaaaaacagctttttcgagatataaatggcatacaataaaccacacatttaaagcagtggatttgataactttggacatatgaatacacccataaaccactgtcacaatcaagatagtaaagctccattgccctgaaaaggttcctccagctcctgtgtaatctctccctcctgcctctcccagaccccatttcccaggcactgatccaccttctgtcactcaacattagtttcatttccttgaattttatataaattgaatcatatagtgtgtaccccctttttttgcctggcttctttcacatagactattttgaagtccatctgttgttgtgttatcaataattcatttatttttgatgctggatagctattccattgtatggccatcccacagtttgtttatccattcatctgttgatggacatttggattgcttccagttttgggatgttacaaataaagctgctatggacattcatttgcaagtctttgcataggtgtgtagaccttaatgctttcatttctcttgggtacatacctaggagtagaatggctagattgtacggtaaaaacacgtttaactttttggcagactgacaaactgttttccaaagtggtgacaccattttgcattcccaccagagttccagttgctccacatctttgccaagacttgggtagtaatatcttctgcagctataattttcatttttccatgactaattattttgaacatattttcctgtacttatttgccatccatgtatcttctctggtgaagtgtctatttaaaacttttgcccatttttttgtttgtattttattttcctgttgttgaggggttttttgttttattttgttttgatttacatctttattggctgggcttaaggtcagttttaaatttttaaggcactttaattcttggatttttgtatgtttaaagatgttttcctgaggcctttatacttgcgtgagaacttggccgggctgtttttgagttttgagttctttatacattctggagaaaaatcctttatcagatatgtgatttgcatgcatttttcacagtctgtgatttgtctttttactctcttaacacgttaggggtttgaggggattagggtgt

SEQ ID NO: 587520 - DNA, 4001 bp, Homo sapiens
gctcatgcctgtaatcccagcactttgggaggacgaggcagggaatcccctgaggccaggagtttgagaccagcctggccaacatggtgaaaccctgtctctacaaaaaatacaaaaattagctgggcgtgatggcacatgcctgtgattccagctactcaggaggatgcagcaccagaattgcttgaacctgggaggtggaggttgcagtgagctgagatggcaccactgcactctagcctgggtgacagagtgagactctgtctcaaaaaatatatataataggttaaaaaataaaacagtaatgggaatactaacaccacctccaattcagatcattcctgtcttgaaagagctttcaaatcagcagtgtgagcaggtgggaataccactggactgagattccgatcctgactcgatggctaaggacttgtggactctctgagcctcaggtatctcttttatcaataccagggggccctccgaggtccccttcgggtttaaggttgtgcagacccagatcgccactctctgtgtctaaatgagccaggggagggcccaccttctcaccctgttctccacaatggcttggctgtgctttccaaagaggagtgctagagaggcctggatgaatgatttcaggcccatggtgggcaagtactcataattcagggagggatcctgtgaaatctgtagtcgagtcttctgcaccacgagagaaacccagggatggccttcatttgtcatgcagactgtgaggaaaaccacagagggagctccagatgcctggtttgggcccccagggctgagctctgcagacagcctgcaaacaaatctctcctggactccatggggctgtgggaaggtgcctgtgaaaatacaactttcccttttcttttctccttgatgaaaagaatatgctgttagtgaatgtgtattatttttgtctttttaaaaaagacaactgaaacctatgccattttaaaggttaaaaattatacaagcccaggattggtggctcaggcctgtaatcccagcacttcgggaggctaaggtgggtggatcacttgagttcaggagttcaagatcagcctgggcaacatgatgaaaccctgtctctacaaaaaaatacaaaacagccagacatggtgaccagcgcctgtagtcccagctactcaggaggctgaggcaagaggatggtttgagcccaggaggcaaaggtggcagtgagctgagatcttgccactgcacttcagcctgggcaacagagtgaggccctgtctcaagaaaaaaaaaaaaaaaatatatatatatatatatatatatatatatatatatatatatgcaaaatgagagttataggtagatgaagctaaataaaggtaaccctgactttcacagtggtgagccccagttgcatagcagaaagctcaatctggagaaccattcttggttcaagaacaggaagagaaagagaaagagagagagaggaggtaagaatctgaagaagtgtgggatggccatgcaggcccccaagcatagagttgtggaagaggacatagctctcaccaaatccctagaagcccccagagaagggcagagagcatggaatgacctgggaccttatctgcacttttccccactgggtaattctgttaacaagaaaagatctctccacccacagaagcttgggctgcacccctccccctgcagcagggaacactgtcctcctagaggcagttaccatcacttaagtcttatacttcagaactgctaggcatctacctctataggctaagaatatcttgttcgggtaatcatcttgtttgtaggtctttaacaagctgccctctagcttgtgggcgaggggcacatccatgaacactgaaagggtgggcataactgaaacgaaactggagccaagactatgtgtctctgctcctgtgttccgcttctgcccagaagtcttcctccaaggctgggccgggcagtcctgcctcttcctggaaccttggcagccccagtgcagaggcgctggacaacgggttgccagggcaacagaacctcatgatctttgtggtggcgatccacaggggccacaggaacattccagggtacttgaggagaatcccctcagacagcgggcagggcaggataacaatctccggaattcccaagcccgtttccctcactcaatgccttctcttctctagccccaggtggctcagtccaaagtaacaagcccactccttagatgacagggcaaggataatgggagattacttaacagatacaatgtacattgttggggttatggataccctaaaagccctgacttcaccactatgcgatgtatgcatctaacaaaattacacttgtacttcacacatttatacaaattaaaaaaaaaaaaaagaaagaaagacatagggcaaggcaggcagccaataagccagatagggcttctcctgcagaagcaaaaaccccagatcacacaccaatgcaagtcgaggcattgatttccattttgcaaagtgccccagatttcaaaaggaataaaaagcaaacactgttttcttccacagttgttttaataaagaatcctattattagaatataattggcaactcactaagccagtcctatttctctcagttatctagagccaagacttctacatatgtttgttaagtttctttttctttctttttttggttttttttttttttgagatggagtctcactttgtcgatagtctcgaactccttgcctcaggtgatctgcctgccttggcctcccaaactgctgggattacaggcatgagccaccacacctggccatttgttaagtttcaatgacagccaactagtaagtatagacagcagaggccaaggggagaaaagagccagcctctatagagtcagtctgcatattgcttgctttcttttccttttgatgtttaatgactctctctttttttttttttttttttttgagacagagtctcgctcttgctgcccacattggagtgcagtggtgtgatctcggctcactgcaacctctgcttcccaggttcaagagattctcctgcctcagcctcccgagtagctgggattacaggcatgcgccaccacacccaactaattttgtatttttagtagagagggggatttctccatgttgatcaggctggtctcaaactccagacctcaggtgatctgcccacctgggcctcccaaagtgctgggattacaggcgtgagtcactgcgcccggcttttttttgtatttttagtagagacagggtttcaccacgttggccagactggtctcaaactcctgacctcaagtgatctgcctacctcagcctcccaaagtgttaggattacaggcatgagccaccacacccagcctgatgttaaataactctttaaatgattgttgcaaacactgttgatgtctcacccagaaggccttcaccaccaatgtgcccggccccagctgctgcttcgctggtggacaaggcttatatgcctgtgttctctggagaattgtgcttggctggcaggagtcagctagcctagaaaccacctggaggtttcacccccactgacaggggtagccaatgactgcctgatttaggcatacaaagggtcagccacagccaggcatggtggctcacacctgcaatcctagtgctttgggagactgaggcgggaggatcacttgagcccaggagctcaagaccagcctgagcaacatagggagaccccccccacccactccacaaaaaattttaaaattagctgggcgtggtggtattgcagtgagctatgatcatggcactgcactccagcctggttgacagagtgagatcctgtctttaaaaaaaaaaaaaggtcgggcacggtggctcacacctgtaatcccagcactttggaaggccaagacaggcagatcacaaggacaggagattgagaccatactggctaatggggtgaa

SEQ ID NO: 587521 - DNA, 4001 bp, Homo sapiens
gagactacttacttgcccactgccaccaggtcatacttgtactggcggaagctattgatgccacgcagggttagggcctccacacggtagcgcaggaagaggccatgggagccgtgggggcggccggaggcctgccgcagaaccatgagcagcagtgtctgcaggccctgcagcggtccatccaatgatgtccagtcctcgggctgcagctttagaggtgcaggacaggatgagacagcccctcccacagaccctgtgcccttcagccctcaggcaggcaggcagccccaccttgccctgaagcgtgcacaacaggccccctttctggcagaaggtctggaagagattgagcaggtcaaggttgggcagctgcccgttaagcccctccacggccacatcgaggctggtgaccacatcactgctcagctccagggccacggctgcctgaatggccccagctcggccctgcaggggagacgactgcatgcctgtaggagcaagtgaatgagtgctaatggaggacgtggtgaggacagtgaccctgagagggggaccagggcaggcaggacaagagaacctaccagtgacattgacatcgtggtaggcttcaagccaagcctcagtgcccagaaggtcatgttctgttaccaggaagacgatatctttggcccaataaatctgccctggaggccagaagcaggatcagcagggtctggggcactgaccaaacccctccacggccagcagccctgagactcaccccggaagtgggcagccagtgccagcagcagccccacagcctggctgttggtagagtcagagccacagggcacggtgagcacaagcgactcggtgctggcagcacgcggggcccgcaggatgccgtacacgttggtgcccgacaccatctgtatgcagcatcggtggggggagcctcagtgtaactttgtggtagggggctgaagggccccccacaactttcctagccctccagtgcccaccagggatttccctcccactgagcttcctggccccatgacacccccgcaaggtgatacccagcccagacccctccctccaaggtgctttctgggcccaggcacaccccactcccccagtacatagcgctcgtgggtctcatctgggaagggcagtttccgggagaaactctgcgtgtagacctccagccctactgaccgcatcgtccgttcaagccaggccactggcagagccctgcagacacgaagggagcctctgagcagagctccccggccttagccaccactgctcgccccatacgccctgctctgccgctcaccccgacttcttgcggtgggcggcgaagtcccgggcaaaagcccgggcacggtctccgcccgcaaactgctcctccaccatggtggagcccatggcgttctccgacatgtaagtgcgctgggtcagcggcgggaaaaccagcgccaagaaccaggcgatgcccgccacgtagctcagcacgctgtgagagaggacggaggggcaccggagcgtcagcgggtcctcagacgccgacccgaggccacaacctccgcacccggggtcgatcgcgcgggtctgggagacctaaacccggagtcctgcatcgggacgccggacccgagccctaagcctgggcctgataccctcagtgcttccagagggcaggagcggaagggcgcgagcagccggaggggcgcgagcagctggagcggccccggccctcgatggggaccgcgcatggggccgccggcgcgagcccagggccctcgggtccccgcctccccgggccctgtcctcaccacaacggcgcgttgaggcgcagcactaggcgggcgagcgcgcgccggcgaaccgggtccgacaggaggcccatggcggggcagggcggcgcggctacggaccctctcccgcctccaactaccgccgcggtgcccacaggctgctcctgtcagacccggggacccgcgctcgcccgcacttccggtcccagagacgctcgcgacggcgcgcatgtccagagcagagggcgcgcccctaacactgtgtgctgccggcgcgcaagcgcagagccgcggccggctggagggtgggcggtgccggtgaggccggcaggacctgagcgggtttgggagtccgctaggcgctgcccccactagagtcggactcgcagtgcaccccccgggagggaggcaggtagccctacagccggaggacagcagagatgcccgacagcaggccgagctggtcgggggctgcgagatagcgccggctggaaggcccgcaggagtcagaggtgatgagccgggcaggtgggtggaaagccggcggcggtcagagaatggatgccaagcgagactgccaatgactcaggacgtcccagtggagtcacagcgtgagcccagcaccgaggttttcagagtcagatgactgcagagaagatgctgatggcactactggccaaaacgggcttcactggagctggggtgtgtgcattataaagtgggggatcatactgtcactgtccgggccaggagatccgtggaatattaggggagaagcagtcccagggtccagactgcagggactggtagtcggggctcggtgggccagaggtgaatgaagggggagtttgctcaagagggtgcactttgggaaggtgaggtgggtggatcctttgagatcagcctggacaacgaaatgagacccagtctgtacacacaaaaaaattccttttaaattagccaggtgagtggggcatgcctgtagtctcagctcaggaggctaaagtgggaggatcacttgagcctgggagatccagactgcagtgagccgtgatcacaccactgcactccagcctgagcacagagcaagaccatgtctcaacaaacaaaatagtggtgggcagagagaagggtcaaagctgaagactccatgtgagaacaagtttttttttgttttttttttgagacagagtcttgctctgtcacccaggctggagtgcagtggtgtaatcttggctcactgcaaccttcaactcctggttcaagtgattctcctgccccagcctccctagtagctgggattacaggtgcctgccaccacactaatttttgtgtctttaatagagatggggttttaccacattggccaggctggtctcgaactcctgacctcaagtgatccatgagaacaggtaatttttgtacttttatttttttttagatggagtcttgctctgtcgcccaggctggagtgcagtggcacaatctcggctcactgcaacctccgcctcccaggttcaagagattctcctgtctcagcctcctgagtagcttggattacaggcatgtgccaccactcccagctaattttgtatttttagtagagacggggtttcgccatgttggccaggctggtctcaaactcctgacctgaagcaatccgcctgcctcagcctcccaaagctctgggattacaggcgtgagccaccatgcctggctgttgtactttcagagcccaaggtaagcagcaggaaaagcccagggggctccaaaccatagtccagaggttgtgggacatggcccccacatccctagggtgggtacccagagccagctgagttcttcctcagccctttgctcagggcccccgatgtgctggaataagggtaacagattcctcagtctaatggcctggctcatcttgccaggccctgcctcctgctcagctgccttgagtccttactgggacatgctgctttttccacccagggcctcccctacagaaaccccctaatccactgttctcttcagggtttgaatcaggctacacagagataggccgttcatgtgtgggcgagggtccctaatcatccccaggagccagcaccagaccaggctctgccagccttcacatggctctgaagtgctgttaggtgataacgtacagtgaggggtgtgtgggcagaggagggttttattctg

SEQ ID NO: 587522 - DNA, 4001 bp, Homo sapiens
tctgttccgggcccctggctttcccgccgcctgggggtgcatgtgctgcggccccacgcccacttaccggtgttcccgtgggcaatgagggttgtgcaggtctggccatgtgagcagttctgcgtcaggttgcagcgctcgtccctgggcagggacttgcaggtgtagcaccgcagcagcactggggacaaggcgggctcaggccgaggccgggccccccagggtctcctcccacgtccctgtccacctccccgttctcagctgtgctcccaaagcctagcctggtgagcctccagcacccactgctcagatgggcgggcgacccctgacttggtcctgtaagctgtgctgtgtgcgtgagcctgtgtgtttagggggcaagggattgcgggtcaggcagggcgaacttcccatcatcactcacgtcctgcgacaatgctgcccaggctcctgccgtggtcacagaaacctggaggtgggtctgactcagtcctgcctccaggagcaccaggcctggcagaggagggcctcacaggggacacctcgtgggtgtgtggggcagggctcgtgctgagggcaggcttggggctcctgggaggggggtgggctgtgtgtggtggggcatgctgggggccctggctagggaggggctgtgtgtggtggggcacgctgtggtccctggctagggaggggccggccctcgggttggatgcggcgatttgctctgcttttctcgggatgggagagagcagagggtggcccacgtgtaggggtgtgtcaggtgggcagtgagggtgggctcttcttagccctactctgctctgctctaagcggttccctggctccccagcccgcagcagccaatccagccctcccctgtacaggaccggcccaccctgctgctctctctgccccacaaaactgaaccctaccctggggcctctgtgcttgtgtctccaccctaggcccccactgagcccttctctgcctggtgaactcctatttaacctctacatcctggcaccactgaccctcccagctggtggcttcttcccctgttccctactctggaaggcaactgagtgtcatggtgagcagcagtgaggggtgtactgagtgtcccccactctgctggaggcaagctcacagcaggactgtggcctgctggcttccatcacacagccccgcccagaatgctccaggcagatcaggcagcagggctctggggttggggcggccatacctctgctcctgccaccagggagcctgttggtctcctcctcttccacctcatcctcatcttcctcgtcgtagtcatctggcccgtggtcctcgtcctcttcctcttcctcctgctgtgtctgccctctccctggccgtgcagggatgcttgtaagcctcagctacccgggtatggaggacacctgctctgggcaagcatcgtgcccccaactccttggccctccccagccatcctcgggccccagggtggctggggagggcccctaccctgaacaccctactcaccctactcactgtcctgcagcctactcaccctactcactgtcctactaccctactcaccctactcactgtcctgcagccgagtgtgccctggcattgtagttacaacagcagctgctgtgggctggccctttatggtagcccctccccgcaccccacataaacaggggcgcagatatttggggactctcggggacccaggccagcttccatccatgctgctctgggctggggactccagcctcatcccctccttcttcctaagcccctgctgggggtccctggaggtccctgtgctccaggactgctgttgctgccccctcaccgcagggttaccctttgccccgcacctggccgcccgaacagcaagagggcaagcaggacagccccgagcgccttcatctcgccggacgctgctgtgtccctgactctgagtcctcccgcagggctctggagctgcggtaagtgggatgaagggcattgccgtgggcttcctagtggcccccaccagctccagcctcaaacaatgggcctcacactggtccccagctccaggcgccaggccagggactgttgtttccctccaggacatctggggccagaggggaaggagaagtcattgtggttggccttggaacgtcctgtgcacccgtgccacggcaggtggaaggtggtgctggccctcgcctggcttgccgctcagtgcctcagccctgcagtgcagggcagggagcctcgccccggaatgggccatgcctgacacccctcaaccccatgtctgggctccatagtcacaggaccttggggtcacagaccctctatttgctggtcactggccaagcatcgtcatcctagagtcagcatcacacccaggcccctttaagagcatttaagtaaaaacacagtcaatgccctcaagctaaggctgcgtgctcacctcctcctcacccacactcagcaatgcactgctaggcccaaggcctcccggctgcccctcactatcacctcgggtctttgcccctgctgctccatctgcagtgctgttcctgctggtgtccggtggagagctttctggagctcttgggggcccgccccctcggtctcttgctgggaaagccatcagcacccacctgccttctggccttgtgtgagagacgggctgctctgggagaggcttggaaagcccaggtcgctccctgaggccaccccctcctctcaagaccccacccaagcccttggggggtgctgatgcagagtgcagagtcgaggctctgagctgcccctctcccaagggcagcagaggggtggggcagcggcaggggctggacgtccggagccagggtcaagcctgagcgtctctgtgtgccttggtgcttgggccaggcacttcacctactgaggcctcagtttccccgactgtcaatgggtggggtggggcattttctggccggccacctgtaacagaggttgagttggttctggagtgagctacctgggtttaagacccggttcctccttcccccggctgtgggttctggactagccccttgggttccccaggcctcagctccctcatagggtgaggtgaccatcaagggtcagtacctgctgggcttaggacagcgcctgaggctgggaatacctgtctctaatgtcccagccaccgagtcaaccatccttccttaattcacctgaacctgtcattctttccactctaccggcacccacccagcatctagcccttccccagccaaggctgcaaggtcacttgccaagccagggtctcccatagtggtgcccacgccacagccggacacgccccgccagccccaaactcttcatacctgatgcctgtcccccccagccccgtcccgccccgccccgccccgcccttccctgcccctccgcgcgtggccccacccccacccgcctccctgcgccctctcgccctcggcccgcctcccccacgccccgcctcccccactgccccgcctcccccactgccccgcctcccccactgccccgcctccccccacgccccgcctcccccactgccccgcctcccccactgccccgcctccccccacgccccgcctcccccactgccccgcctctctcacgccccgcctccccccacgccccgcttccctggtgccccgcctcccccacacctgtctaccccatgccccgcctcccccactgcccctacttcccgtcgccccgcctccccatcgccccgcccccattcgccccttctccccagcgtcccacctccctgtcgacccgcctctcctgtgccccgcctcccccgtgcaccgcctcccgtcatcttcacccctcctcccccacgccccgcctccctgtcgcccctcttccctggtgccccgctttcctgctgccctacctcccccgcgccccgccccggctaccgctacaggcccttgaatctagtgctgcaggagctgctcctaggaagg

SEQ ID NO: 587523 - DNA, 4001 bp, Homo sapiens
gcagcgagcagacacaccgcctccacccttaaggcacacacatgcacacacacacccgggccggggaaaatgcaggccgggcggccagcgtcagaggctgaccagttgtgtcctgtcaggaagcgggcagcctctgaactcacccaaccagaggcgttactgtattgttctggacacaatcgaaaagactgggccagccccgactgcgggcaaggggcggtggagaaacggttgccactggggtcaggaggacagggaaagggaagcggctcttaggctggatttgggacaggaaaggaagcggcggccgcgggggcccgaccctcaaatccacggcgtgcgtggagctgcgagcacgtggtcggcgcaggaaatctctgcggtggggaggggtcgccaatgctcgcgcggctgctgggacttgcgacccccttgtaggaggcttggggtcgggctgcggcgctgcagcgctcgctgccagcaaagcaaaggcgtactgaggccctgactaagagggaagtcgcggaaggaggcccgggtgggctgcggtgagggaaccccgcttccccagccgcgtttctttcttcgcaatctttgcgcgaagtcaatggagaaacagccaaagctcgagttacttccaggagaggcaaaggagaggcaaggacgcgggacccagcacagagctcactgcacaaacggcgccgtgggagaggggcctctagagggatggggacgccagggtctcctgcagcccaggagcgccggtattccaagggccgacttttctgagcccagcctccccttgccctaaggagaccggctggaagcggcgctggcaggccagggggcaaggatgggatgaccccaattgaagggacaaggccagccaggtaaatccggagactcctccagcccagtccgggacgcgaccgtagtggttaggaccacagccccctcctgggccacgagcgtcgatctttcctgagcattccccgctctcacccttctcaggtccccaaagtccgcaaccctagtccaggctggaaatccggggcgtgggtgccctgcaggcgtgctctccacttcacctgtgcaggtgagtgggcgcctgcggtgcctttctctggggtgcgcctgtcccccgcagccccttcccgcctccacgctcctggagccccagtctctcccctgctcctccaatcttcccctctgggggcctgaacccaggcctgtccagaaatctctgaagtggggggatagcccccttccccctgctcccacccctcccgtctcgcctcccttcgtccccagtcccggctcggacggaactggcctggtagggtactcacagggtaacggtgccgttaggcagaaggccgggctcgggaggctccgggaggtccccgccgctgcacaccaccctccgccgagccgggccagggacgccgccgctcagccccttgggccgctcccccgagcacttgcagctgcggatggatagcgggcagccgggcgcgccccgagcctcgggcgccaggagcagcaggagccacggcagcagcggcagcagcaggcgcgcgggcgccccccgcatcctgcgtcccccggcgcccatcaacccatcgccccgcggggacccacagcgctggggccgggctgcgcgccggccggagggacccaggcgtgcgggaggagtgctcagcgggggcccggggctcccgagggcgtggaggggggccctgggcggaggcgagccccggggtccccgccgccgcgccccgggggcatgtcctgcgagcgccccggcggggaggacgtcggcgcggctgtcagcgcagcgcgggcagctcccagctgcgcggccggagtctcagcgcccggccctcgggacactggaggcccggcccctccgcgtcgcctgctcgctgggcgctgggctgggacctagcggatcgcgccgggctcctgctgccgccgccgccgccgctccgtgccatggatggaggcagctccgcgccgcgccgctcccgccgccggtccccgcccgcccgggccttccgcggggccctagcgccgaccgacacgcggccaggcctagaccctctgccgagtgggggcgggccagctggttcgaggaccctgcgtccccgcgcccgccctgcaccaacactcctctcccgcttgtccccgcgccccgggccaggacccttcctttccgcaacccatctcagacctctgagccgaccaccaccaccttccacaaaatttccctcgtccgtgccggtgcagcttgcgtctccaggctgctggggccctcctggacccgcgggcttggacagagacgtctggggcgccctgttttgggttgaacttggtggaaggctccgaggtttcctttggcccctgacacgatgatcagtctggaagtcggctctcactctccttccagctccggtggaggcagccgcaggaggatggcagccgagacaaggaggcagcagaccctcctccgctgcggtgacctcgctcagcggggggtgcatgtcattcggccaaggagaggtcaaaggccaaggcagacaaggctagaggctagactgggcctcctacattttccacaacgctgtgtgtgtgtgtgtgtgtgtgtgtgtgtgtgtttcggggacagtgagtgggacaagggaaaagtagatgagaaggagcagggctttgcagcagggtgtggaaagagcactgcgcagtgagtctggagacccctattccagactcggctctgcctctcattactgtctgaccttggacacagcccctagcttgctggggtagcagatctctggggttgaaatggggctctgcctgctccccagtttatagagtggcattagatgcccagtaaatcgtggcattagaataagagagtgtggtgggggggaggggcacatggtttccaaaggcagaggactggtggtggcaggggtgaccttgacaactagtggtgggtataaagctgcctgcaggccgggcgcggtggctgacacctgtaatcccagcacttttcgaggccgaggcgggcggatcacttgaggtgaggagtttgagatccacctggccaaaatgatgaaaccctgtctgtactaaatatacaaaaattatccgggcgtcgtggtgggcgcctgtaatcccagctacttgggaggctgaggcacgagaattgcttgaacccaggaggcggaggttgcagtgagctgagagcgtgccactgcactgcagcctggtgacaaagtgagactccgtctcaataaataaataaattaattaaaaaaaaaacagcctgcagtacaccggaaccagggctggggacaggcagtaagaagtgcagcccaggggtctgcttcctctgtttccccacagaagctcacctttctgttgcttaatagagctgccgggatggggcaggactcccgttccccctccttcactctaccacccaagcggtccccaaggtgaatgccacattctttagtgagcttagccctgctgatgtgcggtggtgccttttctagggcccctgtgcctgtcagccaagtctaccctgactatgcagggaatggctttcttctcttgcccgttggcgttggcggcaggcaggggcctagatgttggcttcttcactttccctccctggctccacagatctcccccagttgcaggctctctggttccttgaacttccaaagataaataaatagtgattgcaaatggaggaagggagaaggggaatggactcccccagcaggagccctcacaggcggtggcccaggctgcattcctcaggaaagagctgacagcagagccacagcccataggcagggctgtgcagccctcctgctcacaggcaaggaagactctgagatctctggcctgggtcatatagcttttctgtgatttcctttggctaaatgaagacactcaaagtctaaagaagaattctactggaacac

SEQ ID NO: 587524 - DNA, 4001 bp, Homo sapiens
ttccctcaagatgcccctgggtgggtgtttctggccccactgtgcctgtggggaaccaatacagaggggctaagtcatgtgtccgggctcacccagctggggtgcaggaggggctgagctctgcctcaatctgcctgctggcactttgtcccagtgcctgggatcagccttctgcggcacccagccctgtgtgtggagggaatcagaggccccaggccacacagccccgtgcagtttggaggtgtcagaccaggacttagaccccagcactgcgggcacaaatgggtcccaggcagacctggccccacctttccgagctgacagctcagggtagggtgggaggtggctggtcacggccgggatgggcctcaggacaatcagagggaagagcgctcccggcagcaggaagggcacagtgagcatgaagggccagaggtgggaaggagagtctgtgttcagggctctgtgagacaccgggggcgtggggagggctttgggacgtatggtgaggggatcaacttaaggttctttgggccctgacgcccctcctcagggaggccctccagagcccacagccccgcacgcctgcaccgcctggcttccttcgcagtgccctgccacgcgcagttccctatgtccctgctttcctgttcgctgtgcttccctcactgaactggagtgcctcaggggccctggccttggctggcccctctgagtcactgagtcactgctgagtgatggagtggatgattttagaatacccctctgatctccttgagcctcagtttcctcatctataaagaggagatgctaataccacttaacaagaagacaatgaagccaccccgtgggctccaggagctgctcagaaatggtccaaactgcatggcccccacgcccggctctccagccgcagaccccgcctttgctgatgggcccacaccgtgtggctcagagaggggcagcgacttgccacggccactcagcagaccgccctggagcccagcgactggatgagtcctggggggagaggggagggaagacccaggatgaccagctgttgaaggaagaagacagggcaagtggacaggcccagcctcctgcggggtgcattccccgtcctgcgaggtcgccagctgctccacgtctgccccgccagcaccctggctgctggccagttcccagcccgctgccccctcgggaccctgtcctgccgccttctcacagcgcagtcccagtgcgagcttcgcggggctggagccagcttctaggtccacactgagggctggcaagcaagccttccctgggactcagtttccccacccctaaggggtagagacagcaccaaggctactgcagagggcctgagctgtgggatggcaggacgggcactctgaagagggagcatggcgcttggagcccatgcccacaaagccctcaccatggccctgccccagctgcggggtggtggtggctgaggccccagagcctgccaagtgcctctggggtcccccaactctgtccctggcttggcctgtgggccaccctgctgccttgccaggtggggaaaccaagacccagctctgggcacccagcagatgctcggtgagtgttgaacggagggatgaatgagtgaatgaatgaaatccagagttgggtgggcacctagcagcgcagctcccccttatgcagccagcccaactcacgcccatgttctccctcaggtctctgttttctcatctgagaaatggctccctgtccagcaggacctgctctgagctctccccagcccggatctggaggcagtttctctgccctgcccttcccactcctgcttggctgggggtgagaacccctgcagggagcagctcaggagcctcctatctagggaagctggggagagggaggctggggccagcccacaggggaacttaccgcgcttcacccgggcaggctggagatgggagtcctcagctctcagctctgcatgcagcccggacctcgccttcctacggcctgacgtcaggccagcgcttggggctccttttgggcaaaggcagggtgggggcggggcaggctccttccccgcccccaggaggagtcaaggctcagagcctgagggacggtgcctggggcaccagagtccccacacccactggagacagaagaagaaaccgaggcacagaggggcctggggcaccagagtccccacacccactggagacagagggggaaactgaggcaccgaggagctgagcctcagctgcaccatccaggaggtggtggctggcacttgtgtgtgccgtgtgcagggcaggaggtgggaaactgaggcacggaggggctaagcctcagctgcaccatccaggagacagtggctggcacttgtgtgtgctgtgtgcggggcaggagggggaaactgaggcacggaggggctgagtctcagctgcaccatccaggagatggtggctggcacttgtgcgtgctgtgtgcggggcaggaggggaaaactgaggcacagaggggctgagtctcagctgcaccatccaggagacggtggctggcacttgtgtgtgctgtgtggggggcaggagggggaaactgaggcacggaggggctgagtctcagctgcaccatccaggagatggtggctggcacttgtgcgtgctgtgtgcgggacaggaggtgggagcacacgaaagcccaatttccttcccgggagggggcatgtgcatggtagcttcagcccacgcaagcctgggttcctgcatggctctctgttttgcatgtgtcctgggtttggctgtgtctgtgtgtacccatgaccgacagcctgcacacctggcatctgggcctctgtttgcacccatgcaccggtggcatgtggcatgtggggtcaggtgtgtgggaaagacctggacgtgacccaggccagcaggtggggagagcgtgtgggacccggacctcagtgctggaggaagcgtgagctcatcaacaggcttgatcccagagggctgctggagggccactctccccagacagcttcagagccaggaggccttgtggccagcctggggtggcagcgggggttgtcggggagcggttggggccatttagttagtgtctcctctgccgagagcaccatctcctcttgttcccatcccgtgtgcttctgctgatactcacactttaaccttccagccgcctgagtgccgaggccctgctgagtgggttgtactgcacaccggagactcagggaaggctccccaagggaggggctgggccttcccgagctcaggctggttgtaatgcagaccaacaggagagagtaggtgggccctagggtcctgacccagcctgctggggagggatgccgtctgggaaggcttcctggaaggggcagagggaggtataacaggaggcaggcagcccagatgggcagagggacaggaggccatcagaatatttcctggggagcaaagctgggagtgggcaggggacttctacactgagtctcagcagcctctatgggtaccagagtgctgcaacagggagccattgaaagttctgggagaggatggtttcttcactctggagcagcctccctgcggctgcagggctgagcccacaggctgcaattatctcctttagaacatcgttgtgtctgttttagctggggaaactgaggcccagagaggcacaggagtctctggccaccagcctcttgcacctctctggaccaggactggctcctggcaggcagggtttcaccgggcttgtggaaggtgggggtggatgcaatgtcatttttgtgtgggggtggcctggaggcagcccagattgggcagggctggagccagaggaggctcagatttcctgagcaggcgagggtggctgagtcaccgcaccagtgccaggcctcatgcccacctctgagggcctggggctccagccttgcactctcaggcttgttctcagagaaatctcagagacggtccccc

SEQ ID NO: 587525 - DNA, 4001 bp, Homo sapiens
gcccggcgtagggcggccccatctccatgagcaccttcttgaatgagtggaactgcgaacccgcggcgtacacgttgtcctggtacacctggaagggcgcaaggcgtcacgggggcggactgttgcccggcttcccgctcccccgcgccgcgcacctcgtccgccagcagaaagagccgctcttcgaaggcgaagcggatcacggcctcgatgcactcgcgggtctgcacctgccctggggtgccggggaggcagcagtgctgggtgagccaagggggcgcactgccctccgctgggcagccggggtccagcggacccggcactgcctgggccagggcgcacgtgggtgcgggaggagtggggcggggcggcggggaacgcaccgtgggcgcggagggagtggggcggggcggcggggaacgcaccgtgggcgcggggggagtggggcggggcggcggggaacgcaccgtgggcgcggggggagtggggcggggcggcggggaacgcaccgtgggcgcggggggagtggggcggggcggcggggaacgcaacgtgggcgcggggggagtggggcggggcggcggggaacgcaccggtggggttgccagggttgatgacacagagcgcacgagggcggcagtggtcacgcgcctggcccagtgcacggtgaagctcggccacgtccagcgcccaggcacgctcctcgtccaggtagtaatccacctgcactgcgcccagctctgccagcgtggccgagtagagtgggtactgggggatggggatgagcacacccgtgcgtgtgtggccctcgccggccaccagcagcttcagcaccgtctgcggaaaggaaggggaaggcagggttggcgaggcctggggccgcacctgtcccccaccctgggcgccccctctgcagtgtcaggaatgtcttggtgcccatgcccagcctaccacgatggcatcgctggcccctgtggacaggaagacgttgttggggtccgcagggatgcctccgtcacgcctctcaatgtaccgcgccacgtcctcccggatcagctggatgccggagctgacgctgtaggcccctggactcgggcaggacaggatgggaagtacaggtgaagttctcctcagccctcccaagggacttccctcctccagtggcagggcggccctctgcttcctcctggccctggctctcacccagactgtggcccccacacgcctgcaagatgcgctccgcccttttcttggcatcgtcagggaagttggggctgctcagaagatcagggttaacacagagggccaagacctgggaagacggagtgctgaggccagggcacatgggctgggggtgggggggtgctccgggcagtgcaggagcctcacctggcgcaggaaggtgatgggcctctgccccatagcctgtgcgtccccgatgttggcacggatgacctcggtgaaaggcttcttcacaccctgggaggggaggggagcaggcagggagactgtgccctacctaacccctcagcccttgtcccatgtgccagtggggctggggccaactcggccaccccattgtgacctggagggcagcgaggggccctgggccatacctggcgcagctcctgctccagctccaaggctcgctgcactatggggccacgcactgcgtactccactctccgcacacgcgggttcatgccgtccagcgtcagcaccttcgccctcagtccatgcctcaccgcctggctccggtcacctgtgctcgaggccatgactctacccagaccaggcgggaaggcagctcaggaggtggcaggaccagaagtgggaatggcgacagctgggtctggcttagtgggccagggctgggagggggcagccgtagcagagggaactccaggcaagagagcaccctcttcaccgcagctggcctcactgggagggacagaaagggctgaaggagctggggacagttgggccccgccccacccgtctgggaacagctctgccccagggaggcagaggcagtgggtgaggtggcaggcggggcttggggcaaggcccagtgcctgcctagtgtccccacgaagggagagcaggagacccacatggggggtaggtacagacgtcagtccggacagctctgagggactagacatggggggagggggagagggctgagcacctggggtgctcaggaggtgaaggggtgcccagcagccctgaggggctggcagagctggcaaggagggacccccgaggcgagactggagcctgggctgctgggatttaccccagcagggcttggccgaggcctggccctcgtggcacccgcatctttgcttgggccagcggacctgtctcctattaactgagccaggcctcaggaatccagggggtgctggggggaggggaggggtgttcaggctctgggttccatctggaccctccagagctggcagctatggcccagaggctgcaagagctctgtagctggaccttggtccctgatgagcactgcgaggggctgggggagggggctggagccaggcagtccagccctgagccctgggacagctcacaccgtggctgctgtcatgccctttcaccaggcaccagctgggggttgcccttgggacacacccgaggctaggggtgacctgagctctccagccctcttgttcccgattggaggagagagtaggaaacgagctgggataggccgtcagagccccacctccacaggcctgctgagctgaaaggccaggctccacgctggcccaccccagcgtcgggcaccgaaacctgaaccatgggggtcagggagccggccctctgagcagggctgtgggcaaccagccaggcccaagtcggaccttggctcctctgatcctgctggctgggagaaaagccatcgggagccctggacagccggcccccaggcctctcaccgtgcacgtctctgttccgctgccacaacagcctccccgtgcgcaggcctgcccctctggcccccaggccggggcacaggttaacatgggcctggccccaggcagagccagcccctgcccgccccctggcaagggagtccaagtggcagccctggtggcaggtggaccttgggcagctgccccaccccccacactaaatttaaccagcagccagccctggcccgcccacagccctgtgaggacacccttccaaccagggatgctaggggaagggcaggcccaaaggacactgggctgacgggcccgtgctgagccaggagggagaacagcccaaacccacaccacccagcactggtggccacacaaagccgcccaccatgaacagacgaaccagcggtgccctcagccctcctgcttgaggcccctaaggggccccctcaccctgacacattgtgccaagccagctcagagccagagtggccaactgcgtgtcccctatgccagcccaggcggaagctggcagccaggccccaggattaaggctgcgtgccaggaactggggacccacaacccccccagggagcttctgacacagccttgtgcttgttttgcccctctggctctgacacaagagtcttgtggaaaacaccacctccctttccaagccatggtccctgggacccccaccttccgcccctcagcacagacaccctaggccctggcccccatggaggctccttcaaagcacctggctcctctcaggagagcaaagggttacggaggaggctccaggaggctgagcatgggagggagtgggtgaggcccaggcttccagcccagtggctgtgagcctcactcccacacagccagggctgccacatgccccagcgcgcacctacaggctttcatgctcacaggcacgggtggcaccccagccaaacagcacaacccactccccactgtgggacagcgacccagctgagacacacaacacacaacgaggctccatggcaaaacagccctttatcaagagttgcaggataa

SEQ ID NO: 587526 - DNA, 4001 bp, Homo sapiens
ctcccgtgttggtaacgctagttcttcccctccggtatgctgtactcggttaattcctcatcggtggctaacggggtacaactatctggcagttttttgctttttaagtatgacagcgcattttcttaggttcgcctaacctgccagcggctttatgttgaggctagtccttcccctccacccctgaacaggtccgcagggccttcccactcctccctcgtggtccctcaacttgggacgggtccccgccacttctccatgacaggcccagcggcccgcggccttggggcaccggccctctccggcgagacaccttcaggaaggtcccctcggggtggccgcaacgccacggcaaagttaccggggaaagcaaaagggcggccccgcgcacttccaataggacgcagccagttcccaggcccggacgcgcccgagaggagggggaagggagtgtccccgccgaatcccgagaaaggccgcgggacccacctccggctccctcccgcgcccgcccaggccccacctcccccggctcgcacaaagccttccgagggcgggggccggccaggggggaggccgtcaggacgcggccggaccgggcccagtgacccgcgggcggctccggccgcgcaggctgtggctccccgacgcgtctggagtgcctgtccgggacgggaaggacgcgagcccagcgttcccgccgccccgagccctcggccttgacggcgagagcaccccgagaaggctcggcgcgccccacgcagtcccgcctgccgcgtccgaggtggcggccaactgcgtggagggccgcgagctcgaggggcgtgcagacgccgtcgggggcgcgggtgaatcgctcagtggcaggcgccccttcgcgccccgccgaggccctaactcgaggcctcacatgagttcccccagttcgcgaaccgtcctttccccccgggcacctgaggaaggtggccaaacaatgcgggggcggacccgggggagggaggcgggggaggggggaggaaggcgggatgtcgagggagtgggggacggcgccggccgcccccgcgccccccggcctcccagcgcctcgcctcccatcggggccacacgcgggcgcgcactcacgcccaccctcctgcccggtgcgagaagatggccgtttctgcctcatataaaagctctttgttgcggtcacacaaaagcggccaagccccacttttccagtaggccctttggacaaatcgaaggaactcagctgaacttccaaatggccctaaacgccagatcggtgggagcagctaaaacagagagggaagagcaggcctcccgcgcccatctaccaaaacctctggcaatatccaagtattcatccaggagcgggagctgagaccattcctaagggaagaaggaaaaggaaaacccacttttactatcaaggcccaaaggggatattaaatattcacattgttgtagggtttctccccttaatcagggtagaaacataatgcggaaaagtctggatccaccaaaaagaaaaagaaaaaagaaagaaaaataccaacaatagcaacttaaaaacaaaaacataacaaaccagttgccatcagcccaaagtggtagtagtagcagcagccggcgcgtgtgatccacttacttgtccgactcttgtgacatgtttgatccaatgaacttgctccgcttttcctggagcctcagcctctggtgaaactggactttcaagtctgtgcaggtgaaggtgtgtgagagcgcccgagatggcagaacaagagctacaggtaattctgcttttccgtcccccctcaccactctcgctcgctcgcccgctcgcgccctcacctagccggaaaggtgggataagggggggcccctcacatggggcccgagctcggaggcggccgggcggcgcggagtcctcctggatcgtggcaatgggcagacacagagcagaaagtggcggacttgggcggccacaggtaactttctcgcaaggagctgaattctttcactaaagggtacaagcccgagggacgagctgcgcgatgattggctggggagctccctcaggtgagctgccattggcagaggcgcgctcaggtaaggcccttctccgagtgcaggtaactcactccgaagtttacccgagtggagcggcggcatgcttgcagctcggcggcagcctgtgagagctgagggtcagttcttcgagtagatctcaagctgcgttttcctccttctccaaagcagggatgggaaggtggaggctactggttgaagagaagaaaggggttgggggaatgcaacacctgcaaacactagggattgtgggtcgagcggaagagctaatgagagccgagctcaggtatcccaagtcaaccagaatcaaatgcgcagtacgccacaaggcatttaatgcccacagtaacagggctgtttgacagtggcagaagaggacgggactaaagttactttgtgctgagagggggaaagaagcacaaagtttggtctgttgcgtaattgaatttttaacactcttatccacaacaaacactttttcgtgtcctgctgtgtaaaagacatcagatatattacagattttcaaacaggtgagcatccttttacgagctgggcaggtggggagtggcgtggttttgatggagtgaggagatttggttgaatgaacgctaagatggccagacgcacctcttcgatctcaactctgcagcctgggattccagagctgcaaacaaccactgaattcgttctgtaaacctgttgtcatttgacgtttccaggcaggcatcaacatttacattgtaattcaatagacgctactactacaaaggagctttattcttccagcttaatatggttgctgcgggaacactgcaggatgaaactgactttttttgtggtaatgtttctcctggttgggaacaacgcaaattagcaaaggcgtaatttataaccgctgctaccaaagagtgaagtatttgtggaagttctgactggaatctagctcgtacatatggattgtggaaataaaggaggacgtggaaagcttgccatattttatttcaagttaatactaaagctgccagacttaatacaactttcttttaatctttatggatcacatattttctgaaaattacatgataaaacaaggtttggtttgttccatgtgtccattttcaacaataaatttcaaaattgtatttttaaaaaacaatataaacacacactttaaagaaataatatattttaagacaatgcaggtactattttaatataatattttaagataatgcaatacctatcatgttcctctcctttttagaggcagccatattctgcttttatctgtctcttctgtcatttacctccctatttctaaataatttgtactgccatctcttgatttgccaatagatgttgtgctctgactacctgttgcttcagattaggatttagctctttcatgccaagcaacttctccttccaacacagcactttcacagtttaggagctaagtaagtgactatgccaatagcaatgacaacacagccaatagtgtactattcttgttttcttccttataaaaccttgtatctatttacttagtttgttatgccccatcctgatatttttctacaactgatctatcaaatgactatcatgtttattttccaaatgatcaaacaatcaattccaattttgccctgaaaacaattcctccagaaattcattgttctactgtttcagtggagatgagttgctctatggatccgcttctcaagtgtcatcctgggacactctttttttttttttttttttttttttgacagagtctctctctgttgcccaggctagtgtgcaacggtgtgatctcagctcactacaacctctgcctcccgggttcaagtgattctcctgcctcagcctcccaagtagctgggattacaggcatgcaccaccaagtccag

SEQ ID NO: 587527 - DNA, 4001 bp, Homo sapiens
ggtgctttcgccggaagtccccacaacagctgaggacgatgagagagatgaagaagacagcataggagacatagtaggtccagacattctcccggacaaagcccttcacctccgcaacaaaagtgaacacagacaccgtggacagggtcaccgacagctgcaaggtcagcactaggaacacctggggaaggagccgctcagagtcatccgctgggagccacagcccccaccgccttggagatgcccctacccaccttgcggatgaaggcctgtcggatgctcttgtcatcccagttggtggcagggaagtcctggttgtcatagtaggatgggggaccctcctcctggtagtttccatgctggggtgctgagaagcagacaggctgggtcagcgccactcacaagcacctccccctgccctcccggccaccccacccctcccttcctgagactcacagtcagggtcttgtcctgggaagacctgtggctgtccataggggttgggggggaaggggctctggggatatggcccctgggggtagcccccttgggggtaggggccctgtgggtagccctcttgtgggtaggggccctgtgggtagcccccttgggggtagggaccctgtgggtagcccccttgggggtaggggctggggccatgggggtaccctggctgaccgtagggggagggctggaaagggggctgtgggtaaggggccccagggtagggaggctgagcataggggggcatgggtggctggggcccccccggatatccagggttggggggaggatagttgtccccagacaccaaaaaactcttttcatgggacatggcctcgggttccgcggtccgcccctagagaagacagacaaggaacagtggaacagttggcttgacgacagcgtcgggacccagccctgcgcaactccacctgcttctgggaacccagggggaagcaagggaagaccgtgacctttgccccgggctgtggggagccccggagcctgggcccggagaagcgcgtgaggaccggacgggcggcgccgtggggccttcccagggctctaggccgcctttagggtgggggaggggccgggcgaggggacgaccgccagcctcgggatttggggcttgggtcgtttctcacaagcaaccggaggcctgcgccgctgccggcgtctcccgggtgggagctcagcgcggaggctggggtctcggccggggacgtgtggggtgtgcccggaccctcccctccgcatcccgccccttaagcagctttaaggggccggagccggcggctatttctatcccaggaaatccccgggccatctgtgaccaacaaaggcccgagcccccccacccccgcgagcccaacaacagggcccaacggcccctggctccggggtggggggatcgggcctggatcggctgccggtgcctgccagtggggtacgccgggaacagcggggtgcgggggtgtgtgggggatggaagcgaccacggggcgtgcggggaacaaagcgggcgtggggcgaggcgggtaggggctgcggccgtggcactggcaccgagagcggatgggccctccgcgggccgggggcgcacagggtcacgggtccagcagtcgccgcagcgcgccgccccctccctccggctccaggccgccgcggctccccgcccccaccaccgccgccacctctggccgcgagctgccgcgcgccccggccggaccaacttactgacccgaggcggccacgctcggatgcgcaagatccgcgtgggggcgggggcgggggcggcaggccgcgcggcgcagcgggtcagaggcgctcctgggctcgggccggggactcaccggtggccgggcgccgcaggccggtacgcacggtgtccgctgcgcggccgcgcggtgatggccgatgcgcccgcacccgcacccgctcggcggccgctcagctgggcctgcgcctgcggctcggaagacgcagcggggccttgtgacggggcggggcagggggcggggccgggcgagcttcggggtgggaggggcaggtgggcggggcttccgcggacccctcccgctgcgccgccttgcgtgttcctcttcgctccggccagaggcccgcctctcactgtctgccgaggggtggggtcgggcggtgggcgctgaagacccctggaggcagaagtctggtctggccaatttgactggccgttcggtagttaagaaatttattcctaaatgcgggatttgctgaagctgcccgggactgaccgtccgttctcggccttaaaacccgacgttcacttcttttcatccagatctctcccaaatcaagaagcctaatcctttagttcccaaatcgaggcctcgtggtttaattgccccatttgctctgtcagcccaaactctgccaggcctgctactagagacccttttttatttttttaattcttgtggatacatagtaggtgtatatttacgggctacatgggatgttttgatacaggcatgccatggataataatcacatcaaggtaaatggggtatccatcagctcaggcattttgtccttcgtgttacaaacaatccagttatactcttggagttgttttaaaatgtacaattattcttgaccacagtcaccctttgtactaacaaatacgatgtcttgttttcacactagagaccctgaacgctcgcttgtctgcctaacgtcctcacaagctgcgaggggctgaggcttggggatgcagcaggactggaggccaggccacctccctgcttagctcccaagtcctcttgggggagcagtgactgacacaggcagggtacatcctgctgccagccttcccacccggggcccagaccccacctgccctcccgcccttggagggccggcctctcccaggccgctctgagtcctgcacctatggtgcgctggcgcagtgtttagcagccggacctagtgaggggaagcctggggtgcgtgttttgcacatgcgcgtggtgtgaatactccaccggggctggtttcaagttacccccagctggacaaccagtccacagaaattcccgaaactgtaccagtctgcttgtggtgtgagtggtgcctgtggcaggccctctgcagccagggtcggcgtaatggataacctgtgatgagttccattagagaaaacgtggaaaaagcagggatggatttacccttgtagaaggtaacttctacctttgtagaagcagaagctcacaaaatttgagagacctttaagaaaaataaaatgcttgctgggcgcggtggcttacgcctgtaatcccagcactttgggaggccgaggcgggtggatcacaaggtcaggagatggagaccatcctggctaacacggtgaaaccccgtctctactaaaaatacaaaaaaaaattagctgggcgtggtggtgtgcacctgtaatcccagctattgggggggctgaggcaggagaatggcttgaacctgggaggcagaggttacagtgagctgagatcgtgccaccgcactccagcctgcgtaacagagtgtgactctgtctcaaaaaataaataaataagtaaataaaaataaaatagctgggtatggtggctggcaccagtaatcccagcactttgggaggctgaggcaggtggatcatctgaggtcaggagtttgagaccagtctgcccaatagggtgaaaccctgtctctgctaaaaatacaaaaattagctgggcatggtggtgcgtgcctgtaatcccagctacttgggaggcttaggcaggagaatcccttgaacccagtgggtggacgttgcagtgagccgagatcacggcacttcactccagcctgggtgaaagggcgaaactccgtctcagaaaaaaaaaaaaaaaaggcagagtaagggagatcatgccagaggggtggccatgggggtttgtggggaaggtagggccaagcagagggaagggccagtcccaggctac

SEQ ID NO: 587528 - DNA, 4001 bp, Homo sapiens
tacataacagagtactactcagccataaaaaagaatgagattggctgggtgcggtggctcatgcctgtaatcccagcactttgggaggctgaggcgggtggatcaactgaggtcaggagttcaagaccagcctgaccaacatggagaaaccccgctctactaaaaatacaaaattagccaggcatggtagcgcatgactgtaatcccagctacttgggaggctgaggcaggagaatcacttgaacccaggaggcggaggttgcagtgagtcgagattgcactgttgcactccagcctgggcaacaagagcaaaactccgtgtcaaaaaaaaatgagatcctgtcattcgcaacaacatagaggggactagaggtcattaagtgaaataagccaggcacagaaagacaaactttacaatgttctcacttatttatgaaagctaaaaattaagacaattgaagttatggagatagagtaaaatgatggttaccagaggctgggaaagatattagggggtgggagggaggtggggatggtaaatgagcacaaaaaaaatagttagactgaataagatctagtatttctgaataagatctagtattcgatagcacaacagggtgactatagtcaataattgtacagttagaaataactaaaacagtataattgtattgttacaattaagagtataattgtattgttacaattataacaaataggaataggacttcctaactacatggaattcagtttttgaactttctaaatatgttcaataatgaagagagacagaattttcaacagttcatgtaaaattcctgatgtgaccatttcaattctctgatatgggccatgtaagaggtcactggacaagcagagaataatgagaatataagatgcttctttaagactggacctgtgcaataatgtatcgaagatatattccttagccttacatgctatcaggaattctccattattaagacgaacttaacttccttttcagtcaaattctgtaggaaaaaaaactcttcgactcatttcacaaacccatccagaacatttttgtcgctgatgatagtaatcttttctttttcatcccctgatcccattaggacttaccagattatatatccctttgtcctgtagagaaatagcaggattggccgggcacggtggctcacgtctgtaatcccagcactttgggaggctgaggccggtggatcacgaggtcaggagttcaagatcagccaggccaagatggtgaaaccctgtctctactgaaaatacaaaaattagccaggaatggtggcaggcacctgtaatcccagctacttgggaggctgaggcagagaactgcttgaacccgggaggcagaggttgcagtgagctgagaccatgccgctgcactccagcctgggcaactccgtctcaaaaaaaaaaaaaagagagaaaaatagcacaattgagtagggccccttccaatcttcagacctcctgcggtcaagtagaaattgtcagacaaactccaggaccagatcaatgtgattctgttcactgttctcttctcaccaatgggtccctgactcaatttccaatgcagtatcctggaaaaataagcacaggagggccctgttcatttccagaagagtaagtctggaactagttctggatcacagaaccttagctctcaagtcctcagcaaaaagtctgtggaacaaaatcaagtggcatctaattatgtatctcctgaatcagaattaaaaaggcttcctcagagtcacacccatttcctttcacatacagaactagctgagcaagtctttgattcatggattcccagcaactctagctggaacaacttctttggctcgtattcctctggtatatgtgctgaatttagaattcaatcactggacaccaggaaaggcaacttcagcaggagggacaggcactagcgccagggccctgggaagcacctctgaactgcctacatgtggggctctgtacaacaggaattactgtgcttaatgcctcctctgtgttaagcaccatgcatgtattatctaaatccaatcttacaacaatctttattttaaatataaataaaaaggggatttgtgaaaggaattaaaaacttgcctgaaacccatgtcctttccaattactccctatgggtttcaagatgaagtaaagtgcctataggagcagaaactgtataaacaggattgctacacctttaagttttgagtaacttcctggaactgacactcaatacagcaacattcctttcagctgacagtatttcacaatgcatttactttacttttgttttcttttaatattcataaaagtcttatgccttccctttccactgtaagaacctgatatgcacttcacttgggacaaagctcagactgtgctttctgcatatcaccaccagacacgatgttccaaattaactttcacgttctataatttccattgtaaaaactatagacttgaaatataaaattataattacatacataacccttctgtgtaccaacattctataggccccaacctgctattgggtattccagaagtcggagaaaagtaacttagctgtttgggaacagttatgtgagtcacaccaacctaaataacagataaagaaaagctctctaaaagacagtgatatttattcaagaatgagcattgcaatgggaatatgcgtgccatcacaaactatgtgtgtattcagacaggtaagggaagaaaaaagttttaaaaagaaaaataagaaggattacacaattgttttgaatcaattctttgcttacaaggatcagtaacaaaggtggcaccagtccaaggttagacaggcagttggtggacagatgtcctggcagaagtattttttgtttaaggttgcaatagcctttgtgcaaagctgtagtttttagttttgttttgtctttaatttttatgggtacatagatgtatatatttatttatgggatatatgggatattttaatacaggcatacaatgtataataatcacaccagggtaaatgaggtatctatcatctcagatatttattttttgtgttaaaatattatactcttttagttatttttaaatgtacaattaaattattattgactatagtcaataatatattgtgctatcagacattagatcttattccttctaaatctttttgtactcattaaccattccccctacccctgcacacccaccccactacccttcctagcgtctggtaaccatcattctattctctatctccgtaagttcagttgttttaatttttagctttcacaaataagagagaacatgtaaagtttgtctttctgtgcttggcttatttcacttaacataatgacctccagttccatctatgttgttgcaaatgacaggatctcattctttttatggctgaatagtactccattatgtatacgtaccattttttttattcattcatttgttgatggacacttggattgcttctaaatcttggctattgtgagtggaactgcaataaacatgggagtgcagatatctcttcaatatattgatttcctattttggaggtatatacttaacagtgggtttgctggatcatacgatagttctattttcagtttttctgaggaaggcccaaactgttctccatagtagttgtactaatttacattcccacaaacagtgtccaagggtccccttttctccacatcctctccagcctgttattgcctgtcttttgggtaaaatccattttaacagatgtgagatgatatctcattgtagttttgaatggtgtttctctgatgatcaataatgtcgagcacattttcatatgcgtgtttgccatttgtatgtcgtctttcaagaaatgtctatttagaacttttgcccatattttaattagtttattagattttttcctgtataattgtttgagctccttgtgtgttctgcttacaaat

SEQ ID NO: 587529 - DNA, 4001 bp, Homo sapiens
agggcagggatgttgcggcagcctggggctctgcaccctccacccttcaccgccacattctgcctcttggcctttacctccaagagctctggggccacaccagccccccaccctgcctggctgacctggcctgagcctcaccctgaaggctctcacactcactcattcatccaacaaatgtgtattagcacctgctgctaggtgattttccagcgatcctgggttctagcagcaaacaagacaaggtctctgccctggtaggtctgaggccagtatgctgaaggggatttctggtggtgtgtgcgttggaatgctgcagccacaaataactggaaattcagatgccaacagaaggaaacattatcttgtgtaatcagaaacccagaactgctgtgtaccccaggctggacacaggcaggcctgagagctttggctggtgatgggcacctagggcagggggtacccaactcggcctggcgggcttctagctctggtccagctggagcccattagctgggtgtgggcccagaatccttgcttatggtagcaggaggctccaggagcctaagaagagactaacgcgtttgtgcgcgtgtgtatgcacgtgcatgttgtgtggctgttgtgcgcgtgtgcatgcaggtgtgtgtgtatgcacgtgggtgttgtgtgcctgtttgtatgcgggtgcttgcacgtgcgtgttgagcgtgtttgtgcacgtgtgtatgcacgtgtgtgttgtgcgtttgcgcgcgtttatgcacctgagtgttgtgtgcgcgttgtgcgcgtgtatgcacgtgcgtgttgtgtgcgtttgcgcgcgtgtatgcacgtgcgtgttgtgtgcgtttgtgcacgtgagcacacacgtgcgtattgtgcgtatgtgtatgcacgtgcgtgttgtgtacatgtgcgcgtgtgcatgcacgtccgtgttttgtgcatgtttgtgcgcgtgtgcatacacgtacgtgtgcgcgtttgtgcgcgtgtctgtgtgcgggtgcatgcacgtgcgtgttgtgtccacgggtttgtgttcacgtagggcatgtacacgtgcatttgcccaatgtgctcccgctcgttgatgcaggcacgcatctgcatttatatgtaagtgggcctctgtgttcctgtgtgtgcacatgtcgctgtgtgtgttcatgtgcaggtcacggtgcgcagccggtgccacgcccgtggctgtccgctgcaggaaggggagcccatctgggcctcctccctcctcccctcctcccgcttttctcctttcctttgcagcaaaattcctggaaagccctgtacagcctcgctgcctctaggtctgtggtgcgtcaggcccctcccagacaccggcaggaggtggcggcctccagagtgcagggcgggccttgcctccagcaggggtgtgaagagcccaggcttattttccgggaaggcctcgctgccttgttgggggaatggggtggaggcggcaggcacggcagcccctgtgggacttggtctgaggccaagcaggcgccgtctgcgggcaggaggggcaggtgagggcccggacggctgagcaaggtgtggcccaccgtgcccgcaggtcaacgggcagtgacgaagttacctcagcttccagctgggcgctggcgaggacaggtgctctgtccacactcagttcttcaatcatcaccccgaacgggaagtgctcgaaggagggcagaggtcagcctgggaggagggagggaggccggccccgccccatcgctccggcccccattcacaggcggggccagaagtgttgagggcagaaccctgcagcgagagggcgagcgcctccgtcccctgggtcggggttcatccctccgcccagtttacggaagtcggcgaggcgccctgggccagatccgcgcaggtcctggggggccagagcctggggaacaccacgtcccttctgctgcgtgtgcagagtgagcggcgggcggcggggctccaaggaagggcggtcccgggggcggctgtctcggagtgcggctgaggggccagcccctcagagggggcgcctctgccctgagcagcgtccaggcccctggttctaggagccaagacaagcgctagggtggaggcgcgcagagcacggaggaggggaccagccagagaggtaatccccgagccgggaagggcacgaggactcacgccagaccgcgacctggacaacccggcctcgggaaccagccccgcgcagggcgggacttcaggtgcctgccagacactgtcctggcctggcagcagctcccgagggggtctggggtgccggggaagtccccactatgtcctggcagcctcactcctcgctggcttctctgccttgcccgtcccctccccgcaccctcccctcccctccccgcaccctcccctcccctacccccaccctcccctcccctccccccactcccctacccctgccccctacccctccccgcctttcccactctgccccaccctgcctcttcacagcttcacttttgctggtcctcctgccccctgctctacacacaacccaccccccaccccacctccctatccccccacccccacctccagggctttgggcgtctgagcccacatggggcggattgtggtgatgggggccctgtgggaggggtgtcgggctcagaggcgccccaagagtgaggagaggcaggtggcagaagagccctgctaaggccagggggcctcaggaaaactcccccagcagctcctgggcaccccacggcttacacccgctcctggggcagagggcgatggggttaggggccagccgctgcctgcagggaacccaggccttgcctcccagcgctcttccctggcacgcaccccccatcctgtccccttctggggtccctgccctgaggcctgtcctttcctccccagctctggaaggagtgttgctccctgggcaggtctgaggtgggcttgagggagggtgacacagaggcatgccccacctggcttctggctttctgggcctccgcctctcttcactttgctagaagaagccgtcactgccaggatccgggcattactttgggggtggggaatgttttccatgcaggtggggaactcctgcactttggccagtgtttaatgcccgtggaagcctggcacagagagattcacacccttcacccaccatggtcccggagagcctgatggcaatgcctgacctcaggaacaggagaccaacaaaatacactttcttggcttggtgctgtggctcatgcctgtaatcccaacactttgggagtccaaggtgggtggatcacatgaggtcaggagttggagaccagcctgagcaacgtggtgaaaccccatctctactaaaaatagaaaaattagccagacatggtggtatgcgcctactcaggaggctgaggcaggagaatcgcttgaacttgggaagcagaggttgcagtgagccaagatcacaacactgcactccagcctgggtgacagagcaagaatccatctctaaaataaaaatatactttctcccaaggtccccagcccagagggtgtgagggccttgcagtgggaggtaggtgtcactgcgcatccgtgacagtggggagagtgggatgagggggacccaccagacctctagagcagttttctcccactgtcactttctccctccataatagagggcacaaggggcatcatggggcactgggtgtggctggccagacacctgttcccacctgagtgatgcaggactttcctcaatcacttttgccagctggagacacccagccggcccttgccctgcttcggccctcaacttcagggctggctcaggcccaccgccatttctgtcatggagggcagaggaccacagtgttacagccttctctgtaccacgttcgatgggtcccatgctcttgtactgcatccaagaagaatgaggatatgttgacaatcagatagtgaggaggggctgg

SEQ ID NO: 587530 - DNA, 4001 bp, Homo sapiens
ccagtcctggcagcggaggccccagatgacccctgcagcttccttcctgcaagctggttccggccacagcgctcttttgcctctgggactttcctgatgccccaaggttgtgaccttcccaagagcaaggctgggacctggcacagtggctcacccctgtaatcccagcactttgggaggccgaggcaggaggactgcttgaggccaggagttcaagaccaccctggccgagatagcaaaacctcacctcaaaaaataatttaaataaataaataaataaaagcagggttgcttggggtaggtggggccctgccctgccctgccctcttcgggcccacctctcatggagcagagtctgccaggtgttagggtccacactcagcgagtacacattcattgaggtgctggagctgtcagacaccgcggccccgcctgcgatctttgcctgtcctggggctgccagctccacgctgccctgtatctgcccatccatggcatcgtagaagtggaagctcctgccacgctgcacgtctaaagcaaggccagacctgaggctgtgcccagcgccccgcctctcccccgcccccaccagccctgtcccagccccagggcagagggacctttggaaaggccccggcctctggaagagaggcccagagctagaggctgcagagcccagtggatggttggccccagcccgctcccctctcccatccagcctccctggggctctgcctcagcaccacatcaggcacctggttccgcggcatccggctccaggatgtccttgatagacaggttgacacacttataacggggtttccagaaccatgagcttgagggcttcctaaccaccaggcagtagggctggaagccagtggagctctgcaggctggtcacagggatgaactccccaccatggtccagctcctggaccactctccggactacccgctcaaaggccgaccccatgctcctgaggaggggaaatgggtcaggcattgtgctctcggggcgggcgggagggagtgggagaagggtcagtacttggatgtctcccatgatgggggactccttccctccagaacagccctgcccagctcatcctgggatgctcccactagcagaaagcttctgtccccggccctccccaacacagaattacagtgttctccctgttgtctacggtaccatgagcacctccagccagggacagtgaggcctgacgcccagacctgctctaacacagagggctctgtccactagaatggctgcctctggctgggaggaaacaagctgtcacctcctgagcgtggtgcagggacccactgcaaaacccagccagagtgtcaccagggacccactgcaaaacccagccagagtgtcgccccaccccagctgcgtcctccagggccttctctgtgcctggagctccatgagccacctgtccaaggctgaggctttgggggtcagaggccatagcgggcctccgctgggatagggggcacctgggccactgtggaggggctgcagctgccccaggaagcctctgagtgctgggtctgctgaaagtggaggctgggcccagaaggcagctgggggcgggaacagcaccggcccgggaacctggatggcggacctgggagtcaagcccaagcccaggtccaaaggccgggcccctgggctggccaggggcagcctttcccgaagcctggagcttccgcccccgtgtgcggcgcggggccttctgggcgaacgctggggcagcagggccagcatcccccacccgggagccagcggccggccccactcgggagctccagccaggccgggggagggggcggggcgcagctcaccgtgaccgtcggcgccccgagggtggcgcgtctggcgcgtctgctctccctgggagccgtccggcgagcaggagctggaggtgcccagagctaaaagtgaaactgcaacctgacgcagggcccgcccaggacgccctcccggaaccgtcccggagagcccgccccggcccccttcctgccccctcttcccgccagcccgcctggagcaccagcctcgcgcgtccggaggaaccttggcttggcgccccatcctggtagcctcaaacttcatagcactttgtggtttttcttaaaactctgagcctgtgcccgggcggatcacctgaggtcgggagttcaagaccagactgaccaacatggtgaaaccccgtctctactaaaaatacaaaattagcccggcgtggtggcgcatgcctgtgatcccagctacctgggaggctgaggcaagagaatcgcttgaacctgggaggtgtaggttgcagtgagccgagatcatgccattgtactccagcctgggcgacagagtgagactccgtctcaaaaacaaacaagcaaacaaacaactttgggcctgtgccgaagggtctgggcagatcttccaaagatgtacaaaatgtagaaattgccctcaagcaaatgcaaagatgctcaacacccttagtcatcaaggaaatgcaaatggaatccacagagagatactgcacactgacaaagatggtcgtattactaaaggtgaataaccagcgcggggggcacgtggagtcactggaacatttgtgcaatgctggtgggaatgtcaacccgtgcggccctctggaataagcctggcagctcctccaagagttaccgtgtgacccagcaattccactcctagctccacccacaggaattgaaagcaaagacgcaaacagatgcctgtgcaccaaagttcacggcagcatccttcgccatagtggcagcatccgtcgtcacagcggcatcatccttcatcatagcggcagcatccgtcgtcacagcggcagcatccttcgccacagcggcagcagctgtcgtcacagcggcatcatccttcgccatagcggcagcatccttcgccaaagcggcagcatccttcaccatagcggcagcatccttcgccatagcggcagcatccttcgccatagcggcaaggtggaaaccctgtccatccactgaggcgtgcatagactaaacatggccagtccaggcactggaatccaggccgtagaacggcgcccacggtcaaaaggaatgagaccctgatgcactgggcgacacagacgggcgacacagacttggagacatcatgctaagtgaaaagccaggcacacggagcggacggcgtgatcctgctcacgtgatgtgtcccgaatgggcacgtccagagggaagaagggagatggcgctgccggtgcccgggacgggggttgggagcgacggttgctggtttggggtttctttctggggtgaggaagtgttttgatattggccgttggtgatgtttgcatacctctgaatatgctaagacccacagaattgcacactttaaatggatgaattgtatggtatgggaattacacaattatgtctcattaaagcagttattttaaaaatctagtgcccagtagcaacacctagtctcggcacaggctccctcagtgccctactgacctaagtcatggtgggcccagggccatgggcccacccctgcacacggtagtcctcccacccggccctcccagccgctccgcggttgtggatggggctacttgggcttcggccccactcctaggcctgaccacagtggggacacagtggtgccctgcgggtccctgctggtgctgtctcctggctgttttgtgtattttttgttgtttgttttgttttgtgtgaggcaagatctctctgtcgcccaggctggagtgcagtggcacaatcaccactcactgcagcctcgacctcctgggctcaagtgatcccctcctgtcagtctcctgagtagctgggactacaggtgctcagcaccacacctggcaaagttttcgtttttgttttgagactgagtcttgctctgtcaccaggatggagtgcagtggcgtgatctcagctcattgcaacctctgcctc

SEQ ID NO: 587531 - DNA, 4001 bp, Homo sapiens
agacagagaaaatgtggagagcagaacagaagtgagaagtgatcaagtactctcatgaggtgtgggaggggggcacttagtggcaccccacaatctgccttctggagagacagatttctaaccttctgtctggactatggtgtcaaagtgcaagttgataattaacagagatttttcctttctcttcatctccatgttcatctccaaggcactgaacaatgaagtcaaccttttcataactgtccatttttagtttcattcattgcacaagtgcttattgagcaagggattttaaggtgataagagacacacaaacacagaagcccatccctgtccttaaagagctcccaatttgacataatttaaatattcatctccaaaggaatttagagaacctatcccaaatcccaggttcctcttggatacagcattttaatcgtcaacacccaaatcttgtgatagaaaagggcgggcacaccaataacttggaaacaacatttatttttagaatgagtgcagtggctcaggcttgtaatcccagcactttgggaggctgaggcgggaagatcggttgagtccaagaggttgaaatcagcaagggcaacatagcgagacccccatctctacaaaaaataataataattaactaggcgtggtgattagccccctgtagttccagctactcaggaggccaaggtgagaggatcccttgagcccgggagttcgaggctgcagtgagctatgatggccactgcactctagcctaggtgacagggcaagaccctgtctcaaaaaacaaacacaaacaaaaacccttattttcaaaaattatgaattttgtaaatctcaggatttacatccctctgtttttagttttgcaatccacataaaaccaagacaaaacaaaagctctgagaactcacctactcaaggtcgccttggctgcaattcagatcacccgaaaatcccaaagcccaggctgcacttcagaccaattaagtcgggaaacatcccaaagcccaagtgcacctcagaccaattaagtcgggaatccaggcaccctcaggtgattcgaatgtgtagccaaggttgacaacaaccgctataaatcattctgcccttgaaacgggagaaccaggatctacatttttcaagaaccaggatctatggcaccgtcaccctcgtccctacacacaggccaccagcaatgttcccagatgcagttttgtgtttcacgcggtcaagaacagaatccaatcctctcccacttggacaagtgaggatggaggaaggttaatctaacccgccccggccctggtcaatatcgcatccgtgcggaagcagacgctggctcggctttgcgggccgcagagaagcccccggacgcctctctctcctccacctgctgggttcctggcttcggaatggggagttgcgggggtggaaaagaggaaagcccagcgccgggggacaggatcgccataggaacgagcacaggctgtcccccgaaagaccgagacaaagaggcgccccccgcccgaacaaaccggcggtactcacgcaagtgccacccagcttgtggctctccaccacggcggccctggcacccagctcggccgccctgcgcgcgctggccagcccgcccgagccgcccccgatcaccaggtagtcataggaggccacggcgccagcagcgggcggcgggccctgcggctgcggctcctgcctgcaggccatggcacgggagagggcgcgcgtgagggccgcgggctcgggcagaagcagcaggaagcctcggaaggcgcgcgccgcccgccgccagctcggtcccgcgccggcgctcagggctcggggcagcagggccatgcacgcggaagtggcgcgccaagtggggcgggcggcccgggggcggtccccggggtaggggggcgcgggccccgggcaagcgcagcctcacggtgactaagcatgcgcccgccgctaggcaagacccaggaggatgcccagaggcggggccgcctcccagttccccgccccggtggcggagcctgaggggtttctccgcctccgttctcaccccggcccctggatcccgagcggcgcctgccgcgtgtagccttctgaagtccggtggatcgaggcgaggaacggtgaacgtcctctcgtttcagctggcttttcccgagctggccccctggggagttgccagtggcacggcttctccaggaagagaaatttgcctctattcgaagggttgtttgtccaggtttgttccagagaccacttttgtttgttcttgctttttctttgagactgggtctcactctcccccaggcaggggtgcagtgatgcgatctctgctcactgcagcctccacctactgtgctcaagcagcgatcctccctcctcagccttcccggtagctgggaactacaggtgcccgccacagcgcccagctaatttatttatttatttatttaatttttttttttattttttttattatttttattttttttttagaaatagggtctcactatgttaccaggactggtagggaactcttggcctcaagcgattctctcacctcggcctcccaaaatgctaggattatggtatgaggtcaccacttctcctgttgtccttctcagtttctccccaacctccccttttccctagtttataagacaggagaaaagggagaaagcaaaaagttggaaagaaacagaagtaagataaatagctagacgaccttggcaccaccacctggccctggtggctaagataataataatattattaacccctgaccaaaactattggtgttatctgtaaattccagacattgtatgagaaagcactgtaaaactttttgttctgttagctgatgtatatagcccccagtcacgtttcccacgcttacttgatctattatgattttttcacgtagaccccttagagttgtaagcccttaaaagggctaggaatttctttttcggagagctcggctctcaagacgcgagtctgccaacgctcctggccgaataaaaaacctcttcctgctttaatctggtgtctgaggagttttgtctgtgactcatcctgctatatttcttggttccctgactgggaagcgaggtaattgacggacagtcgaggcagccccttagggggcttaggcctgccctgtggagcatccctgcggggaactcccgccagcttgagcgacgcggatcctgcgagcgctcctgggtaggcaattgccccggtggaacgcctagtcagagcagtgcgtggcaggcccccgtggagtatcaacgcagtggctgaacaccgggaaggaacaggcacttggagtccggacatttgaaacttggtaagactggtcttcggaacttgcccactccatttgagtggaagcatggcctgatcacccacggcgtgcctgtactggcactttggtttttgtttttgacttgacttgaattgcttgacactttggttttggtttgacctggcttggattactggatactctgattttggttttgattctggtttggtgaaaactgaaaaagtgcgtgtgtgccctttttacccattctttgttttgtggtgtgcgtttggtgtgagcttggtgttttgtcttgaggaaacacgggtcagacacaaaataagcctactcctctaggaactatgttgaaaaattttaagaagggatttaatggcgactatggggttactatgacaccagggaaacttagaactttgtgtgaaatagattggccaacattagaagtgggttggccatcagaaggaagcctggacaggtcccttgtttctaaggtatggcacaaggtaactggtaagtcaggacactcagaccagtttccatacatagacacttggttaccacagtgggtaagagggcaggcagcagcagtgctagtagcaaagggacagatagtcaaggaaggatcccgctccacccaccgagggaa

SEQ ID NO: 587532 - DNA, 4001 bp, Homo sapiens
tgtaagaatgagaaaatgtgtatgttattttttaaacagtaaagtcataaaaacgtgttatttcagtattactattttgagttggatctgaaagaagggaatgatttaccgggctgaggaaagtaggagacagccttgggaggagggaaagcgtggggccaagaagaagaaaggagaattgtcaagtgagaaggtgggagcaaaaagtaaatttctagaacaggaaacatttgtgtcttatttcacgttgcaaaggcaggacctcaatctggactttaaaaaaattactctaaaagatttaaataggccgggcgcagcggctcacgcctgtaatcccagcactttgggaggccgaggagggcggatcacgaggtcaggagttctagacgagtctggccaacatggtgaaactccgtctccattaaaaatttaaaaaatgtgcagggtgtcgttgcgggtgcctgtaatcccaactacttgggaggctgaggcaggagaatcgcttgaaccagggacgtggagcttgcagtaagccaagatcgcgccactgcactccagcccgggcgacagtgcgagactccgtctcagaaaaaaaaaaaaaaaaaagtaaataaagccgtacagtttacaacaaactaaatgcttacagtatttgaccctcgcaactctaggagcaaacaggtattagtgttattcctattttaatacgtgaaatctgaagtgaagctgtctggttaaggtcgcacagatggaagagccagggccaggaaccaaacctcctgactcctaactcaagtgctccttacaccagacctggaacgctggtaaaggcctttaaaacaaaggccacctgtgaggttcgggaacgttcaaaggcatctagagcagaaagcttcgcaatgtctgtctttcaccatcacgtgctccgcctaacttttcctcctttttcaaagactacccaatatgtgtactaagttttagatctctggacccccctatggagtaaacaggctacatcaccatgtccattttacaattaaacaaaaccacaactcaaggagttggctggttcctccgtgggcagacacggaaaacccaaaaattaaactgaaatctgcctccaagcccacgattcttgccaccattcgacctctttcaaccttactacttcccctctctttcacttttacccagcctcgttagtgtccctggcacctcaggacccggctatgaaaagcaggctgcttcgcccttaaatgacggaagtggggaggtgggcgaaaagggggccgcagcgttgtttagactgcagaaatcaactactatcgttaaagtttagggatcatcacaaaccaaatctccaaaaggtagcctagaaagcagtccgcgtatgagcatcattttaaatcacagtcttgagctggctggaccccgcggctgctcaaactccacacacggttcgcttggctaccgcgcccgtgaacttggaggcttggaagaggcacagtcaggcggcagaccgcgaattttccctctttccaacccaaaagtttgctcaatgaacctctggcctaaagacaatgctccggggaacggttcgcgtgctgggtgtttcgcttcgagaacggcggtcccagcttcccgtgaggtggaggtcacgctcagcctcccgggaggcggcggcgcgcctgcgtcccagggaacagcaagccggggctctgcgccccacacccggcggccgcagcccctacctgagtgagaagggcagcctcgcacgactcgccgcccccttcctgcgcctccgcctcggccggccgcccacgccggcactgcaccctcttcctgcttctcgtcagcgcccccgcctgcccgcacgcacgcccagcgctgacccgccaggtcggggtctcaccactggcggtggcggcggcggcggcggcagcggcggtagctgaggcggcgactggacccgggactccgcccgccacttcccgatcgggtgctaggagctcagtcccggcagccaccgcggcgccagggcagccaagcgagcgcatgcgtcattgcgtgccccgcctctggtgccgcgggagcggaactatcccgctctggcgtcctggggcctccatgacaacgagggaagggctggggtggggccgagaaggggactgaagtgggaggcggcgccactgaagatggaaggcagctttctttatagacactttattaaaactgctacagcctgctccggcgtgcgctgggatgtggtgaacccagccgacgacgctatctttcaatggttactttgtgttttttgtctttttcttattagagacgtgatctcactcggtcacccaggctggagggcagtggcgcgatctcggctcactgcaacctccgctcctgggctcaagccattctcccacctcagcctccggagtagctgggatcacaggcgagtgccaccacgacggactatttttggttattattgttgttgttgtttgtattaatagggtctcacaatgttgcccaggctggtctcgaactcctgaattcaagcgatttgcccgcctcgtcttcccaaagtgctgggattacaggcgtgagccaccgcgcccggcctcaacggttattttgtgagtttaccccagcgccacacaccagcacctgcacaccgagaacgcggttccagctcttttacaagcgaagaacagagggccaggaagctaattaataaatgacttgctcaagacaacacagctagcaaaggcagcctgatgtggagcacagcccagcctcttccctccacccctgtgaactgtcttagaaaaggattttggatttagaagccagataaatgggtggaaataaagcagtggaaaaaataatttcattgcccgaaacctgcagcgtggcaggccttccctcactcttataacctaaagcggcagtacagccagtgctcagccattctgtggctgtcgttgaattactggttactcttcaagttactgaaactgtggctcagttttctcatcggggaaatggggataatcattgtactactacaatgagttacttgcattggactgtggtgaaaattaagtgagaaaatacctaaaattttattcaaaacttggaaaaaagtcaaaagataatattttgtgacttttattagtttcattctagagaattttgtaataagcctacttgatcatctgacacccacaggaaatgtaactttgtttgaataacaattgattagggcccagaagatttacaaaaggatgaaatcaaacatcaattggtaggaaactgatgaggtgttaggggaaaaaggggcagggaattcagtgtgtatatagatagatagatagatagatagatagatagatagatagatagatagataaaattccaaaggttaaggttgcatttttctgagaaaaattaaccggttttgtatcaactgagcagttttatttcagcattcctttccccaacgattatataaatatcatttttcagaactggtagaaatccgttttatgattctgctggctcccttattaatgagtgagagacttatacatatggacaatggctaaaccgcatatgataataacactctaactcacataagccaaaccataacctctacagcaatcagctcaaaatggtcagaattttctcaagaaggctgccaacttttctattttaacctctctgtcctcagacaccagtatcagccagagaaagccaaatattcttcccaaaccaatcctgttaagtttcctgcttcaagttagacaacttccagcttcccctgccaacatccctaaatcagaacacatcagaagcatcccttttttcctccactgtaaagtctcccctcttcccgattgcttttgagtctctgccaaactcaagtgtggtcgctgcccctattgctatagcaagctctgaatagtctctgttctcacttggcaggtctacat

SEQ ID NO: 587533 - DNA, 4001 bp, Homo sapiens
ggagtgggcagggagaggctgatggggcttctacacgttccctcccgtagctgggctgctgcagctcgttcgccccagaggcgcgcggtgtccttgagtccaagtattcagcgcggacgtttgggggacggagggagaggcgctaggggaactggcacctaagactgtgtaataggacacaggtcttgcaagtcctcctccccaggcaccgcccctgtgctcccagcgcctctttgcagctttaattatcctttcagcgccgttcccccgcggctgcgtttccgtggtcagaggaaaaaggctctttcgcctcccggttctcaccctcatacagaccctcctttcagacccgccctcctgttcacagggacccatttcggagccctggctcacgctgggcgggaactgccgtgacgaattccccccaaggtgttgattatccatcccaacccagcctctggcttccctcccacctccaccccagctcccacaggcccctcgccccgttcatcggctgggcgctcgagacggcgcccccagatctcccaccgggcagtgtccccagctgcagctgaggagagaagcgccggcgtgcgcggtgccacgtcggaattggctctggggacgccgcagctgccgaagcgcagcgcgcggtccccacgcacgccctgcctccgggcggccggcgggctggcccggcgaggagaggagggatgcgcgccctcctcccgctcctatctgcgggtgccaccgcctgcgtcagggacccctggcccgagtaagcccagactgacgagcctgacactttaatggggtgcgggaagtgcaaaggaggggaggcccgggaaaggggggagtggccgagaggggatggtagctgcgaggaggtagagaaggaccctccttctccagggtcccagcttgtcggagctggaagcccagattgcttaaccctttgcattcccagcaagaagcgactttttcacttagaagtaaaacgcgctgggctattccagtttttctccccacagtgtgtgtgtgtgtgtgtgtgtgtgggaaaaaaagaagggaaggggtggggcggctgtgcagaatgcattttccttacattgggaattcttgtttcctaactctggagcccctctgctgctccggaagatgcaaaatggaaaagtacatctgaggacgtgcagcctttcccaggcagagaggctacctgtgtccccagaaaggcagcggatttctggcgagagccgcagaaatgggaaaagagggctatgttgctaagcctgacagtgacctgaaatattccctgatcttcagtctgttggaaatttttaaacttccaacttttctatcgaaactggcttaaaaattttaaaacaattataaggatgtcttccttctccctggcctgttggaggaccttcatccttcaccaaaacgcgccagtgtaacgtaccttgttcagctcttggtcataaagtcgtcctcagcctgtctgtgtggtcccggagggtcggtggcgggcagtttccaaaattgaggtaataagagatcagatgaatttgagacgaccggccaaaaaaaataagaaatttaaaaacaacatttaaaaaggataggggagtcttaaatgtttgattcttccccactttaaaaaataatttcactaatattctctttatgtttccgttgcacttcagtctaattcttaaaaaaattatgctttaaaaataaattaacttttcttttttcttttcttttcttttttttttttttttttttttgggcttcagtctttctgcccccgataacagaaaatctctttttcgtcttaaaaaaaaaaaaaaaaaaaaaaaaagcctgtggaagactcagcagaacccaggaagcgcagaattgggagaaaagtctttggctggggctgtttcaagtctctggttcaatgggctgctcgaagccaggactgggtaattctttccagacgtcttgacttctccttccccgccgttgttgcccttctgcctcctccaacttaagggggtcttaacaagtgagctggtgggtgttttaatagggcggcggagggagtgggggggtgagggaagtggagagggaggtgtggactggggaaccctgaggggagggaactgggagcgcgggcgggcgggcgagcgggaggcggggagggggagagggagagagagaaattggccattcaaagccttctctgagctacaggccggttctaaactccaatgaattcaattaacttgattgctaacgtgtgcagagaaatgcaagacacatagggggccaccacctgattccttactttcctctggcggcggaggtgggagccctcgcctcttggatttccctgaactcccgcgttacaagttccctccaagcgataaactccctgtggcgctgaagtaatttgttttaaagccaaatggtgcccttcagctaagtaaccgacccaaggaggaacagttgggaggggtgtgtgcacgtgtgtgtgtgtgtgtgtaagtgtgtgcgtgtgtgtgtgtacctggagccttcgacagccggctgggactctaaaaagatcgcgctggtccaccacttgttaaccctttcttcccgccaactcaaaagtttctgagctgacgtcaagtgtcaaagcctttctcataaagaggtttctgccgtgggtgggcggaaaacatagaaaagtaattatatgtatatttttgctcaatctggtcccctaacgtaaacatactcaaacagcgcgcattaaaaataaaataataaaaattgttttctggaggacttatatttagccatcttgaaggaaatggcttaactggcttttgctttttgcaagccttctgcaaagttgacgaggacaaatatgtcttgcttggagatggcctttcctcgtcgttttcacaatgccccaaggctgggtagagttcgttttttggttactcctccccccaccactccgcctcctttctttctcttggaccttgccaacaagcctgctgatgactgaaaatggacagtaggtggcactgttgaggaaaaaatgagagtgactttacaaattaaccaacttggtcttgggagattgcgctgaaattgttatagggtaaaacagatttttctttctttcttttttccttcttccccttccaaggatcttctgaggggtggacttctttggaactcgacaggaccttgaagactgggttcttagtccttatcacatatatgggctataatgaataagtctaaacagaaaagtcgaataaactggaaatgatgctttcatcacgtcgcacaaggtgtagtgttgggggatgtgattaggggtcaagcattttagtgcaataccaggtagtcagccatcccagtccccaggggctgacctgcaaagtactgcgcgtttccgcccccttccccccgcccccccccgccacgccacacacacacacagcggttacacctctgggaagcattaccttggcctgatgacttcacgctgctcaggggaccccactgatttcccccagcaaaccttcctgcttcagcctttgtttgaactccgccttaggtggttcaactcttggagagactggcttaaatttcagatcacaatttcatcccacttaatcagactcgagcttcctgattcagttttttggtagttttcaaatgctaaactataattttaaatatatcacctaacttctgtactctgacatataacgtggattaaactgatttagaggtagagtggaaattgtggggtgccaagtgtctagctgtgaggccccagggggacacttaaccttccagctctaaactttcatgaatatgacacgtaatgcgggaatacctattattgcctactagcatttaactgtgctgtgctaatagttcaagcaagaagcacatttactaaaactggttttctttattatagaaaaacacatttgttgttt

SEQ ID NO: 587534 - DNA, 4001 bp, Homo sapiens
atcccttaaaacacaacagtcaggggttcttccgaaagtctttggaatcaacaaaaatctttgcattaatcaacataagcagaatgtgtttgctaatgcaagttcaaagcccaattagaagctgcagagcagaaattggaattataccctaccagcagatgaaactatgttcattcctttaatgttttccctcaacaacaacaaaaaatacatcaagggcagagaaaccacagagcagtgaaattcattagacacacagatgtaagttatcatcgcggagcttttaggcacttggacctcagtaaagcattttcctgctggagagacatacacacagaccttggtctcccgttaggtttcctttacttaaccagaatacatttctttcctcaagaggcatgtggcagcaccttttttttaaaatcccgtataccaaaaataagaccacatattgtttttaaatgctttttctcaaaatagcaatggacaaatgtgaaagctacctgatctgaatcagggctgtcacaacttttgaagacctcacaaataataggtatttttccaaaagatgcactagctcaatccgcagagagctggggtggtgaattcactggagaagattctatgtgcattcgaaaatgtactgacagggaactgcacacaccacacaccgttctctccccacccccaaagaaaaatcaggcagctactgcaccaatcctggccttcagccgctgctcactctttgccaaccattcagagcccccactaggtctaggagatgtacctttccctcctgccgtatgcagcattttcaggtgatccacggtcatctgcaggatctcggctttttctagcttagcagatccctaaagatgagaatggcaaaagattgatttggcacaagttcctttggggaacaatttaaaatatgcaaacatatatacaaagatacatgctttgtaaatcgtaaagcatggactaaagcaaaatcagttgtcttcacaaaatacgctggtatctgtgtacgaattcatctaggcacaagcaacacagctattttccaaggcggatgagattaatgaggggaagattcagaaggtgcagatagctatgctgagagctttacctacttgctccattacctgcttctcaaaagcactgggtaccagccttctcagctcagacaaactgttattgatccggtctcgtcggcgcttctcaattatctgcagaaggcaagcaaaacaaaggaaggcattaccattacgactgtaaatttcaaagacaaaaaaaaaggtggttatttccgttaatcaataacaaaaataaaaggagagtgtaaagagactcactcctctccgtctttttctggccaaaatctgggaagatgtagttggggacatggaacctagagccgaactcaagtttctgaaaagagaaaaagaacaaacaaaaactgaaatcgccgttaaacgaggagaggtgatctgagaggtcgcccccacaccctccccgcactcagactttttttgccacttgggctggaaggcacctaggggttccctggccgcaggctgccgccagcctgcgacgcgcggaggtcagcgcagggcaccggcgcgccaagggtcctagcccgctgtcaccgcggcaggcctgcgctcgcctcccgctctggctcggctccgctccgccgccgccagctcacccattctcgtccgcactctccttctccacctcgatggtctcgtccagctcgctgtccgaggagctgtactcggggtgagctcgcttcatgctggctccctgggggttcctggggagggtcggcgcggcgggcagggaggagttaactacagcggcgcctctccgctctcggctgcttgcgttccgcacacactgatcccgctcacgctttgcctctggttaaaactcaaccatcctttcccacgctgagccccttcccagggccctggggagggcgggggagtggggaaggcgggcgagggggcggagaggcggggcggcaactccagggcaacagccgccccccggccaatccggtttctcgcgccgctgattggcagccgctccggggaggggcgggagcgaggccgagggctctagcggaccgcgcccccgccctccgcgcccgcccctgcccggcggcggtgcgtcggctccgcgggggctctgtccagcctgcactcaggggaaggaggaggcgcgggcggcggggaggcgcgggaggccgggccgggacacaagcccgccggcggccgcggctcctccccgccccgcgcgccccgattggcctggccgcgcgccagggccgagcctgcagcgcctccggtgagccgcacgcgccgcgggccgtgggaaagtgccggcgccgcggccgccagccaatccgggcggccggcgacggcgacggcggcggccgcgctggcggcggcggcggcggcgctgggcgtccgcatgaatggagaagaatgggcaggcggggagccgggccgcgcgagggcgcgccggcgggggctgggcggccgccggccgggcccccagtgtgaacctgtaatcggagcctgggcgccggccggcctcggaagccgccgcctagcgccaccgtaaatctcgcccgcgtggccgccagtgcccggcggctggaggcgcgcgctgttagtggggccgtgccgggtgcacctggccgggctgcgcgccggcggctccgcggaacccgcagggagccgggagagggggcgccgggcgcgtccacagtggccaccagcccaggggccggtcacatggaggagcaagctgtgggctcaggggacgctctttttgatttctgggaccgaggccgcacatgcagccagactcgtttccgcaggggcttcccagccgcggaatggaatgaatacccctgtgcatctcatttccggggaaggggagcacttgttttttcggccgccttggggaaaaaaaaacccaacggtccctgggaataatcattatgctgggatttttttgttgttcccccgctgcccccccccccgccccctccccccggcggccagatcctctcagcgggcgacagggtggcggtgctggcgtttgcgtctgaggccggccttgctgagggaatgcacgtctctggccccagacacacacctctggcttcggtggcttggcgtggcgtgtactgggtgccacgtgaagtcccccccgagtccactaagaagacagattttttaaaaaatacagttgtaaatctcgaaactgatttctgattccagaaacagaatggttgttttaaatttgaaaatccggtcttctgtcccttacaaaggtacacagcaattcgcattcatctcagatccactctgaagcttgtagtcctgtctgtgagggaaagcttaatatccatcggtgagaataacaaaaggcgttttctctttgcaaaaagcttcctggtttctagacttccttattgatctcaatgctattttttttttgagatggtgtctcactctgtcgcccaggctggagtgcagtggcgcgatctcggctcactgcaacctccgcctcccgggttgaagcaattctcctgcctcggcctccccagaagctgggattacagacgcgcgccaccatgctcagctaattgtttttggtatttttagtagaaacgaggtttcaccatgttggccaggcttgtctcaaactcctgaccaaaggtgatccgcctgccttggcctcccaaagtactgggattacaggcctaagccaccgcgctcggcctcaatgccatcttaacacatcctggatgccaagcactctgagtggccggcctgggcctaatccatagttcctctctgggcacccccatccctccaccaccgcccccaacgggaaatacaacctcctggctcccactgaagcttattccacttcacatcacctccagccctgagcctttccatgcagcccctctgctt

SEQ ID NO: 587535 - DNA, 4001 bp, Homo sapiens
tatcagcggctctctcctaactaaatcagaactgccagtcctggcagataccagcagctggtcagatggattcagggccaccaacagtttgtacattcacctttctgctataggaggcagacaatttactagtcttctttcttggataaagctgatcatctgatttgtcaacgctttgctcagaaatataaaattcaatatagttcccctccccccaaaagaatattatttatacaacaccttaatctgtcaaaatattaacaaacagaatcatgttaacattaagcatagtggtttggaaaattaattctaaaaacagaccataactatacaaggagaaaaacagaccaaaaatactaaatgttaagattccccaaattttgaggcaaaaacggaatcattctggtttacaaagtaaattaggcacagtacaaacctatcacaaagtgttggcttatactcactatttcaatttaatgtcttgaacaaaatttaacaactagtttttaaaaactgctaatacatgacatgatgaaaaaaacattaaaaaagataaaagtaaaccaacaaacctttagtctttaaaaaaaaaattatctgaaagtgtacctttttcctttttacttttactgacgactttaaggtgatgttggcaacagtccagcccagctgggattttaaactttcccctccctcattctacatcagttctttaaaaagctccgatctccgtcccccaaggtctatagggcttgccaaggtttgcagcctgcgtgggtgctgaagggctcagtgcattgggagacagtaagtggaaggagccgaaagagaaggggaaggccgacagggaggccactgaggagagcagaggcggcgacagtttggaggcggaggtgaccacagggagcaccggtccgaggctgccgctagggggcgctcgcaaagcaggcgcctccggatgtgccgagcccagcctgccctggtggtgcggttccgtgggtgaggccgtggtgcccgcgttcccgtggccgttctggggcagcaacagcgggtgcgcgatgtgcgggtgatgtccgaagacggtcccccagggaatgtgtccgaggcccgcgtgggcgccgctcgcggcttcccgctgggaagcgtagttgttgagatgcgaaaccagtcgaactcgaagcgggtcagaggcatctagtccttcaatgatgctcagataacgcgcaacttctgccaggcattcccgaaatcccaaactccgatagtccatagcaagggcgtgcgcgtcaaagtaacctaagcaaaagaacaaaagaaaaatctcagggctttgcccgtttccctcatttcttaagtcccagagacagcccttcctggcagatacctgcatcccttaaaacacaacagtcaggggttcttccgaaagtctttggaatcaacaaaaatctttgcattaatcaacataagcagaatgtgtttgctaatgcaagttcaaagcccaattagaagctgcagagcagaaattggaattataccctaccagcagatgaaactatgttcattcctttaatgttttccctcaacaacaacaaaaaatacatcaagggcagagaaaccacagagcagtgaaattcattagacacacagatgtaagttatcatcgcggagcttttaggcacttggacctcagtaaagcattttcctgctggagagacatacacacagaccttggtctcccgttaggtttcctttacttaaccagaatacatttctttcctcaagaggcatgtggcagcaccttttttttaaaatcccgtataccaaaaataagaccacatattgtttttaaatgctttttctcaaaatagcaatggacaaatgtgaaagctacctgatctgaatcagggctgtcacaacttttgaagacctcacaaataataggtatttttccaaaagatgcactagctcaatccgcagagagctggggtggtgaattcactggagaagattctatgtgcattcgaaaatgtactgacagggaactgcacacaccacacaccgttctctccccacccccaaagaaaaatcaggcagctactgcaccaatcctggccttcagccgctgctcactctttgccaaccattcagagcccccactaggtctaggagatgtacctttccctcctgccgtatgcagcattttcaggtgatccacggtcatctgcaggatctcggctttttctagcttagcagatccctaaagatgagaatggcaaaagattgatttggcacaagttcctttggggaacaatttaaaatatgcaaacatatatacaaagatacatgctttgtaaatcgtaaagcatggactaaagcaaaatcagttgtcttcacaaaatacgctggtatctgtgtacgaattcatctaggcacaagcaacacagctattttccaaggcggatgagattaatgaggggaagattcagaaggtgcagatagctatgctgagagctttacctacttgctccattacctgcttctcaaaagcactgggtaccagccttctcagctcagacaaactgttattgatccggtctcgtcggcgcttctcaattatctgcagaaggcaagcaaaacaaaggaaggcattaccattacgactgtaaatttcaaagacaaaaaaaaaggtggttatttccgttaatcaataacaaaaataaaaggagagtgtaaagagactcactcctctccgtctttttctggccaaaatctgggaagatgtagttggggacatggaacctagagccgaactcaagtttctgaaaagagaaaaagaacaaacaaaaactgaaatcgccgttaaacgaggagaggtgatctgagaggtcgcccccacaccctccccgcactcagactttttttgccacttgggctggaaggcacctaggggttccctggccgcaggctgccgccagcctgcgacgcgcggaggtcagcgcagggcaccggcgcgccaagggtcctagcccgctgtcaccgcggcaggcctgcgctcgcctcccgctctggctcggctccgctccgccgccgccagctcacccattctcgtccgcactctccttctccacctcgatggtctcgtccagctcgctgtccgaggagctgtactcggggtgagctcgcttcatgctggctccctgggggttcctggggagggtcggcgcggcgggcagggaggagttaactacagcggcgcctctccgctctcggctgcttgcgttccgcacacactgatcccgctcacgctttgcctctggttaaaactcaaccatcctttcccacgctgagccccttcccagggccctggggagggcgggggagtggggaaggcgggcgagggggcggagaggcggggcggcaactccagggcaacagccgccccccggccaatccggtttctcgcgccgctgattggcagccgctccggggaggggcgggagcgaggccgagggctctagcggaccgcgcccccgccctccgcgcccgcccctgcccggcggcggtgcgtcggctccgcgggggctctgtccagcctgcactcaggggaaggaggaggcgcgggcggcggggaggcgcgggaggccgggccgggacacaagcccgccggcggccgcggctcctccccgccccgcgcgccccgattggcctggccgcgcgccagggccgagcctgcagcgcctccggtgagccgcacgcgccgcgggccgtgggaaagtgccggcgccgcggccgccagccaatccgggcggccggcgacggcgacggcggcggccgcgctggcggcggcggcggcggcgctgggcgtccgcatgaatggagaagaatgggcaggcggggagccgggccgcgcgagggcgcgccggcgggggctgggcggccgccggccgggcccccagtgtgaacctgtaatcggagcctgggcgccggccggcctcggaagc

SEQ ID NO: 587536 - DNA, 4001 bp, Homo sapiens
actgctctgcacaaccttcattcttgctggtagcaacactgcacagggctggaaagtgcctccaatccttactggagcctaagcgtagctctgcttctcagaagagcacagtctctgaacaaggggacccagggggcctgcagacagctgcaggaaggcctggtctgagaaagcctggcaaaggggaccctggagctggtgtccggctgcaggggcctcaggtgggtgtggccctctccacccatggctctggggccagctcccgctccaactgctcctgctccctgcaatccagctgctgcagctgctgctccacatcctcaggcacctgcacctccagcaggttttccatgccacgttcaggctcgtccccaataagcacctgccagacgggaagcaggtgagcagctggccagctacagacaccccttccccagcctctccaaccctgcaccaacctggatgagcttctcacaagccgtccgcacgtcgggctccggctcccagctgtgcagctctcgaaggatcaggtaggctccctggtcccgcacctgctgccgacctggtgctgtggctgtcagctgaggaggtggaagaggttacccagatgtcagcatgctcatgtgtgtgtgttggggtggtgcttattgcagcagggctcctgctcaccagcatgatggcttcaacaagcatcttgcggatgtctgcatcaggttctcgctgcttgtctggtggcaggtactgcaagtcgacaggcagccctaggggtgagtgtgtgggagccactgtgtccctgggctgggcagctgagccaggctctgcctgtgtaagtcccacctgtgctcagcaactcactgctgcaaagtttcaggagcctgtggcctggacacctctctctccctccactggcctccctcctctccggccaactctgaggctccacactagccactcacgttccatctcttcctcggagaaatcctcaggcccagccaagggcaggagcaaaaaggggagaatgtccacctcaggtccaagcaaccactcgtgatgtcctgagggatggtgagggtggggagacgggaatggaaactggtccagagcagccccggagtccagtccccacacctggcaacgcacccccgccacacccaccactcacggtgctcgaagcagcaattccgcagcgtccccaccaccccgcccctgcgtacagaggagtcggggtactgggtaaggggcagcagccgctggaccacgcacctgttgggaggtgtcacttagggccgtcccccctaacttccgtcccctccccgcccgcgcgggcgccctgggcttcacctgtcggggtccagtaggaaggcccgcgccgcagggcgttggctgaggttggagagcagcggcgctaggtagtgcaggggcgcgcgggcgttgtagccgggcgtgcacagcgcgcgcaccagccgctccaggcccgagtctgccggctccgcggccgccagcgccgccatgagcgctgcacacggcgccggctcgcgactgaggttggctagcgcggcggccgcctcctcggcccagggccactgcgggtccaacgcgcggcccatcaggcgcgctggcagcccggggtcggccgccagcaatgtctcgtgcaggccggggtcggcggccaagttcacgagcgcgcgggcggcgtcccgggccggggcagaggccggcgccagctccatcagcgcctgcagcagcgccgcctgccccgccaacagcgcgcggccgggtccgcagccagtcagcgccagcacgtgccgcaccgccgccgcctgcaggtccgcccgcgcgcccggcgccaggaagggcagcagcttcaccacctctgcctccgggcttgcctccggccctcccgaggcgccagcgccagccccggcctcccccatgtcgagcgacactctgctgccacccgaccggtgccagcggtccgcttaggggtccgctgtgtggcccgcaaccccgcccaccagaggagcgaaagccgccctggccaatccgaggctgcgcactgggctcaaggggcgggaccggcgtgcggaggggaggggccaggccgcgcgcggggagttatgggtctcggcgtctggccggaagctgcggaggttggagactgagcgctgtgatgtcccgagccatggggaccgaggcccggcgcgatttggccgcctgccgcgtccacactcgctggaagcgtccatgtagtctcggctaggtcggccagtgcttcccactgggcgctggccacgccgaacctggtcagccggccctggcttctcgtgggccctgagggtctgaggcccgcgccccggctcctcgactaggctgtcgggtcagagaagggctgaatgggggagtggccacgggcctctcggaaggaaggcctgctcttgtccaggctggcacggccaccgagaagctcaggccgtccagggacaggacaacacagggccccagtggggacctgaggaggcagctttggagaggcctctgggcatctctgagctggtagctttggggcatttgtcaggacgtcttcagtcgcaagtgacaaacccaactcaaactgacttgcacgaagagaaaatttgtaaatggaggtttggagggagccagcttccggcactgctttatccaggagctctctggagccttgtactgtctaccctaccattgctctccctctctgctgccctgctgctctgtggctccatatcatttccacctgccactggccgattttctcagagcagttgggaaagaaagacactgggacctcccagttccatggtcgtggcagaagagtttctctgtcccagtattggagtctgccccagaaaaggactccagttcttcacgtgtcctccactgtgggcggagcagcaaccttctagagacacacagactgggaggaagggagggcaaaagaagggcattccctcactccagcattttttgggcaccagccatctgccaagctggtagctcaggacacggaaccaaacaactttggtggccattctggcctcagggtctttgcacttgctgtctcttctgcctggaatgctcttttctcagctgtacacaaggctggcaacttctaattatttgtcagagctatcttccctgggcaacttacagagactcagcccacccgccacccatgactgcttggtttctgtctgcctccttcaagatagcagtacttaggccaggtgtggtagctcatgcctataatcccagcgttttgggaggccaaggcaggtagatcacctgaggtcagcagtttgagaccagcctggccaacatggtgaaacccctctctactaaaaaaaatacaaaaggtaaccgggggtggtggcacactcctctagtcccgcctactcgagaggctgaagcaggagaattgcttgaacctgggaggaagaagttgcattgagccaagatagcgccactgcaccccagcctgggcaacagagggagactccatctcaaaaataaaataaataacagtaaattaggccgggtgcggtggctcacacctgcaatctcagcactctgggaggccaaggcatgtggatcacttgaggccaggagttcaagaccagcctggccaacatggtgaaacccatttctactaaaaatataaaaattagccgggcatggtggcgtgtgcctgtagtcctagctacttgggaagctgaggcaggagaattgcttgaacctggtagggggaggttgtagtgagtggagattgtgccactgcactccatcctgggtgacagagtgagactgtctcaaaaaaaaaaaaaagaaaacagtacttaaaggaaggtaataaaatttaagcttcatggtgccttgcttggacgggtcctttccaaagcttccctgagagcaaaccttgcatagtgttcatatatatagtcataatggttttgcaaagtagggtgtag

SEQ ID NO: 587537 - DNA, 4001 bp, Homo sapiens
acacgaccaaaggacccaattactaagccatcaaataagtcatcaaatatgacctcgaaactgagcttgatgttcagcttcaagaaaaagctgtcaccttcccacacagcagctgacctaagaaattccagggcaatacccccagagcgttacagacaaaagaacaattatttccttctctctcctctggtctacctcgtcttggtgggcaaattaccaaataaagtcaccttccaatggtgcggggataaatgtgctgcttgtgtattacacctttatttcctttccaaatatttaatttctggtctagctctctgctcgtgagttatctttgctgggcatatttttaaagacatagtctacttttttttttcttcaagcaaatgctgaattttcaaaaagaaggaagatgatgacgtttttagtaggaaagctgtgcggcccaaacatgggctccaggtgacagggaaagccttgcggtcccaacgcggcttcccctcactacgtgtgattactatttacaaaccacctctctctaaaagtaagtgccctttgataagctaatactggcgctaaaatgcaaagagtgttcggcgggatcagtccctgacaaattgtgatcaggcagattacataacctccccggggtccttgcaattttaaaggaggggagcgcaggagatgaaggttgggtggatcaaggatcgcacaaaatgtaatcctctgagccgcttttccaaaattcacaacgcctttctcctccagcttctgcttggagaggaggggtcgtttgaactccatacacagacactaaaacttcgtattctgaccaagaaaagggcgcgagaggggaaagacaggtgactcccaccgtccctcctacccaaaggggtttgcgatgcttgcccgacccctctgggaggggcgtgtgcgaaggacctagggcctggggctccccggtgcaggggtctagatggagacctggaatctgtatttgtcaccgttttccccaccgagttcggagagcaagccagttgtgcaatcacggtatgagctgagcgcctcttaagccagcgcaccggacaaacgcccggggtccggggcccggggcaaaagcgcccagcccggcccctcccaggcggcggcggcggcggcggcggcttcccagtcaccctggagggaaaacgcgccgaggggagacgcgcggagggctcgcccgggaccgggctgcaggccgcgcccccaccgccttctccgcggttcctcacccgccgcacatccacgcaggttcaaccccagcgcggggcgaacgcgcgtcccggccccaggcttcccacccgctgaagccaatgggtcgcacggctccggcgccacgtcctcgggggcgaggccctcagggaagggaccctgctctaagtccctccgaacagtggactgggtgcagggggagtccgagcccccccgatcctcggctggcccgcctcctggctgccagtttgtggggtcccggcgtcccgatccgcggcctctgtttagacggaaggcgccaggacgcaggctccgctggggtgggcgccgcctgggcgcccaggttccactccgccgcggtccgaaccgccccctcccccgcctccgcggggcccggccgcagcaccccgaagtccggcctccggtctggggcgcgggaccgcgaagtcgcagcaacagcccaggccacgggggcggttccggcccggcctagcgctcggcgccgcgcacggagataggggcggcgccgcggagaggagacgctgcgctcgtagccggccgggcggcggtaggaggtgtgcactcacctcgtggcggcgcggcctgggcatcgcgccccgaagagccgccgggggccagcagcgcggcgctcagcacggacgcggccagcagcagcgcggccagcgccctgcccgccccgctcatgcccgccgcccgctcggccgcccttgcctgcccgctgcgccccgccctgcgctgctccgccgcggacgcccgcgcgcccgtcatcgccccctccgctgccgtcaccgccgcctgagtcaccgcgggaggcggaggcgcccgggagccgcgggcgggggaacctaggggctgggccgggccatgctaggccctgccttgagggagctggccaggaaagaagccgaggctctgcgcccctgcgttgggagtgtttgtcttcgggaggaaaaacagccggaagagaggcccctgcaggccaggagccttcttccctcgccccaccttctccagccgcattctgccaaactcccgcccccgccggccaccctccgcacgggtgttagagccctcggtccctgttttggaaaacgcctcaataagcaagactgcaaagtccctgcccccaaggcgtttattacccagagggagaggcacgacttagaagccaccaagcggccccacctcttgaaagagcccccggccaggctgacgaagtggaagggagcaggtcgaggagtgtgcacacccattcttggctgtatgccgggagacactatcgcaggtataagggacaggtacagtaatacctatagcagaggtgcttgtaattgcaaaaccttgtcaacaagctgaatgtccgccagcgagaaaacaaactgccccacagcaggggaagtgctctacagcttcccgcatccacatggataaatctcaaaacacaaggctggggaaaatgcaaattgcagaatgcctttttaatatataaagcaaaacaataatgtatgttgtttagggacatccatatatgtaataaaaatacaaaggcacacatgaaaatgttgcgggacttttccttagttcagctaaagacggtggaggtccttgtcacacgccaggaaagattaggctcgcagacaatttgaagggtaaggcagggttttattgggtgtaaaggaagaaaaaggggaacagggactcagcagagccagagttctcctagttgtaggcttcccacctcacagattaaatcccaggttctcccgaggaagaggagggccaggctcctcccagctgcaaactgaggagcgaacttctgtggctccaccccagagcagtgcacaggccagttggagttttaccagggaacccttcccatctggctcattcctcgctctaaagaagtctatctaactgccactaggataagaatagggacaaagacagatcttaactgcttcctgctgatagggggcactgtttcgggaaaatggcaatcagatctccctcagaggcctatctaagggtgcccagcagaaggggccatggtccgagcttccagtagcatgaccgtttgatgtcctgaaggcaagaagagacaaactgggttattaaacacatatggccgggcacagtggctcacgcctgtaatcccagcactttgggaggccaaggcaggtggatcacgaggtcaagaaatcgagaccatcctggccaacatggtgaaaccctgtcactactaaaaatacaaaaaattagccgggcgtcatggcaagtacctgtagtcccagctacttgggaggctgaggcaggagaatcacttgaatccgggaggcagagtttgcagtgagccaagattatgccactgcactccagcctggcaggtcaggagttcaagaccagcctggccaacatggtgaaaccctgtctctactaaaaatacaaaaattagccagcagtggtggtgcctgcctgtactcccagctacttaggaggttgaggcaggagaatcgtttgaacggaggttgcagtgagccaagaccacatcactgcactccagcctgggcgacagagtgagaccctgtctcaaaaaaaaaaagaaaagaaaagaaacaaggggagggataaggacagctcaaaaatcctgaggctttttaccaatttgtacacggagaagggggccaaaagtccgaatggtaaacaactttacccttttgctggcatgttgggct

SEQ ID NO: 587538 - DNA, 4001 bp, Homo sapiens
cgcttttgtaacttttgctatttgaactatgtgaatgtactaatttaaaataaatgagaatataaaaatcgtccaggtctggtggctcatgcctgtaatcctagcactttggaaggccgaggcaagtggatcccctgagctcaggagttcatgacctgcctgggcaacatggtgaaaccctgtttctaacaaaagtacaaaatattatccaggtgtggtggtacatgcctgtggtcctagctatcgggaggctgaggtgggagaatctcttgagcctttggggtggaggttgcagtgagttgagatcgtgccacctgactcccatctgggtgacagagtaagaccccatctcaaaataaataaataaataaataaataagtataaaaagtaacacaatttccatcaaaactaaaaccgaaaccaaaccaaaaaattgtactgcttgtttactaaaatttagaaacctgttcccagactcctcttgtcctttctgttgcaatgtagtcaccattgtactgcaaagtgaatttcatagcatcaagaaggaaaggcaaagaaagatgaaattattacaaaggtgatgatggcaagtaacggtaccccccattataaaatcttctatcaccaatggaatgttacagtctttgtggatttattaagatcacaaggattcaatgaaccataaagaaatgagtagctcacaggaaccattgttgtgactattagagtgttagatgcggatataatcgctgtcttatcagtagagaaagtcaggcttggggaagtcaaggaatttgcccaagaacagtgagctgaaaaggagcccttatcacccacttacctgttgtaggtaaaaaggtcattcccttctctttcttggcttctcctttgatgccagacactaaagtaaaaaaggtttaatcacagaaattataaccaagacataataccggagataatttgattcaacatacccattttacagatgagagaattatgatctggggttgtgaagtgacatttagtcccgcatctagtttgttcattcatttaatcatttcgtcatcaaatatttgttgaccaactactaatgatggatggtgctattgagtgccgagtgtttgctaggcattgtgtgtgctggaaaggcagacacataggaaaacaacattgaataccttgaagggaacggtgagggtgtgtaacagggggctgatctagtctcgggaatctggaagccttccctgagagggggcgttgagctgagctctgaagaatgaatagcatttgagtaggatttatctaattgggggaatatttgatgtatacagaacagcacaagcccagtgtctgaggtaggcatgagtattactttaaagaatggaaagaaggccaacagtgatgggggcataaagaatgaaggaggtggaggtggtaggaagcagggatggtgagggaggcagggtcacgcagagcctgaaaaggacctggtacactacacagagagaagtaggaactccgcaaataatttggggcagagggagagaaaagagggaggaacttggaagatgacctaacaagatttatgaaaagatcactcaggctgattggtggtgaatgggtcatggagagacaagaggagaagctggtttggaaagctgtctcatggtctgggaaagggaaaataatgttttggacaaaggtggtaacagtgaaggtgaagagaattcttttgcatagatgggacttaaatgcaaaaagtcaagggaacaacagaagtagggaagttattcttgccattttgaacaaattcatttggattctgggcagaaatgttggctgctgaggttctctaaagcacagtgaatactccaacttattatacagaacagacacttgcagaactccagctagacccacctgtgttccaaagggacaagacacatgccaggcccatgcacagcttcattgaaggaccacgtgacaggaagcccagcatgcttgtgatactctggcccacctggaatgaagcaagcaaacacttaggaaactaagcacatggatgcagaccttcctttgagaacagtgcgtgaggaatcattaaaatcacaatctgaaaaaggctttgtactaggttaggagaggttaggaagctaaggtaacaaattaactccacaatttaattggcttaacaagaaaagttgatttcttgtttgcagtatatattcactgcattttggtggggagctctgctccacatagtcactcagggaccccagttaatggagttccactatcctatagttctccatgtggcaactgtagcctccttagactttgattcactgtggcactggaagggagagagctgtgggattatgcaccaactcttaagtgctttggcaggaagcaacacatttgcttttgcttgcagcccataccaaaattacttatatgaccctgcattattgcaggaaaactgggaatgtagagggggatgcatacatattcagggagcatttatatttcttccatggattttctggctgttgagatgggaaatatccctcaaatacagcatcacttactctcataaataggaaaatatattaccataggaatatgtgtgttcacagtctctttccttctctgcagcactctgtgcctgccattctcattttgcatttgccatgcaaaatcaccatgatagttacagttgcaaagctgagactaaattgaataatggctaacatttattgagcactttctgtgtgccagatgccacattgaacactatctgatgcatacttgataactgtacagtctttctgtgtaggtattaatgtaatgacaatttaaatacaggctgcacagatacgatttgaaaagaggagaaatttaccattggtagagggttggatttatctggaaggtgaattgggcgggaagaaaagtcaagagaatgtgcgcttggattggagaaaaatgttgcaggaagggaacatcctcagggcaaattgcatgttgagaagttctgctgtccattaggaatgggaaggccctgtggaattttcttaaaagatcccagaaacatttaaatagctttttgattattgatagctatgtgactggcatttgttctagatgccaccccaaagagacaggtcttacaaggaagcaagaagctggggctttcgtggaattcacctattctcataagtctggttactctctgaataccaattttcctcatctgcaaaacagttaagagaactctcacagggtctttgtgaggatttaaaataatgaatccagagcatttaacccagtgcctggcacatcgttatgctcacaatccataccaggcatcaagctcaggctggagacacagggacagagtagacactgccacttcccttgagctgtttagtaacttagaagatgtagacacatgcccaactaattcacactcaaggctggctgtgctaaattctccactgagagagagatggacagggagagagagagtgagcacctggtgaagccaggacttagcgttctctccagcaaagggtgactgggggtggaagtgggcaggcaattcctgctgagtgaggattctttcctttggcacctcaagcactgcgcaaacattatctcccctttctgagcctcgtgtgtagaatggacagagtcataactactttgaaggtatttttgtgaagattaaatgagaatgaaatatggtgcttagtacaatctctggaatatggtagatattaggaatcttaatttctttctcattctcttatctttctctcttttctcctctttcccccttcttcttctgtatctatttcagaactcagcatcataccagagaaatacggaattaaaagataaaaacttatagtagaaaaacaattatttacatttatataatagctacaaatttctctctttttgactcttgcttcattatgttaaccaccctcttcca

SEQ ID NO: 587539 - DNA, 4001 bp, Homo sapiens
ctcctagtgtgttattaaatattaaaaactgtgagaaataagagatgttgcaatcctttcctttttaactctaattgaaatttgaaaaaaaatttagaattcaaatttcccaactttgacttagaaacataattcagctagatcaagcaacttaattgcacaattttaaaataagtttaatgcaaagcactgcaatcctgatgtgataattacctgcagcataaatgcaaaataataaatgcatttaacgatgcattttatggtaaaaccacaaaaagcacaaccatattagcacaaactaaataaaaagacacaggcggtattatgtccaacagaaagagaaatgttgtacgaagccaagaaagaaaggaaggacttaaggaaggaaggaaggagggaggataggaaggaaggaagagggaagccagaggtttctgtacctgcaggataccagagaaatgagctagtcacatcactctaccttatatgatacatgggtgattttttttaagcttcagcgtaaataaaaacagtaatcactttataccattcaactttacatagtgttatctttaatgccaactgcattcttccctttactcacccaatgcttcttcactgttccattccaccagctttcaggcaaatgcaagacagaacagggtggagtagaagaaaaatacaagcagcgcctttcggcgcaccccctctcccgcaaataatttccaacagttcctcctgctacgaaaataagtcgccctatctccagatacataacagacattccgtctccttagtagacacacacagacgcgtacacaatccagcactcccgacccccaccccaggccccccgaatcttcagcaattattcatctaattcacacgaagacaagatacctctacctactgtttcggggtgaaggtgggtggaggacgcctttcaaagtagccccaatagtgtaaccaaaacacggttccggaataaaatattaagaaacacttttcctttcccacctatctaccgacttgaggatgcaaaaaatccatctccacatcacaccatctctacagttctcgtggctggagtttggggtggagattcgtccaggggagggggcggaggcgagtggcagagtgtgagcgggcgacgggacacaagcgagttgttgagcccggccgcctcgcaccacgtcgccagcccaaacgcccagcaccaggacctcacgcccgcccctcagcccaggcccagagcgagcgaggactcgcgctgtctaacttcccatctacagacaccgctccaagacgagcagagcacacaagtacacgtcacacagtttaaacacacttacacaccccaaacaaaccaacacacctgcaaatcacctcacagtttccagaactccacaccggagaccccacctccaggattcaaaccttccgctcatcgtagaggaaaccagaagagttggggggcagtcgacgcctttccaggaccggaccccacgaactgccccaccccacagcccgcgtctgggtcacccactcggaagccccctgcttcctccctcctctcaatccggccgcttacgagacccatccccagcgtccgctcacttcctccccaaaacccctccaaaaaaattgttttaagtgaagagaaagaagtgaggaaagagacttgaggtagtccggcttcaaaaccgctcgactcacctcagaatcctcgctgagttctctccgcccggcacagccccctccccaacgtcccagtacgaagggctgagatagggaggagggaaggcgggagggggaggggtgtcttccgcgtggggcgcccgtcgggaggggactggggaggggttgaggccggcgcaggaagaggagaagggggaggggaggcccctatctcccagtctccccctgaaaaacctcccttgtctcaatcacatcagactgactgtctttgtctggctgacaaccgccatattgatatcaacagcccctctcccacctgctgccgccgggcgtccctgggagttgtagttcctgcctcccctgagaaaaattgcggagcccggcgcctagagggccaagggaactacaacttccggcaagccccgtgcccatccgccttccctttgggaggagggaaaggggagtcggagccgtcgggactacacatcccagaacaccatgggccccaggcccgtaaggaagacatgatatcatgctggggtggagagggaggatgcattggcggctgggatgaatttgagctgacggaaggaggcgttcggagaggaaagggaggaaaaggaaaggcgaccacagttcccatgatgcctggaggggagactacatttcccattattcccctggaagggacgtgaggatgaaagactgcaagtcccgcgatgctctcggctggcaggtggcggagattgcaccggaagacgcttcctgggtttgaggagttcagtgactgctattgaaccaccaaaagtccattatgaaactggtgagtcttcgctcctaggtcagagggcaaaggtgatgctataaccttttggacctctttttttcctacgttgggcagggaatcgtcgcacgggaggggtagcaattattgagctggaaagtggagtgggctaaggaaagctgctttttgttgttgagaaggtttgaattccctctcccccaccccatccctcccaggaggtcttttttcactcgttagtgggtctttttgttcagacaagaggttgactgtcacagtccttcgcccatgaactctgtgggctctgttaaccaggtttggacgtcctggttcccacgtgagggttataataggctgttaacaatccgtttccattcgattggcgcttgagtatcctgtctccctactgttgttgagactggctagatttaagcagacagtaaaaaacatccagcagaacgtaatcacttattaaatatcctgttatatagactcctcactgcccttggaattcaggacgaggtcagagtgtggagaagttgagtcttaaaccctgcatgggatttagatgggcagagaagtgttatatggtattccattctaagactgtagggacttcatgagccaaggctgaatgaagcgtgctcggtatacctgaagtcttaacatcacacagctcaagcacctggttcatggaggctcctcagacctttgatttgagccatttgactcattgtgcacacaagtctaactagtttattccaactcgattcaattagttaataacatagtgtagaaaggcaggtgtgaaacactgtttctcaaccttttaaaacccatatttgtgcagccaagttattgtcaagctttacttgaggcaggagaatcgcttgaacccgggaggcagaggttgcagtaagccaagatcgcgccactgcactccagccttgcaacagcgcgagactctgtctcaaaaaaaaaaaaagtttattttttaccatttatataattatctgaacatgctttgccaaaccacacaacacacctaccctcatcttgataatcattgtgctacaggcatatattctgcaaagccagctgttttctgcgaagtcagagaaagtattaaaagtggattcaattccgaaattgtccccgtataaatctgtttatataaggggaaggatgcgggtcactaaaccttgagaatagcaacttacccctgggtcagtgtgttacacatttaataatgcagaattaaaagtcatagccgttgccctacagaagcatgcaacctaagaagaagatagaaaagtaaaccaaagttattatttatttatttagagacagggtctggctttgtggggcccagactgaagtgcagtggcgcgttctcagctcgctgctacctccacctttcggactcaagcgatcctctcgccgcgtcagtctccccatatagctgggaatacaggcgcgcaccactgcaccctgcttattt

SEQ ID NO: 587540 - DNA, 4001 bp, Homo sapiens
cctcactctttcagtcccccttatctgtgtgaatgaccaacagcaaaaattttaaatcaatggttagaggacatatcataaaattacacactctatcaatgtggttttcagttatcatagaatctaaaggtcccttactgatgataggtggcagattcaagaattgataagtttggggaatatattcaattctcaacagtcgaaatagaaattatgccaatttctttactttaaaaatccgttacactaaaaaaattgtcacataaggattattgaagaacttaataaggaagtacaaaatatgaccttaaattctcctagtgtgttattaaatattaaaaactgtgagaaataagagatgttgcaatcctttcctttttaactctaattgaaatttgaaaaaaaatttagaattcaaatttcccaactttgacttagaaacataattcagctagatcaagcaacttaattgcacaattttaaaataagtttaatgcaaagcactgcaatcctgatgtgataattacctgcagcataaatgcaaaataataaatgcatttaacgatgcattttatggtaaaaccacaaaaagcacaaccatattagcacaaactaaataaaaagacacaggcggtattatgtccaacagaaagagaaatgttgtacgaagccaagaaagaaaggaaggacttaaggaaggaaggaaggagggaggataggaaggaaggaagagggaagccagaggtttctgtacctgcaggataccagagaaatgagctagtcacatcactctaccttatatgatacatgggtgattttttttaagcttcagcgtaaataaaaacagtaatcactttataccattcaactttacatagtgttatctttaatgccaactgcattcttccctttactcacccaatgcttcttcactgttccattccaccagctttcaggcaaatgcaagacagaacagggtggagtagaagaaaaatacaagcagcgcctttcggcgcaccccctctcccgcaaataatttccaacagttcctcctgctacgaaaataagtcgccctatctccagatacataacagacattccgtctccttagtagacacacacagacgcgtacacaatccagcactcccgacccccaccccaggccccccgaatcttcagcaattattcatctaattcacacgaagacaagatacctctacctactgtttcggggtgaaggtgggtggaggacgcctttcaaagtagccccaatagtgtaaccaaaacacggttccggaataaaatattaagaaacacttttcctttcccacctatctaccgacttgaggatgcaaaaaatccatctccacatcacaccatctctacagttctcgtggctggagtttggggtggagattcgtccaggggagggggcggaggcgagtggcagagtgtgagcgggcgacgggacacaagcgagttgttgagcccggccgcctcgcaccacgtcgccagcccaaacgcccagcaccaggacctcacgcccgcccctcagcccaggcccagagcgagcgaggactcgcgctgtctaacttcccatctacagacaccgctccaagacgagcagagcacacaagtacacgtcacacagtttaaacacacttacacaccccaaacaaaccaacacacctgcaaatcacctcacagtttccagaactccacaccggagaccccacctccaggattcaaaccttccgctcatcgtagaggaaaccagaagagttggggggcagtcgacgcctttccaggaccggaccccacgaactgccccaccccacagcccgcgtctgggtcacccactcggaagccccctgcttcctccctcctctcaatccggccgcttacgagacccatccccagcgtccgctcacttcctccccaaaacccctccaaaaaaattgttttaagtgaagagaaagaagtgaggaaagagacttgaggtagtccggcttcaaaaccgctcgactcacctcagaatcctcgctgagttctctccgcccggcacagccccctccccaacgtcccagtacgaagggctgagatagggaggagggaaggcgggagggggaggggtgtcttccgcgtggggcgcccgtcgggaggggactggggaggggttgaggccggcgcaggaagaggagaagggggaggggaggcccctatctcccagtctccccctgaaaaacctcccttgtctcaatcacatcagactgactgtctttgtctggctgacaaccgccatattgatatcaacagcccctctcccacctgctgccgccgggcgtccctgggagttgtagttcctgcctcccctgagaaaaattgcggagcccggcgcctagagggccaagggaactacaacttccggcaagccccgtgcccatccgccttccctttgggaggagggaaaggggagtcggagccgtcgggactacacatcccagaacaccatgggccccaggcccgtaaggaagacatgatatcatgctggggtggagagggaggatgcattggcggctgggatgaatttgagctgacggaaggaggcgttcggagaggaaagggaggaaaaggaaaggcgaccacagttcccatgatgcctggaggggagactacatttcccattattcccctggaagggacgtgaggatgaaagactgcaagtcccgcgatgctctcggctggcaggtggcggagattgcaccggaagacgcttcctgggtttgaggagttcagtgactgctattgaaccaccaaaagtccattatgaaactggtgagtcttcgctcctaggtcagagggcaaaggtgatgctataaccttttggacctctttttttcctacgttgggcagggaatcgtcgcacgggaggggtagcaattattgagctggaaagtggagtgggctaaggaaagctgctttttgttgttgagaaggtttgaattccctctcccccaccccatccctcccaggaggtcttttttcactcgttagtgggtctttttgttcagacaagaggttgactgtcacagtccttcgcccatgaactctgtgggctctgttaaccaggtttggacgtcctggttcccacgtgagggttataataggctgttaacaatccgtttccattcgattggcgcttgagtatcctgtctccctactgttgttgagactggctagatttaagcagacagtaaaaaacatccagcagaacgtaatcacttattaaatatcctgttatatagactcctcactgcccttggaattcaggacgaggtcagagtgtggagaagttgagtcttaaaccctgcatgggatttagatgggcagagaagtgttatatggtattccattctaagactgtagggacttcatgagccaaggctgaatgaagcgtgctcggtatacctgaagtcttaacatcacacagctcaagcacctggttcatggaggctcctcagacctttgatttgagccatttgactcattgtgcacacaagtctaactagtttattccaactcgattcaattagttaataacatagtgtagaaaggcaggtgtgaaacactgtttctcaaccttttaaaacccatatttgtgcagccaagttattgtcaagctttacttgaggcaggagaatcgcttgaacccgggaggcagaggttgcagtaagccaagatcgcgccactgcactccagccttgcaacagcgcgagactctgtctcaaaaaaaaaaaaagtttattttttaccatttatataattatctgaacatgctttgccaaaccacacaacacacctaccctcatcttgataatcattgtgctacaggcatatattctgcaaagccagctgttttctgcgaagtcagagaaagtattaaaagtggattcaattccgaaattgtccccgtataaatctgtttatataaggggaaggat

SEQ ID NO: 587541 - DNA, 4001 bp, Homo sapiens
tatattctgcattggtctgctcatttattacccatctttacacacagaatataagccccatgttggtagagaatttatctgtcttatttagtcctctgttttccagcttttaggattatgcccaggatacagtgggtcatctaatacataattctgaaggaataattattttttaaatgtagatatttataataaaatgaatatttcttaaatgagttaatattgtggattacatcttgaaaaatctatatgcattcaaaagatattaaatatatgtaataaaacttcattataaaattgtatattaacaactgattattgtatagctaacaaaaggataatactaaaggttgtcatgtcctgattatattttgtaacttacatatattctacttactaatatttctgagtagacaaatattgtcatatataatttcatgaagtagaaaaaaattttaatgagaatatgcttagggttagtcatgtgacataggattaaaatgctaaacatttttcttctggtaacattaacaaaacagatattgacaatatgaaagttagaactgtttggaattgattgtattctgagagactatatagaaatatgaaaaattcaactcttgcttcaagtttagtgccatacttacatattgctgacaacattattacaaacaaacaagttacaccatactttggatatagccatacaaaatcgttatttcagtacatttgttaaacacttatagtaaataagtgttatgattatggcaaatatgtccctaccatttcttaatcatgagtgttttttaaattcaggattctgatgaaatactctattaaatatctctagtcaagtctaaacataaggacacaaaacagtgatttcctgaaagttgcactacaggtttattttaactatagttgtgctaaattttcagaattcaccttttgactattttttaaaatccccactaataaggaactgcttattaaaaatagaaccagaacaccagtcatacaaattatacaatacagtagaatagtaagatatcctcagtacaagatatattctcaatcttgcattaaacacacacacacacacacacacacacacacatacacattttccaaagtatacataattactcgatcttaggagttctaacagttataacatattttaaacaagattttttttaccgggtattaagtctaaattcaaagtcaatagtaagctgtattacataaagacactacccctaaaaaactcatgtcttatttaaagttaaaatgttacagtaattaaataccaacagctttgtgcggctaaacattagcctgtcaggtgaggttataatacaagccttattccctttcatatttgcgttcaatgcaaaaacctgatagtaattttaaatgtagtttctcatcactagcaattgagaactggaattataaggaaaagggtagacaatcagtgaaactccctaatgttctatggaaactttgttccataagtcattttaaatattgcttagaaaatatactttcacagccaatctgccaatatgacatattactatgatttacagcaaataaaataacagctgagactactctttttacctgtctaactggcccatgacagaattctgacattactttattacacaaaaccaggctttttctacctctaacacaaaatagccacagcattattaacttaaattttgtaatgaagtgcaaaagctcagatctgtggccttaaaagcaagccctaaactctccagcaaaaaaaacattgagccaccacctttggaagctcagtcttccaccttctccaattatacttacttttctttacatctataaacagatgataactcaccacttgaattatatagaatctgcatagtttcaaactccaaagttgtgtaagttgggtccaaaacttcactgtaatttgccatgtccatgtccagtattggttctgataccctcatcattgatttagaaacacacatacaagtggcaccacaagcccagagtgcgtgatgagtgttttgatgtgttttgctttcaatctgtgagtgctaatccaaagttaactgtaactgagtgacttaagagctgcaatgggaggggctgtaaaactgtaaccttcttcagcaggccatattctgcttatttcttcttttatggcatatgaaagcaattccttgtgataatcttggaatgcttcatggaatagccttatctgaagtgcttagtggactaacatgatttcctaaattgatttccagtagacaataaatgagatcattaagagaaggattaaaaatagaaaagaaaatctcataggttttaaactgtaataataatgtgaggtatcccatttaaggagctgaaatcacatacctcatattctgaaaaatgggacttactttactgctataaatttggtaaatcaagtctgtaagttaacatttcacataaacactttacaatttcaagttttcttaaatgtacaataaagctacctttattttggagtaaagcaaattttgtaatttgaaatgtggggagttatgacatatcctgacagccccctaggcgtaacccttatatggcctttaacaatattctctttaattatctatttataggcctgtgtcccagctatgctaataaacttcccaagggcagaaccagtacagctgctagtacatgggaggcatttcaataattgttacatgtataatgtttcatttcttttgaattctgatgtcattaaactgaaataaaattatccctaacgtgtagatctacatattcctatcatcaatcctcatctatatagcacagtacatcttctgtgtgtatatttgacaaggaacatctagggtttggggaatatttagacaatagttctcaatcaatatattttacttctgaaaatatgtttattgattctattttccaagaaagaattccagccccatttacattataaattcagaatgtccttttccacatttgttaaagattgcagaaaagtaatatttcttaacaccacaaaccttatgaatactctgtcttagaaactattgtacttttcacccgggaaggctggcctcttaaagtactctaaaccatgtgacaaactgtaaagaaaatagcttagagtcaatttagcagccagattcactaaatcaaacagtgatcattggaatagtcctcttgccctcatattctgtatactcttaattgtgaagataatatgttggaataaactttcttttttggctttctttaatgaagactagacataggttattcagtttttagagaagtagacagaagtggtttttatttgcgtgaagtagtccttattttaaatgagttaacaaacatttcttttctataggaaccaaagggatgaattgtgcagagcccacaaactttctaatctatgaaataactaaccaatacagagggatgtcactgacgggagtgtcccaacagaagaaaaagtaaaaaagaaaaagataggaaaagctcatttatacatctggaaaacactaaaagaaatgtggctgtagctcaggagaacaatgctgtcatagttttatccttctaccctagtctgttcccgcgggtgacagtaccggatccaggcatttgactctaaggtgaaaggggctacagatggatctaagcacagatcttcaagtagcaattagcaactaatcagagttggcattcaagaagaaacctgtgccccatgcatgttagtttatgttattttcttcatttcatagagtaagaactcaagaatttccagaagatatggtagatttgaatagcaagcatatctcctcaagtgggtagtctttgtaatgatattcagatgtagaaacacccacggaattcagtcagcctcagcctagcaaaagaagcggtttctttagcttttctctgaaggagagtacaaagtacag

SEQ ID NO: 587542 - DNA, 4001 bp, Homo sapiens
gctaaggtaagtgttctgagcacgtttaaggtagaccaagctaagctaccgtttggacggttaggcgtatgaaatgcattttcaacttacggtattttcaacttatgatgggtttaccgggatgtaaccccatcgcaagttaaggagcctctgtacacctctttatttccatgtcttctttctccctagattttaaacaatgtagccctacttagattcaattagcttcatctttgccttctggctgcttcttctagcataaagggaagcactacttgcacagtctcaaaaacttaaatcttaagttcctcagcattctgtttacagatgtacagattctgccaaatctattccttccacaacatcaaagaatttagtaattctttcctctctctctctcccctgcctagtcagaaacctcagccacattatacaacttaccagtcttcctcttttctgaaatacagcagtgaaagccatctccttgcctggagggagaactcatcagaagggtaagctgcacgctaactacatactactgctaacgatctgaaatcccctaaatggtctgatatgcaactggctactcaagctctaccaagtctgtttcagaggacagaaattgattcgtgacgtagccaaactataaaaacctcagactatttttattaatttttttaacaaccaacgtaaggcaatacttctccagcctttccagcaaagtgccttgcacaggatcgtgacgtctacactccagggatcctgactcgtaacccaagacaccgctaaagagaatttctctcacattcgtgttttacctttaaaagtaatacaaatgctgtagtagccttcataaacacatccgtaaacatttaattaacattctcagcaatgagtgaaacggaggctcccgaaggcagcgcggggtccgcccgggctctgcgcatccctccccctccccggccgcgccgcggcgagaacgactggaacccgggcgtcggttcccctgccgcgtcctgaagacccggcttcaggaaggcgcggcagctgacgtgagaggtgaacatgtatttacttcaaagtatgaggaatctaaaaccgtttaagaattcaaaatcagaatcccacgactctgtcccccaaggccttcgagttccattgttgacgcccagacacctccagactcctttaaacgtctgcccgacgcctctgacaggcgtccgcccctcgcgcactcccaccgccagcggtgccttgcatccgaaacggggtccccgggcgcctcccgcattctccccacgctccctcacaggtcctttcagttcccgggccggagccgggcccgtcctccgcgaacgcggcaacaaaggcgaggagcggcggcgggtcctggacgcggggcagtcaggctcggccacccccagagcgcagcgcagccccagctgcgagcagccgcacggatcccagagtcgcccgccgcgttcccagcccagccccggccggggtccgcccggaacagcgacgcctcaggcccggcaagtctctctcggaccctgggccgagcctcctcgccccgcccgccccaggccccggatgtgacggcaccgtcgcccgcagcgctcgccccacgggccgcgcgtggagggtcccggtaggtggcggggggagggggtcttcccgccggcccgcggcccccacgtacccaagtgaggaggctctcgcacagctccgcccgctccagcgactctacgctgaacatcttccccgccgcggccaggcagcgcctaccgcctggccagacaccgccgccgctctgtcgggggatccgggggcccgcgcagctgactcggcctcaggcccgcctgctcctcggatccggccgccgactctcgcccagcgctggcagcggctccgcaccgtcacccccagcgcccctccttctcctttcactcgggaccgcgcgccagccgcgcgcgacttcggacacgcccgccgccccgcgtccccgcccccggccgcccacaccgctcctccccagcgccgccgccctggctggagccgaggccgaggagccactgcgcacgctcgcgccccggccgacccgcgccgccgcgccgccgccgccgccgccgccgccgccgctgccgccgggcgcgcccccgccaccagttcgctgcgtgtcgaggcgagcacgcgctccgccctggaggctgcggcgacgggtcctcctccgccgtccggtcgcgccctcgcggaagctcggcagtgcgcgtgcgcccgcacccgcactccaaattagaaaggggacgtctagtgggttgcccgggaggggtggcgggagcggtcctggaaataatctgtcctctgtcgccgggaactggcgaggtagttccttcgcggtggagaggtacgtccggcgcgcggcggccacgcccaccctatcggggcccgcggagccgcggacggcggggtctggccttcttggggtagctctggccgccgaggctctgcggggcggcgggagtcgccgcctccttccccccgggcccctccctcgtctggaagccccagaatcgccccgcggctgtccggagtcgccggcgacggtggaggggccgacgcggagagcggctctaggtgggtttggcggcggcgaggacaccgccgctccctctagggtcgctcggagcgtgaccctgagaactctccttaatgcaggaggggtgtgcgcccgctcgccaatccgtaaggacaccggccgaccccgggcctgcgtttctcagcgttcggagttgccttcgcttaatggcgaggcggatcgttctggagcttccacctctttagaggcacgaatctgtctgctgggctgccgataaatttttaacagatatagcatacgcagaaaagtgcatacgacatacacgtttaaagaagaattaataaaacacccagataaaaacgaaaagggcattaccggcaccccaggagtttctcacccatgccctgtgctcctttcggagcctgattgtctcctagcctgactagtgtgatcatttccttacagctttaccatctatgtgtgcatgcgatgtcgttttcctttgcctgtttttgaacttttgcgggtggatcacagtgtgttgttttgtggttttcaatcagtattaaattggtgtactgtgtatgtataggtaattttaattgttgcctagtattccagtgtgaatagaacagtgaatccattctactctggttgggcattttgttcagactgaggccactcagaacatggctataaacattctagtgtacctggaacgtagtgcaaatatgttggaatttccaggacatgcactttggagtccttagagaattgtcgatgcgtagagtatgcataactaccacccaatgccaaatttttatttggagtgcaacaaagctaacttcccaagacacactttgctttgtagttcctggaacccctttcccccactttttttccattaagagtaggttttctcattgagcactgaaaactgccaagacagcattgagtggggttttttgttgttgttgatggtggtttttgagaaagggtctcgttctggagtgcagtggcgcaatcttggttcactgcaacctctgcctcctgggctcaagtgatcctcctacctcagcctcccaagtagctggaaccacaggtgcaggccacgatgctcagctaattttcttattttttgtagagagggggtctcgctatgttgcccaggctggtctcaaattcctgggctcaagtgatccgcccgccttagcctcccaaaagtgctgggatcaaaagtgtgagccaccgagcctgggtcagcagtgagtttttaaggttgccttacagagtaccacttgatagttgacccctgatcatttagcattttgtaagtgtaaaaaaaaaaaaacttacctgaagtattctcaatggtctttttttcaaacattcttccctacac

SEQ ID NO: 587543 - DNA, 4001 bp, Homo sapiens
gcccatggtgcagtccatctcgaggcgggctgccgggctcctgtctcacgatgccgttctctggggccgtcttctcccaggttggggtgcccttcaggaagctgggcgtactctccatcactctcctgccctcatggggctctcccagaggggggtccctggagcataaccatcaaagcatgagcttctggggcacatgtcccaagcaccttacagcctggcacagagtgggcaccgccctggcaacactgaggcagctcaaaccagtaaggcaagtgccagcccacaactgggcaccatgctgcctctccacatgcagccagacacatcttgctcctccagtgtggggatgttaccccttccccaaattccacctgggccagtgcccctcagcggaggctgccattgctagtagggcatgtcctggcctcaccaagctaggaatctgctcacgacccatgagggaggacagaaagtggaaggcactgaatgaagaaaaaggctggatcctgagcctgactctgtcctatgctgtatggccttgggcaaatcatgtcactcctctgggcctcagtgtgcccttgaggcttgggtcggctcagaggattcttcccatcctgcaatccgtggttttgggggtgctgctagcccaaccctagcctacagccccagccaggcttgtagccgtgggaagtgcaggcctggcaggctggagtcgctggggaacgctgccagccagggccgctggctgtgtctctctctacacctgggcggccctgagtcagcctcttcccagagccctgcagtttctcggcttctcaagcagagtcccaggacaactgcagggggctaggaaccccgccctggcccccagcgggaagagcgcgccggcacaggggagggggattaagaagcctcagctggatgggtcaagctgccctagcccagccagcagtgccagggcagccgccaccgccgctggaaacttcagcctggcggggaggggagagggaaggaggcggggaaagcgggctgggccccagagagaggcaagggagggaaaattgaacgtgcgtgcaagggaccaggatgacaggtggcactagagcggcagcgctgccttggcgcggtcccttcggccagagcgacgaagccccaggcgggaggtgacggcgcagtggcagagggcgcccaggttttctggagccaccgctccgccgtggtctggccgcgtcgggcttcctaactttcaggtgtcagaatgtgtggcccagcccacaggggcacggggaacacgctccgtacgggcaccgcaggctcggctcagaaatcccccgccacgagtgtccccagacggcgcgctcctggcgcttacctgggcttcaccggccggtcgcggcgcgggcggtggcggtcgtcgtggccggcaccgggcgcctgctccccatgggccagctccggggcctcccggccggcgggcgaggacgcgttctcccgctctgtctgctcagcgcgctcgcgctctccttcccccggggcggcgggggcgctctagggccgcaggttggaggggtcggactccgggatctgcaggatgcggcacacggcgcggatcggccgcaccagcttctgggccgaggccgtaggttgcgccatgggacgccgagactccgtgctgcgccgcggggagggccgggccggggctagggagcgggtgcccccggagggagagaaggcgccgggccggggggaacacgcgccccgggtcggagatggccgagttgggggaaaggccgaggggccggggaagggggtcgtgcctggatggtgggggccgatcctgggacccaggagagaggcaccggcgagggcgcagcaccgcgcagcgcggctaatggaggtagagcgcggcggagagcgcagcaggacctctgatcgccatcgccagaagcgcaactgagagtggggaagctgctccgccggtttcctcctccagcaccctgcgggaaacaggagcccgtgattcggcggccgcgcctgggcctgccccctcccgggccccgggggcttccgccaacgccccggcgatgccaccggctgcgcacggggagaatgagccctttgttccccctcccccccgcggcacccgggcgcctgccgagagaggctcccccggggcagcgtgccagcttcccagccgccccaccctcccgtgggcccggccccggagcctggcaggcgggcggcacccccactataggtgccaagcccgggaactggagcaaagggcgggaggggccggaccaggccacggttgggcggggtgccccccagggtgctagggcggggcggctgggagggggcagtgccagagctggcaggggcagtcgagttctcacgggtcagtgatgggcgctctggcccacgccaaccgggctgtgcctgccgggccactggctcctggtcctctccatctgtggcacatggcacgccccactggcctgtgtctgccctgcctcatcctcacctggccaagctgctctttgccatcttccaccccaaacccttcccaaacctcttccagagcccaagggcacaaagggttgcgtcctaggacctctgggagggcctgggcttgggtctgtccctggtctaagggccttgattttgccaaatgtctggagaggtcatgggcccagatgagctccgacaccggctccagaccccgggctgtgagggtctgccccatccccagggttcctggtgcttccaggccaggggctggagaggcgcccatgggagtggctcccgggagagtgcagagaggaggagaggaaatggaaaagcagggcaccctccacccgaggaagcatcccggctccgctgcgggggtggttccagtgcagacacaaacagacagattcaaacacacacagacagattcagactcacacagaaacccacacgcccaacgggcgcttcccttcccctcaggcacccacctcccaccctcggctcccctgcctccctgcggaagccaaccttggcctgcctgggacagaagctgcactccctctttcccatcccttgcaagcgatgggttctggatgcctctagcttggtcccaagtcacaccaccatccctgcagaggggagccctgaatagccaggagccttcctcctaagggatgagcaaggcctagagccttctaccggttgagaagagtgggggtcctggggagcgggggtctaaaggagcgggcactgggccggacttgggccatgttggcatccattcaccctgcccctggcctgcccccagaggccagttctgtggcaaggcaggctggtaggggttgtttacatgactgagttagtaacactcccttcctccccagctcccctgagggtggctgggacctgagtgtgccaggggagatgcttgtagagggtctaacatggactggaggccccaggccctgaggcccggcctcccactcccaggctggctccaggggtgaaggtaagggctggggtgtgtctgtggtcccccatctgtgttctctgtgctccctcctcagcagccgaagcttgtgggagtgccagggggagattcctgcggcttggggcctcggagaggccaagatgggagcctgcgctgtccagaaccctgaggacctatcgctgacatccccaaaggggatggggactatcccaggggagtggggcagatatcccccccaaccccagttgccatgtctgctttgtcaggccacggtccctggactagagtagcagggctcttggggacaggctcctgaaaagcccaggggctcgtggggactcgcgggatgggaggaaggaccccttccccaccctcgcccagctccccatcccgctttggagcccatgccacaggcccacagagtccttgtagccggctgttctgtgcctgaagacggagcagagctgaggagacacacaaaagacacaaacacaga

SEQ ID NO: 587544 - DNA, 4001 bp, Homo sapiens
cagcctgaccaacacagtgaaaccctgtctctactaaaaatacaaaaattagccgggtgtggtggcacctgcctgtaatcccagctacttgggaggctgagacatgagaatcacttgaatctgtggggtggaggttgcagtgagctgagattgcaccactgcactctagcctgggcaacagagtgagactctgcctccaaaaaaaaaaaaaaaaaaaaaaaaaaagggatagtgcccaatgctgctgagtaagcatcagtaaatgttagcaatgatgactctaccccgtttgattacattaaggagaaaaaaaatcatctttagaaaacaaattaaaacatcacttgaaagtttttaattaaacttttttttttttttaaatagagatgggggtctcactatgttgcccaggctggtcttgaactcctgacctcaagcaatcctcttacctcggcctcccacagtgctgggattacaggcgtgaaccacagtacccggctaaagaaacatcactcttaacaaagagagagcaggcctcaggttttgagccaactgcaatatctagctaaaatttaataatacctttttttaattgagtttattttttactattactttctattgaattgttttctatttagtgtactgttgtaaagtttcctttttcaattaacttgttaaataaaatgaagtgagccatctcaaagaaataggttaagtaaattataagtgatatacagatttggcaaacaaacaaacaaaaaagacagaagtagcacttgaattatgaaaactttctccccaaaatctttataccatgcattcttctacctccatgccctcactcaagccattccctctacctgacttctacctccatgcccttcactcaatgacttcctgttgaaatccttaataaattaatttaaaaatcaaactttacaacactactataaatgacaaaaccaaccttcaaaaccaaaggactacctctcacaaggaaccttcctaaatcttctttttcctcttccaccccaagttaaaatcaatttgtcttttttctcctttactccctaccccacttgccctctcacttctactgcattttatttatttccaagttttctataataattcctgttctgccacatctcagtgccttttctcacagcagtaggtttaaaggagggagctgttgatggggctcttttcagttgggagagaggcagaccaagtatgaagctaatgaaagaagttggtcataaaggactgcatgttttatgattcaatttataggaaatgtccacaacaagcaaatccatgaagatgcaagtagattgtcaggggccgggggagaggagaatggggagtgaatgctaatggggatgggatttatttttggggtgatgaaaatgttctgaagaaagtggtgatggctgcacaactctgtgagtatggtcaaaaccactgaattgtacatgttaaagggggtgaatcttacggtacgtgaattatatctcaataaagctgttaccaagaaaacaaaaacgaccccctcccccaaaacaaaacacagggtctgaaggcttctaactggggagagctttctggcaggctgtgctccgcagcgaggcagccccagaacgagcaaagtcccatggagtgcaggttcctggtcccatcgtggctcccaactctctgtgggtcttcgggcgcgttgcttactttccaggctcaatttccttgcgtgttagctggggctccggcccggagtggccccaaccccgaatccccgaacccgcacgccctgggtccgacacagcttccaccagccacgttacctgtagggtccaatggcccctggggctttcgcggtgctgatcacccttctgatcaaggacgacatggctaagccttccctcttgcagccccttcaggagaagaagccccagcaccagccctgctggcttcttactggactgaccaaccacagcagcgcctctgccccacagctcccgctgggggcgggctcgtgcggcattctgggaactgtagtttcggcgacgctccaggccacgtggaggaagcgcccggtctggcgcatgcgctctccagcgcgctctccaggagctttggctcggtgggtactgtcgcggaggcttgtcattctgacccggggattcctcacagcgtctggcaggttggtcgtgaggggctggtgccttccaggatgcgagtgtcgggggaactgtatgcggcggcccccctcccggcgcccgtctcccctcttcatcgtttctctctcagactccgctgacctctttccttgctgcctgtgcccggggcccctctccctggtgtcgcatctccttcggcccctgcgctggagccccctacgtcagtcatttcccttcattgccccgccgggtggaggccgtcctgggaatgggcttgcatcccctcttctgcaaccccaaatgactaatatgggtcattctggcgaccacgctgagatctgggcgttggtcctcccgtgttccctttcctgctcctcctgtgttcccttctctagggtgctcctcgggctttacaaggtcactgtctgaacagagccctagtgattgggatatcatttcagaaagaaagatggtgatctggaatggcccagatcccttgtaagtattctgctgtgtcagaaggggtggtacttggctaaatatttcttatcctgttaatatttgcattgtaagtacgcttcgtttcttcatttatgcgggcactcatagatatatgagtccctactttgtgtaaggcactctgctagatgctaggaggaatgcaacagttaaaaaaaataataataaaatctctgccttccctgcttcctaaagataatacaagaaaatctgctttattccctctcattttgtcctacatactgctaaggttttggccttcctacttccggctcaggaaccttctgatctttttcattggtttggggcctggaataaaagacctttcagtctggcctccccttgcctattcaagtttcattgtcatctactcccttttcccactagagtcctcctgtattcacactgtggattcctgaatactctttcttccttatctgtgcaaattccagctaactgaaattctattttctctttgacttttcctaccaattcacatttttttctttttcttctttccttcctttccttttctttttctttgttttctttctttcaagacaggatctcactctgtcaccctggctggagtacagtggcatgatcttggctcactgaaaccttgacctcctgggctgaagcaatcctccagcctgagcatctcaagtagttgggattacaagtgcacaccagcacgcccggctaatttttgtattttctgtggagacggggcttcttcatattggccaggctggtctccaactcttgggctcaagcaattctcccacctcagcctcccaaagtgcagggattacaggtgtaaccattatgcccggcctcattttttttctttcccttgtcctgtttcctattgtgctgtaccgcataatttagtattttattatatgagatcctattttctaattgttatgtgtttcaagaatagtggattggagagggaaggggtggaaaaaaaaaaaagaatagtggatagagtcagactgcctggtttgaatctcagcacaatcacaagcttagtagccttggactggtatataaaatctctgtgcttcgatttcttcatttataagatgagaataatactagtgaccacagagttgtgagaattaaatgaataagtcatgtagaatagtgcctgccacatcaagttctcaatgctgcctaagatgacaaaattcttattctactttggaattatacacagcctgaaactattgggcacatagtaggtgcccaaaagtttattaaatctgattaaactagataattaagacatatttttat

SEQ ID NO: 587545 - DNA, 4001 bp, Homo sapiens
gcacgcacctgtagtcctggctactcgggaggctgaggcagaattgcttgaacccgggaggtggaggtcgcagtgagccgagatcgcaccactgcactccaacctgggtgacagagcaagactcggtctaaaaaaaaaaaaaagaaaaaagaaaaagacggataaaagaagacagaaacatgggagtatttcctttgcacaagaatccaaggtctagaatgaagagatggtgaaatgaagccagcctccaggaaggtgcactgtgccttaatgggacctggggatgggaaggccaacacagaggtgtcagcgggacaaacacaaagtgtttctaacaagagcaaagatttccagtcttctctttatttccaaacactctgtaggtaaagcagagcctcagtaaacccaagaagcagaaaacctggcctcctgcctggggcagcttcagtttagacttttcttcattcctaacagcataaagaggctgtgcaaatgggaggcactcagcagagcctgaagaactctggggtcttagctcctgggaggccacacatgcttggtggcaccctgccggtcacggtgcctccaaaagctcccaatgatcagtggcctttcttttttttcttttttttcttagacagggtctcactctttgccaggctgcagtggcgggatcttggttcagtgcaacctctgcctcccaggtccagggagtcctcctatctcagcctcccaagtagctaagaccacaggcaagcaccaccacgcccggcaaattttttgtatttttagtagagctggggttttgccatattgtccgggctggtctcgaactcctggcctcaagtgatccacccgcctccgcctcccaaagtgctgggattacaagcaagagtcaccccactcggccagtgtggcccttcttcaggtcatcacttgccagccgcaggcggtggctctgcccctcaccggacacgacgtcacagccgggatgtgaacagcagattctgatctccaactccagacaatcactgatttacttctgcaaaccggagctgtccggtcttgcagggtcggaccatgtaaacaagcctgctgccaggcaactgaagacagaaacacgaataaagatgccccataaggaatgaaaaacaaaactcctcttgggaaacccagatttgggattcggaaacgggcttgagatcaacctgaagcttcatgacgtcttactgtttccactgcctttcctgttccactacagcaacgccctccacttcacgtgccaagtcctgactttctcctaatagttgccgacccagcaccccgtaggctgtcccctggggacgccgatgtcctctggggcatagcgtccgctggcgaagccgggtgcttgccctaagcgcggacacttccgcaaccgcccaacagttagcagaagcccaatacaagagacgccccattctccccatcccagggaaacttcgctggggcaggggttgaaccgagtgtgggtctcgtagccgctttcccaacttaaggctctgggtctgagcaggctcgggacccgccgcccttctctggcgggggcagggcaggctcaccgcgcgtaagctgaagtgcggcagggcccctccccgcagccctcccgcgccgtccgccgcggccctgctccctcccggtccccacgggccccgcgcccgcgcgctgccctcaccgggctccagcagatgagcgcgtcggtgtccgggtcgctcacgagggtccacagcttggtcaggaaggccgggacgttgctgggccccgccgcgccggggcccacgggcagatccatctcgagcaaggagggaataggcggagggagcggccgcaaagaggggccgagggccgggctaacgccgtcgccgcgccagccttccgggccgcgccgccgcccgctgcgcacacacagccccggggcccagcatggccgccgccatcttgcaacgggcgcgctcccgccgccgccgctgccgccctcccgcgtcacccccggcgcgagcacgcaggccccgaccccgccctggtccccggcccagccgcgcgcctgcgcgtgttggtcccacccccttccctccacccgccaatcggggccgggctgggcggggcgcgtcctcctgcgcacgcggcccggtcgctgtcggaagcggctgtgcgggtggcggccggcgcgcggtggggcatggcgggttcgcggggtgcggggcgcacggcggcgccgagcgtgcggccggagaagcggcggtctgagcccgaactggagcctgagcccgagccggaggtgactgtggcgatgcggggcggcggggcgcgtccctagagggcccggcgggcacgtggccgcgctggggcgggtgggcccggcttctgtcacctgggcgcccgcgcccagtgaatcggtcttgggcgtgggtgcagctcctctatcggggggtctcaggcagagcggactgcggggtaaaggacggcgtccgggaagcaaagaaacgggggagcggggagtggggacggggcgccccttgcagcagcctctccagccgttccatttgtgcatcctgccaataaaagggctcggcttgcgctcccagtaaatgcttaacctacgtatacgctagttaattgcgtttttatgctcatgggatagacatgagaataagaaaacctgaatagaacccagtgtctgctgcatttgctgtattagaactcactgttgctctctgctagctcagccctgtcttggttgtggggatcatcaaattgggtggtggaggggatggacagccagcccctcacagccccctcggccgcggccgcgctgggttgttgaaactgccccattgctttgtgaagcgaattcaactcatcctggctcccatgggctgaatggcccgcaggccactctaggcgccaggttctgcgacttccacccttggactaaacggtcctcaggagccagttgtttgcgcccaggccacggatgccatttccactagttattgtgattgtgtagccgactgaataccaagacacatcatgactctgtgtgagagaggcattgtgtgaacactcggtatgcaatagctaatacatgcaggtcgtaccttaagtgagacttgtaaactattaggaaaacagtaaaatctagaattctgcattcaactgcttcctttttcttttcttttccttttctttcttttttcttttttttttttttgagacagagcctggctctgttgcccaggctagagtgcagtggtgcagtcttggctcactgcagcttccacctcctggctaactcagcctcctgagtagctgggattagaggtgcccgccaccaccagctaatttttgtatttttagtagagatggtttcaccatgttggccaggctggtcttgaactcctgacctcaggtgatccacccgcctcagcctcccaaagtgttgggattacaggagtgagccactgtgcctggccttcaactgcttcctaagagtctaagttcttgttccaccctttaaggccagtgaaggacccgaacactgtgtgtgccggtgtcacgcagccagcagggctctgctcagaggcagctgtggtcctgctcagagagaggagtgggtgggttggtgcgtggttgcggttagagtctctatcattcctgtgactcttcagccaatcctttcaatttactgatcaatcgttggtcccaatctggttaaatgaggaggcgtctgcttcaggtggtaaaagccctttggggacccatttctcttccagcccccagccccttttctagtgacctcttggctctggggccttggatgccagggtgaggtgtggagagggctcaggcaggctgtctgagggacccagtggagtccagcccagcctgaccccacagggcctccggagtgtcagtgggtggtagagagcagtgttagttttgcgatgagagctgagctccaa

SEQ ID NO: 587546 - DNA, 4001 bp, Homo sapiens
atgagccaccgtacccagccttccttcagttttctcagacatttcacttttccctggctatgcgtaaattttctccatgtatcagtggacttggcaggtacagggccccagccatctcttgtgagcatggttgagagtggggtccagctctccttttccagggacactgcttcttcagagctggttagtgtagcagcccatgggttctctgctgcgaaaagactgaacccaatcctaatactagaggcaaaagtcagcctcttaccacagtatcaaggacccaggcaggagagaatcaaagggctctgattctggcttagtttccaccgccaactggcctcgtaacatagtaacataggacaaattaaccctgctctctgggtctggatttccttgtatccaaagtgggggctgagcaagatcacaaccaaaatgcctactaagctggatgtggtggctacacccgtaatcccagcacgtcgggaggctaaggtggcagatcgtttgggcccaggagttcgagaccagcctgagcaatataacaagacctcgtctctacaaaaaaatacaaatattagctgggtatggtggcacctgcctatagtcccagttactccagaggctgggttgggaggattacttgagcccagcagatggagctgcagtgagccgtgatctgtcactgcatttcagccctggcgacagagcaagaccttgtctcaaaaaaagaaaagaaattgcctactagctcttatatctgaccttaaattttgtctgtggcaggagggggaaaaagcaccagccacctaagtgggcagggggagctgggatttagaagtcagcatccttgtgcctctgctctttggttaaatgaccttgaacaggttattcaacctctttacgtctcagtttcctcactggttttttaggattaaatgacgcttgcgaagggtctggagcaggtaggcacgcagaaaccattagctgggacagtggaggtcttcctcctcctcctttacctgccccacagctgcacgtgaaccaccgatggcgccaccttctccaccaccgcggcgatgaagttgtaattcctcctgagcgggcctgcgcttctggtccctatgaaaaaatactggctcaagagtacgcctcgagggaaccagacctgctatcctagttggaaaaatgttaaaggcaagacagtgttcaaaaggtgcatggggagggagaaaccacgtagcagccggtaaagagcccctgttaaggaggaaaggaaatcaggaacacagaggtgtcgaatccaggaggcaaatgacgcaggaggaccaggcgcgaactgtgcggtctcagtgaggtcttgttcctttacgctcctccagagttagaaagtgttccgagggcgcgcgcccccgcggctcacctgtatccccgcagttcccccactgcacaggcacggccgggaccttgcccaggcggcgcgcggcgcggttttcggcccggagcgcgcacatgctggggtaggtgcgcctgtcgctgccgcacacggcccctcccagcgtcgggcaaccgcaggtgctggggaacccggggcgcagcggctggaggcactgcagccccggggcgcacggttggccctgcgccccgccgcagacttcacgctcggccgcggggcagacgcggcaacagcggcacaggtcgaacaccggcgtggtccccagcgcgcaggtgggcagcgcggggcagcgcgtgggctggcagaccgcggggcaggagggctgggtatgtagcttttcagccccggcccagaggacgggcaccaggagcagcagcagccccggcaggaggcatcgtcccagccccgcggtccgcagctgaggtctaatcatcctgttccttcctcgcttccactcttcagtgactttactctggacctgcaaaccctcctaaatgagagacactttctcccggccacggcgccgcctccgccggcccccaaactttaaggggcagagcctggcatacctctgcatatacacacccgtacatcccctaccacccgcccccgtcggcgccccggagccaggttctcccccaggcaatgaggggaaggtctctagccctacccggagcaggaacctacctcctgaaatccctaaaaccgacaatgagggcagactgataagaaagctcacccacccatggtcagaaggtcagtattaggaaaacacatgaccatatttcagtatttcacatggttttattacaaaacaagccacaaaacagttttagaaaatttttgctacataccaattaggagatcacataaaatgagaagcgtaacagtttccatgcactcagcctagagcttacagcgagtgcatttcacagctgaaacatcactgctttaaaacacagaatcatgctaccccttcataagcagagggggaggaggtcaaacagtatgtttttgccaaacgtttgctttatctgaactctatctagtatgaaggactggctgccgcaggcaataacacagagaggaaaaggaacaaaggaagaaaagggtgctggcagacaagatttaacaaacctgtccacttccgacattttgaaagtttataaacaaagctcacttggggacactcaatttccaaaatgctgtgacctccacatgttatctaatttatactgaaaacaaacctactaaactccactcctcaactactgaacctgctatttattcatggggtctttttagcccatataagagtatatttatattcagaaatataaaagaaaaaaaatttgcttcaagtagactaagaagctggaccttaaaactactttctttctcgtgggagctgagtattcaactcagaaatagatgtataactccaatattctgacctgacatcaatctccataatgtatacctcaatacccttatgatgtctcacttaacactaaaggccaaattatttttaccaaccatcagctgacattgagtaagcaagtcttttgaagatttcaaaagtaatagatggtggccaggcgtggtggctcacacctataatctgagtactttgggaggctgtgaggcaggaagatcacttgagcccaggaggtccaggctgcagtgagccatgatcaggccactgcactccagcctgggtgacagagtgaaacactgtttctaaaaataaaaattaaagaataatggatggcattattcagccatggggaggaccacctgaaatactgttacacacagtgggtcaagaccacttcaaaagccttatgaaaatagcacaactcaggcaaggcttttattccacaaagaaaatgcagtacattttttagttcctttaaaaaaaaaaaaactcagatttactccagagcctatgcacttagtcactaatctatactgcatccccaacctattttttccatttggttcaattttatacatttaaaactaactgctttggtcaaatacgtaccatctttggttcacattaaaagattatggtccaaaactggccagaagttaagaaatatcaacaaaataggaagtttgaaatacaatttaggaatggaatgcttttagagcttgtttcattgaagataataatttatctcatattgaactacattaacgatgttctggctaggtgcagtggctcacacctgtaatcccaacactttaggaggccaaggcaggaggatcacttgggccaggagtttgagagagcctgggcaacatagccaggctctgtagataaaaaaaaattaaaaattagccaggcgtggtagcacaaccctgtagtcctagctacttgggaagctaacatgggaggattgcttaagcccagagattcaaagttatgatgaactatgatcacaccactgcactctagcctgggtaagagagtgagaccctgtcttttaaaaattaaaaaaaaaaaattaaaaacaagcaatgctctaatgtggaattccca

SEQ ID NO: 587547 - DNA, 4001 bp, Homo sapiens
atctgttctacaggtattcataattatcacagttgttgcatttttaaggagaatcgaatatctgagaaacaaaacccatgatacaaagtttagtagtttctgaaaaagatggttttattgtaccattgataagtacatccttgaaatcatccagtcccagcatttttgtagatctgcgggcaaatagcaagtttgagtattattgttttgcatgaataaagcaaactagtgcttttggcaataaaattaaagtatacttttcattttctttaattaacaatctgaagaggaaaattagattggaaggaggtagatgctttaaatttgccagtatcaccaaattgtttacaggatttcatttctaagcacagttaggttgaaatctctgactaaacatttgctgtgtttaaaggtgctctctagtatgtggactgtaactgtttgagctacaaacaaaaatacactcgtctacagaattattataacatgttcatagaaatcttctcctggaatcccatgtaccttgttaaactgaagattgaaagaaagaaaataagcaatgtcttattatcccttcttaagagaggcagtgtggaataatggttttaagatcatagactctggagacaggctgcttaggctcatactggcctctggcacttgctagctacatagtttgataattacattctgcatgccttatacttctcattaggaacatgaggataataacatacgtttctggccgggtgcagtggctcacgcctgtaatcctagcactttgggaggccaagatcggtggatcacctgaggtcaggagttcgagaccagcctggccaacatggtgaaaccccgtctctactaaaaatacaaaaaagtagctgggtgtggtggcaggtgcctataatcccagctacttgggaggctgaggcaggagaatcgcttgaacctaggaggcagaggttgcagtgagctgagatcgtgccactgcactccagcccaggtgacagagcgagactccatctcaaaataataataataataataaataaataacatacataacttttgggatggctatgagaatggaaagggttaatttgtaaattgcttagaaaaatgctgtatttgataattaaaatattgatgataaattggtttacatagcattcgttagaagacagactagaaaatgtagtttttaaggcaaaccttttttccacataccttgtactttataggtaagacttgcaaacaagaaaaaaggtagttcagactctcacttgaatcttacgctcagtaaataacaagcaatgataatataacatggaaggtgcttgatgtgcaatctcataaaccccatcaaattagaaacacatgttttgcataatttaagttatatccctaagagaaagggatttctgtttgactcatggctcatttaaaactctggcttttgcaaaacaccttttctcaaaatacaactgtaataacctcattgtttgtattttactatataattcttatgtaaagctgatacactttctatagtttcctttctcaccactctccgtatccatgttaggtaagtaagaaatgcatagatgactccatttctagggagaaaatgtaagacaaattaagtgagatgcagttattacagctctctaatttttacacagctttatgtgtttgtttactagaagttactgaaccacagttgttcagtagaagttaacttggccaggtaaggaatgagaagaagaatgcattttcccacattttactgccttctcttacctgtggatttggcagagcaaagcccacttcttcatcaatatggtactctttactgattgtccaggagttttccatagcgtgtgccattcttgtagtctgctcctctggtgcccctcagtgtctgaagagttttcagagcatcttataatagttgctgccacagccagtgaccacagtttatcacaggggcagtgagaaattacttccacttttggaatggtttcattttctagtttctttgtttgtaatatgaaaaccaataaaaccacaaaagcatctctgtgcatcatatgtacaaactgaaagttcgtattccatatgaaatttgtaatcattaagcacatcattttcttactgccatataggaagccagaaaggcctgaaggaaaacacagaactatgaaaacaggtggccggagaagaacattttactttatggaaacttttaaatctttgaatgaaaatgaaggctgcagtcctaaactctcatttagttatttctcattggcttccttttaggcttccacagttctttgaaaatattagtgtcatgtttcagcagcccggaaacacaacctgtgttatactcaactattagtcaatggctctgaagtaggaaaaaaatagaagcacatgaaaaattagaaacatagtaactctccacttccttatttttcctattgggacttttgtcagtttttccaatgatagcatttgcccttctcacatctctaataagtaacttttaggaagattgccttgcatctaactgtacctgactgcggggggctgatgaggcaacagtctggcatatttgggtactttgtaatatgtcaaaagttggagaaaaggataaaataccttgaaaatgtttttctcaaagtacaaattaagactgcatttggtaaaggttttcagcttgcatgcaagtctgtggttcactttagaggcattgttcaatcttaatgagaacaaggaagctaaagaagaaaccaagttgcccgttcctctagatgatcaaaaggagaaaagagaaatagttcgtgtgagtaaactaaaagacatcgctgttttgtcatcagcttattagtacttgaaataaattaaattgtgatagcatatggctttcgttacagtctagaatagctctcgcgctattctctactaaattatggctgttttcttcaacctgtcattttacaggaaaatgttccttgaataggaaatgtaaggaaaactgaaaccaaaattatacagcaaagagaatacaatgactgtgtttcttatgactacatgattcatgaggctaatactttgggaatcagttcaaggaaaacaaacaaaaaatcatgaagacctatcatatctatatagaaaacaacactacaaataaaatattgagcattagaaaatatgtggttatttttcattctttgtacttgaagtttttatgggtgagtcaaagtgaagacatggaacaacgttttagatgattctgtcccaggattaagtttttaagaagcataagtttttgacaaagctttttcttgattccgtttatccagtcatctcactaaatctatcctaccccccggtgtggtggctcacgcctgtaatcccagcactttgggaagctgaggagggcggatcacttgaggtcaggagttgaagaccagcctgggcaacatggtgaaacccagtctctattgaaaatacaaaaattagctgggcatggtggcatgtgcctgtaatcccagctactcgggaggctgaggcaggagaattgcttgagcccgagaggcagaggttgcagtgagccaagattgcaccattgcactccagcctgggcagcagagtgagactccgtctcaaaaaaaaaaaaaacaatctatcctacccttgactgcagaaccaataatgctttagtgcctcaatgttatccctagccacttaacttcctcaaactttggcttctttgctatttctgaaactacattctcaattgatcttgtcttcattcaccttgattttcttcagccatacctacacctccctaaaaacctcatttcgcatatttttagaagagcatcataattttatgatctcatactgattcttcatctttctccttagcttttaactggtgatcaggttgttatgttagaaaactcctgaaagccagaactcagcgttttgctcta

SEQ ID NO: 587548 - DNA, 4001 bp, Homo sapiens
ctcactgtaaagtttgacccacagaaggaggaggtgataaggccttaggggcctaacactgccagattgtctatgcataccaaaaaggaaggacgacttccacgtttattttcttctttggaaattatagatttcagtttcaaacaaatggaacaccccctaattagcatggaccaaatttatcttcattttctctttgtggaggctaaagcaactccatcttggatgctaatccactgtgttgacttctgattaactccagttctaggaatgcctctaaggttactacttaatctactcttaagagcatgtacttgccgtaaatcctgccgttaagcaaattactgcaattgtctttccctgtggtatataagccctgggtctgggggtaacagtgtgaggatccaccagctcatctcagggcagatatatggcttctgttcttaagtccctattaatttttctttttctgagaaactagatttgacagcctctttcttcagcctgtcagcctccttgacttttgggggtgggtttgcagagaattgttcacagtggaacacatgtttaagctaccatctttacttcctcctttccatgtgtaagatttctcacacattttccaagattttgcaatgacttgaattaaatctcttttggatagtttttgctctatcataataccagacctcaaaatcaatagcagggtaatttttttcatcaaaatgcatctacagtaccttgtaaaatagatgaccttgtaaaatagagccagatcctttaggtagaataaatctggaagcatattcatatttcctccagtacatttctggtaaattgttaaacctgtacttactgatgttagtaggtggatgcattctatcagcaagagaaaacttccatcatttggataatacattgtaataatatctccatccctggatatactaagacctctttcagaagttttgtggatacctcttctggatgaagtatgttcattattgcccttttgattttcagttatgactgattttaacttgcacatagttaaagaaggtataatacttcataatgtacatgtctgaaaatacttcaggttttgctgtcttccaaaacaattgctatttcataatctgccaatactactttatgtggtgttcttgactgtgccattgtcaaatgtgtcctcaaaagtaatgcacaggctgggcaaggtggctcatgcctgtaatcccagcattttgggaggtcaaagcaggtggatcacttgaggtcaggagtttgaggccagcctggccaacatggtgaaaccccgtctctactaaaagtacaaaaattagcagggtgtggtggtgagcgcctgtaatcccagttacttggaaggctgtggcagaagaattgcttgaacctgggaggcagaggttgcagtgagccgagatcatgccactgcactccagcctggcaacagagtgagactctgtctcaaaacaacaacaacaacaacaacaacaacaacaacaacaacaaccagaaaagtaatgcacaaagcattcagcccatggaccaaacattaaatgcaagtacatgtgcactttgcaatttctagggaaacataattaggaattttacaatagagaacagtgattttccaattgagttgctagccccaaattgtcagtcttgatgtttacattatgcatacgaggttagaaaagaagttaccagtgtacttaccataataatgaaaatgcaacattcttgtggtggcctggtgggtgaagtgtcaagcttcatttcctaagaaggttttcattctgttctttaggtgtccattgccttctgtattatggtacatttctaatgtcaaatctaatccaatccttgtctttaaaatatttataaagctccagtgtaggaggatgtttcaactggcagtgcattttcatctcattgtggactctctgtattcttactgctttcttaactatcatctggactgaaatttccaaaccagtgtgtatggactcaactttgcagacaccagcaaatgatcccttaccaggcagatttccaactttaaaattctccatcttctttctgtggcaaagtcacaatatttccaggcaccagcctttgcattcattgggctcagttctctggctgccactcctatggcaaaagtacaaccacctcagcgtctctagggcatcttccaaggccagggccatgtctctgagctcttgtttttaaaagcttgggcccttgctccacatagcagtaatgaagacaaaaatgagtcttcttccaccccacctccactgctcttttattgctacaacgtaataaaaagtcatgcatgagttgggaatttgaggagagacttgcgcagtcaattatccaatactgtgatagcaaagttcaaaaggaacctagttcccttgtaaaagaacattttccaagagaggagattgtattgtgtagcggtttgaagtattctgcagtcagattgcctgggttcaatcttttactttgtcatagctgtgtggctcttgaaaactactgaactatattgggtatcaattcccatataggaaaaagaagtactagtaatagtacctgtctctagattcattgttttgatcaagtgattaatgtatatgacactttttggacagtaagaggcatatgaaagaattaagtaattattagctatcatcattaatttatagttttaaaaagtagctctcccagaagattctatatattagatgattctgatgctcatttacaacatttatatgtttatgtttacttcttgcattatatatgaggctaggtcaacaagcaacttatatgtttgcttatttatttaatgctgggcattcaggagaaaattttcaatgaaggtacaccaatcaattcaactttaaagttaagtatcaaacttacctcctgtaaaaaacattcctcaacttttcaaacagaaagaatcattttctattttgtgcctctatcacacacaattttcttgttagtctaacgattacagaggtaatcacccccaaagaaacacaatatgatgtcttgtctctgtatgctaattgagattagagaaagttaaaacatttttattgatatttaaatgtcaagcaactgaaagagtgagtgtctgtgcaaaagggagttgagctgtatatgtgttattgacatccccttctctagaggtattcccacagaagctggatacgttgcctcctatatattatagtaattaagagctcatctttagagcctgactatgcaaatttataccctagcattgtctcttccttgctatattcttgaacaaatttcttggcctctgcatctgtaaaatgaggagagtaataatatatagaattgctttgaagattaaatgacttatataaagaccattaggagcagtaattgatggtgtgagttctaaatataagtttgctgtttcccagaggatctagagatggaatttctgcctgtgtgggccattttgtctcatatttggcaagaatcttataaaccattaagtgtatgtttatatgaaaaatttttggcttgtgtgaacttctaacttttcaattgtttattgtttattgacataaaacaattatgtggaaatgagcaaactttaatttccaaccattacaactgcatgactgcactagctcttgtttaaagggcatgagaagttcagagtggcgtgaaccgagaaaaatatatcttatttccttgtgagattatatttaatatagtagagtgaaaaaataggattaaatgatacataaataacttcaacatttaatatgcaaaactgaattatatgaggcaagagctacagaatacttttttgagccttgatatgaaaacgatacatattttaagctaaattatccttacttatggaaaacaaccatgtgaagaaatacaccactatgaatttctttctttcattcttttttttt

SEQ ID NO: 587549 - DNA, 4001 bp, Homo sapiens
gctgaagttacaggcatgcaccaccacaccagctaattttgtatttttagtagagatgaggtttcaccatgttggccaggctggtctcaaactcctgacctcaagtgatcctcctgcctcggcctcccaaagtgctgggattacaggtgtaagccactgcacccgacatttaaaataatttttaaaaaatggttttgaaacaaggtctcactctgtcacctaggctagagtgcagtggcacaatcatagctcactacagcctcaaactcctggacaagcaatcctcccacatcagcctccaatgtagtgggactacaggtacgcaccaaggctgcctaaggttttttttttttttttttttttgagacggagtctcactctgttacccaggctggagtgcagtagcgcaatcttggctcactgcaacctccgcctcatgggttcaagcgattctcctgcctcagcctcccaagtagctggggactacaggcacgtgccaccaagcctggctaattctttgtatttttagtagagatggggtttcacagtgttagccaggatggtctccatctcctgactgcgtgatccgcctgcctcagcctcccaaagtgctgagattacaggtataagccaccacgcccagctggctgcctaatttttaaaccttttttgtagagacgaggtcttgctatgttgcccaggctgctcttgaactactggcctcaaggaattaaaatattttaaattatttatttagtctcatcctttaaattttcctatttctatatgttttataacatataatatcagtatatattagtacatgatattctactgttaccatatatatataatagagactaagagcttaactttattttactatttatttaggtgacatagtcaataaagcatggagaccactaacctggagtcagctcagaagtcctgaagccctcttcccagtccccctattcactgtcccaagatgaccaaagccaaaggtgagcccttggcccagcaggatcagagaaagtggaggcagtgaggagggggcctggctccccgcccctccccaagctgcacagagggcctacctgattgtgccatcggatgacatttccaaatccccctgtcccaaggcgctctttcatttcccaggccccacatgtctgcgttgtcagggaaggtgaccagctcatactgatgtcgtgctaactctataagcaatttgggatggggaaaaaaggttaggattaagaaaaaaatggagctcaaagggatggagaaggcaagagataccactgctcttgaatgggagagaagaaaaatacaactggttttttattttgtaaagaaaccaatgtgtttggttggtccaaactttgtggcaaacttttgtccctctcaccctcccccatccggttgctgtggcatcaggcaaggaagaaagtcaccgagggaggcgatgcccacgcccttgccctagcgaggggatccccagctgactccaccaggggcgcccgggcctgcccgccttctgcccgaggtggcaggggcagaacctacttctgagcatcgccgaggtcacgtgtttctttacaatgttcccataaatcgcaggttcccctcaaagccacccacccccaagaagccaccccagggagagctgtttctcccggcttcccgaactccaacccgcacaagtgaaacgctccccagtccgcaagctgcgacttcccagcggcacagaggggtcttccgggccttgcaggcagcggggcggcggggcctgcaggtggcacccgggccgcacccacgagggggactcacctgtcggcagggacgcggggcagggggcgggctccccggggcggggaaggcggggctggggcggccaaacccggggctatgacacccccctgaaaacattaaaatgcgggaatcttaacgcgggcagcgcggcgcgacttcctcaaacacttcctgctctgacgtcacggagcacgttggccgcggccgctcttaaagaggccgctcccggcgcgaggcagaccaggtccggatgctgcgagtgctgcgcctgtcccgggaccctcgaccgggcgactcccccggggcgggggtggcgtgtggtctctagacaactgagggaaagtagacagaccgtgctcaccgatttaaaagaacagccctgaaatgacccccgttacaccctgttctctttagacaagttacttccacctggagcggtttctgggcccgggtatggggatttcttcacccggccccctaggctttcacctcggtggaatttcccgcgcccccgctgggatgatttagggactgttggctagaactgcccttgcctaccgccctactgcgggcgctcccctgtctggggggtgcttggctgggtgtggagaaggatcaatcacagctgactcctcagaggtgacagcccctgcccccttaaaaacaagaaaagacctagcagtgtgaagccaaactgcacccccagccccggtgacatgaggaaaccgtgaggcgctcagcctgaggttcatcgttcatctccttcctgcttggaatcagaatgtcctcactgctgagtttctccgttttatgggattacattagtggacaaaggaggtgtgtgtgtgtgttgctatattttattcaagcagaaaaaaactaccaaaggaacctgaagatgataataatagctcacatctatagagtgcttacacagtgcagggctctgttctaaatctctgtacttagatttccttattcaatcctcagggcaaccctgtaaattggaaaatactgcatcatcatcatcattattattattatctcgctctgtcacccaggctggagtgcagtggtgtgatcacagctcagtgcaacctccaactcctgggctcaagtgattctcctgactacaggtgcgcggccgccatacctggtggcggggtctcactcactgtgttgcccaggctggtctccaactcctgggctcaagggatccacccgcctgggcttcccaaagtgttgagattacaggctgtgagccactgcacctggtctgcattattattatttccaaggtacatggctgctacgtagatgagctgatactcaaaccctagcaactggttcccgggttcttaatccgtggctaaaagtagcatgttaagaagttcagaaggaggcaaactggattttgaatccagatactgctgttgactacctctgaggcacgggggctggttacttaaacactgtgagaacctatttcctcttttaaaatttaggcaatattaggttgaattgcatttaattgtcattttttggaaattgaaaacagccaaaacatcagtaacaaagatcagcagtttcatctgcttcattgtaatagcagggggacaggcgggctcatagaaagtcatagaaaggaggccaccccagagttgttgtgagggacaaatgaggtattgatagcagcagtgcctgacagccctggggttgaagttaactcagggacagatctcaacccaaacataggggtcaatggtgtccagggctgtgctaggcacgctggctgctcggtttctcccctctcccctcttccctctcctttctctttttctttctctctctctctcttttccttccttccttccccctcccctctcctcccctcccctccactcccctccccttcccttcccttcccggctacttggtttctttcttttccttcttttccttccttcctatctctcctccttccttccttctttccttctttcctttccttttcctcccctcccctcccctcccctcccctcccctcgcttcccctccccttcccttcccagctgctagctttcttttttttctttcctttctttcttcctttcctttcctttcttcctttcctttccttttctttccttttctttcttttttctttcttgacagggcctttctct

SEQ ID NO: 587550 - DNA, 4001 bp, Homo sapiens
attagaattttaatattttgtctgctaatgaaaacttatagcccatgattcatataactgtgcttcaggaagtaaaggctttttctgaaaaatgcacacgctagcttccttttctcagtttacctttctactttagagcagaggtgttgcaaggattagaaccaagggtgatccagaagaagaaactgcagaactatgggcattgcaaggaaaatagggttgtgctcaatttttagttttgtattaagctccgggaggacattccttagaagtcctccataattacgttggctattctttccgctctctctatctttgttttgttactgagctggcactccttggttgtgtcaattcttgattctttacccacgagagtggaaagaagtcttgatctaacggagtagccatcaaaagaaagagcagtcagtttcctattcccgcaccctccccccagctgtcttcttgcttgaggaagtacttactgtaaagcattccaattttcctaagcagatcttttcccctcacaatcctttttcctcttttttaattccagtaagttttttggctctttcattggtcatatatgactgccatccgaatccaaccctcctgaattctgtccctgtccattctaaatccgtattctgcacaaataagatatattaggtctcaatactggtctggaagttagagtcacgcctatttcattctgcctccatcaagaagcgcccgtaggaaaaaataacaacaaaaacaaaaacaaaaacaaaaaaacccagaagctggccttcctcagcgccagccccaggactggtttcccagcaataggcgcaaggtacagcccttgccggaaactcccagtcttactcaggggggaaaaatggggttttccggagacctgttcccctagggtttaaaagcgcgtcccgtgggagcttcgctttcacttctctagggagttctgagctgcaagagcccagctactcgccgaacccgggccgcctgcgtgagtaacttggggcggccaggagcacgggaagggcgccagacagagagcctttggctgcttctgagaccggctgtgggctgccaccgctgagcggcgcggaggctgcagcgttccctctcaggacagaaagcaggcgttggggactgttactcgcagcctgccaggggcagcagccgccccaggttcaagtggctatgtgccaggatactcaggcgcggctgttggctgcccatgggagagccagtgctctccgcaggtccaaagtgcaaggccgggctattcccggacttgcctaggagcaggggcccccagcgcgtctgggattgccccggcgcgtcgggcgcgcgaacttgtgcgcaagggagaagagcgcttaccatggaacatggtctgcgggaggcgggcgtagtcatgatgaccgcaactggagcaggagcaagctctcaccgcccatagtcactcccaggaccctggtcttccgcggagttgccgagtctgtgttgggcagggtgatctctgcagctggttcctcttacccacgccgcgactgcagtttcatccatcccaaggggggcggcacacactacggcgtggctctgcgctttgccttttccataacttccgtaggatccgccagcagtgtactttcagtttctactttgcgcttggtctgcaggttcaatctttgggatcatcagcatggaatcttcattatcccctctctcctgggcacctgcttcccgcgcacctggatgaggaccagaggaattcgcgaatttccgaatcaccgcaggaaaaaccagctggcctgaatcaaagcaattctgggtaaaagacttcccagatgatctctcaacgccttggcaacgcttggcgactgggagctagaaccatgagttgttaatgtgtgcacggaagccacaagtgtgcaggacgcaagctgggttattggaagcggacgacaccaaggaggcgttgccgcggatgtggtggacgatgccaagtcgtcttttaaaaaaggaagtgaagaatgattaagagggtcacgccctctaccactccaacctctctaatcagtctctttctgctccgtctgctgtacatgcacctgctcaggtgagacctcaaggaaaaataatcctgtgggtccacctaatctggtaagtgttgtatttggaaaatcaaaccccaaattaaacgcaggacgtggaaactgacgataatatttaactatgacttccacgtgcacatttatctgaattggctaataaatcaaactattcgtcttgaatgcatgccactgaaatgttaactttttcctgggcttgaattatgtagcttatttgctacattagtttggtttctgctattctgcagaaaccctgcttagatgaaggtggataatgtaaaccagtaacaacagcgataataataacgactatcatttatctagcatttgctctctgccagttttgtgctaagcattttatgtatatcatctcatgcaaaactttgtgtgaggtagaccattttcttatctgcactttacagatgtggggactgagacttccttaagtaactttccaaatttcacttagctaactgagcttagacacagacttgctgcatttgggctgtagaaactcctgcttggaactcctgtgaataaagtaataatgtgcacactgatgccgggagggagatgacagtacgtgtgtggctttgccccagtgtggggacttcaggaaagtttcctggagtctgtgacttctaaactgacacttgaagaggaatgaacttggggctggtaaggagtatgtcacattctgctatagcgtgaacaaggaagaggagggaaggagaaaggaaaaaaaaggatggcaatgaactagggagaacagagttgctcaagcctgaaacttgggtctctgattccttttttggtctcatttcccacatcaaatccatagacaagtcctgtctgccccacctccaaaattaaccctaaggtgactatagagactgtctaagggatcttccagctttcacttttgcccacaaccccttcattcttctcagagcagcaggatatctgattctattttgtgccccaccttctggtcacttcccactgggtaccaggccctcagtgccctggtgatctgggccccactgccctctctgacgtttcgtggtaccacatcactatcctccagccacaatggcctttctcttcctgcccagcgtccacttactatggtctttagcccatggctggcattcagtaagtactggggggtgacagagtaagagagaacaggtgagtgggaatgcatcagtgaatatgtgtgaaagagaaagttcatgaaagcagaaggaaatagaatgaaagaggaagcgaagggggtaagcaaatggaaaagagagacagaatggagtgagaaaagccacatatttccatttgactggaacctagagtgggaggtggggaggaggacagacatgacactggagtgagttttaaaaatgatttctataatgaaacacgcctaggttggggatttatttatttatttatttatttatttatttatttatttattttaaatccctgacagcagcattgaagtatgtaactgttcatagcctgcacctttttctttttttaactttccaggaacaaagtaaaagagcatccatcaatactttgcacaaaaggaaatccgtcttccttttatcacaatcaccataaatccaggtagaataagggttgtacatatctgaacttttgggaagcatgaaaggaagttattcagagctgcaggaaaggcaatgtaaatgttacactggattctgcccccaactataaagaatctttctgaagagaatattcataaagctttgggaattgttagggttatatgaaatgggcacattctaacaacatcaagtaatgattttttttttctgtctgtgagataattaatac

SEQ ID NO: 587551 - DNA, 4001 bp, Homo sapiens
atacataagtatatttagatactatatatagtatatataccatacatatttagatactatatatagtatactatacataagtatatttagatactatatatagtatactacacacagtatctttagatactacagtatactacacataagtatctttagatactatgtgtagtatatatactacacataagtatctttagatactaatgtgtagtatatatactacacataagtatctttagatatatatatctagtatatatatactacacataagtatatatactacacataagtatatatactacacataagtatatttagatactatgtggagtataaatactacacataagtatatttagatactatgtggagtatatatactacacataagtatatttagatactatgtggagtatatatactacacataagtatatttagatactatgtggagtatatatactatacatagtatctatgtgtagtatatatactatacataagtatatttagatactatgtatagtatatatactatacataagtatatttagatactatgtatagtatatatactatacataagtatatttagatactatgtatagtatatatactatacataagtatatttagatactatatatactatacgtaagtatatttagatactatatatagtatatatactatacataagtatatttagatatatatactataaataagtatatttagatactatatatagtatacattaagtatatttagatactatatatagtatatatactatacataagtatatttagatactatatatactatacataagtatatttagatactatatatactatacataagtatatttagatactatatatactatacataagtatagatactatatatagtatatatagtatatatactatacatagtatatttatgtactatacatatagtatatttatatactatatgtaagtatatatgtaagtatatttatgtactatatataagtatatatacctaagtatatttaggtactatatataagtatgtatacctaagtatatttctgtactatatataagtatatatacctaagtatatttctgtactatatataagtatatatacgtaagtatatttctgtactatatataagtatatatacgtaagtatatttatgtactatatataagtatacagaagtatatttatgtactatatataagtatatatactatacataagtatatttatgtactatatataaagtatataagtacattttatatatatttttatatatagttatatataatatatgaatagttatatatatataaatcacagtacatttattgatgggcagggtccgtagtttactcactttcattttcccaaagccataaacacctgaactgtttcctgctgtttctgtcctggtcacagccttccagcgtaggagccaggccaccttcctttttgccacctgtcccagcaccgcgactgcgggcagcacaggacctgggcgctgccccatcacttagagtgactacctgggcctggggatgcaccaagtttctaggagcttttcggagttggggacataaaaaggggcaattattccacagaagccgccacagaggttaagtgaggtcgcgtgagcgaaccgctactccaatgccggaactgttcccggtcgcccagggcagctccggataacgcagcaggcaggggtcacccagaggctgcctccaccctaggcgccgaccgcgcacggcgctcgcgcccgctcctgaggagggaaggggcctccctggaaacccacagcgcccgctgaacccggagggtgcggtgaggaaaataacggtctcaccttgagtcggaggacgtccggctagctctgtgaacggtgttaccgcactcgtctcttccggaggtagaggggctactcgcaacaggaagttccgcccttaaaaactccattcctgagggggcgtggttgctttgctgggccccgccccgagctgcgccctgcgagcctctgccaggccgggccgggtcctgacccgcgctggagcatgggatactgcctcttcattctagcttctggttcttttctcctgcttgtcttttcatctctcagtttttaaacattacttctctctttactttgcctttttcttctttcgtcctccattcattcacggtttcccatttagcttgctttcttctttctcccatttattctatagtactattttgacaaaacccagattgcagatatgattccgattatgcagcttttaggtgctaacctaaagctggtaaacctatactagattaaaaaaaaataaactgataaccagaaccaactgcccaattcttgataatttacttacatactatttattgaggacttactatgcttcaagcaattgtgtggggttttattgttttgtttttttgagacggaatttcacttttgtcgcccgggctgaagtgcaatggcgcgatctcggctcactgcaacgtccgcctcttggattcaagcgattctcatgcctcagcctcctgagtagctgggattacagacgcctgccacaacgcccggctaatttttgtatcttgtagagacggggtttcaccatgttgctcaggctggtctcaaactcctggactcaagtgatccgcctacctcggcctcccaaagattacaggcatgagccaccacgcctggccgaaatgtgtttttatatgcattattttccttaaagttttaacagtttcttgaaaaaggtatgattagctttgtcagacagatgaggaaactgaggctcagagtagttaagtgatttgtcctcaggtcacacagcaagagcagagagtgaaacacactgagttcaaagttttggggttcagaaaatgataccccacaatgaaggcctcagaagcagccttagaaggaaaaattttcctctgactccttttggtctcctgtctctggtcccacattcttccccagactagtcatagaagctagaattcctctttcccaaatcaggtcccagaaatcaggaccccttttttataaagccagccataaaacataaaaatactactctaggccaggcaaggtggctcacgcctgtaatcccaccactttgggaggccaaggcaggcggatcacgaggtcaggagatcgagaccgtcctggctaacacggtgaagccccgtttctattaaaaacacaaaaaaattagccgggtgtggtggctggcacctgcagtcccagctactcgggaggctgaggcaggagaatggcatgaacctgggaggtggagcttccagtgagtggagatcgcgccactgcactccagcctgggcgacagagggagcctccgtctcaaaaaaaaaatatatatatatagagagagagatatagatagatagatagatagatagatagatagatagatagatagatagatagatattactctagcattctccctgtgtttctatgtaaaatctgaccacgaagaaattatatgactcaccctgtctgagtttaggtcataagacccccattccaaagagggtcctatggagagaggccaagaagaatctaagcagacaggtcttactggatttccccagtctaatagcattaggttataccctctttgtccaaccatattctacacagctgtccatatgctgttgaaactaagcataaaatggactgtccccttatacctttgggtcttcattctgaaggctcccaagtcacataaaactatgatcaaataaaatccttttcttctatttatctgccttttgtcagttgattttcaccaaaccttcagaggacaaaagggaagttttttctttggccctacaaaagtttacacactgagaatatatggcacaatgagatcacattatatgaggtacaaggactagttatggtcttaaaa

SEQ ID NO: 587552 - DNA, 4001 bp, Homo sapiens
agatgcaaaaaaatttaagtattatttgtgatgataaaaacagagtagggaagaagaaaaagtggaaatattctgtgttttaagtagaaatttgaaaaaaaaaattctaacgttaattacatctggtatccagtagctcatgttaggaaatacaatgttcctttccactggaaaaagaaaaagacgaaagaaaagggaggaagagaggagaataaaaaacaaaaccaaagcaatattatgatagactggaagaagccttatgcaaaatacataactaaacaatgacaatattctcctaactctttcaagatcagcagtaaaaggtcagtcaccttccaaagaagcctgggtttgcacatcactgtttatctaataaaattccagtgaagacaatttttcttcccagtagccaaaactacagttaggtgagttaagatatacgttaataaggtgctgctacgctatgctgagctcttcctcaacaaaatttgcagtttctggaactgcaaattttaaatatgctttattcaactcaatagcagctccagtgaaatgatgaattcaaaaagtattaataacaaatccaaaatgtctggatttccttaagaaaatgtcaactcccttcccagaaacctacccaaagaaaagccaaatgttatttaattcttattctctggagtaaatatggatctttaatcaagggccaggtaggaccaacagctggtatatttctaagtacctccttaaagggcccgcaaactataaactttagagcgtcctgacaaaaagacagcgaaatgagcatactcatcccccacccccccaccccgactcccgcgagcgcacacacgcacacacaaatgccccgcacactaacagctctgcaacaagactcggtctttcagctggctactggcaggccacccagaaaatgtgtactccagtttcgacccttctagggatgaaatcaaggaaggatagagagtcttggtggattttagccaaccccttaattctacagaggagcctgaagctgcgggtgcaattaactttgtcagccttttcgtttcaaggccttctgatcccaggtacacacggcgcacacccgacccaggacgagccaaaagggcacgggccctgagtcagactacgtgcaacctcacccagctcctctgctgtctgtctgaccttgtgcacgttaacttctgcgtctcaatttccacatctacaaaatggaaccagaagctccacatcccatactgttaagagtcgacgggccgagacgcgctacccggctcgagtgggcgctccgcccgtgggctcccacctggacgctggggaaggcggtcttgagcaggtagaacatcttgcggttggacagcacgtcgccgctggtcatcttgtcctcggctccctcgcgcgtcttccccttggacttctcgtggaggacgttgctctcgcggacgcgcctcacctcgtcgccgccgcggactgcggccagcactgacacagccagcatctcgcgcaagtccacggtgcccccatcggccgcggccgcgggccccgccgcgccgccgccaggctcgccgcccaggccgaagaggctgaagcggccggccaagaagcccgagtagaggtggtagagcacgccgagccccagcaggcaaaacactgccacccccagtggggaaaggcggatgcccatgggggccatggcgtgggaagccgggcgctccgggctgcggctctcacaggcctccagcgcccgccgccgccgccgccgcagccgccgcgctccgggccaggcgccgcgcgggctacactggcgcccgctccccggccccggtgcgccccatcactccctcccaggaaaggccgagttgcgccgcgaagaccaccaacgccgccccgcgcgcctgactcgccaggcagcgcgctctaggttcttccgccggccggctggtccgacttccacgttagcctacggccgcgaggtgaaaggggagcgtgggtgtgtatccgggttacgcgacggggcggggcgagggcgagggcgaggggcggggagagctgggcacctccccttggggcggggcggggcgggacaggaggcgctggactgagctgccttccttggtctgggtgggaaggtattcctggaagtggcgagcagcaatccgcacaggacagtgtgctgtgctgagtgccttgtgggtgtttaaattaaatatcccattgtacgactatggctggctgtaataaacccacagtaacagtctagtcttctcatcactctcagattattgaggaatggaggaaaacacaataaaccattttaaaagattgatttgcaagcttttttagccagcgggggtgtagacagcctgtacctttaagtcgcttctccgcgctcttcccggcaggacggggaactgggcggtgaggggaagaattgtacttggctcttcattctgttgacatctttgtcgtgccctaaatgcttatgtgtgtatagagtttctctcctccacctgccagaataaaccatcctcgaagcagctgaaaaacatgccttgatccgggtttttcataatgaaagaaagcaaaccaggcttctctcatttccaagggtactcgagcctggctctcctaccagagcttaagaagaggaattgcttgacagagtccacttaaaatagaggttatccggagatggtcagtctagaacatgtaatctttgagtcagcgtaggctctcgaagtattttgacagaaataactaccttctactataacaccgatcttagctagaatgatagtgaatactttataagtattcatgagtttatctttaatcttaaaagtgaatattaagatgtatagtattgttcttaaatgttaaaatatctatataaatcaacttaaaatgtagcctgttttactgttcatagcaaaacagcattggttttaagtggactttagaattaaccacctgaaaaactgcaagtataccaaacttctaaacatccattgctaagcaagtcatgtagagcctgacctttaccgcttacttagagttcagggcatccctagaatttgcatgtgattatacacatacaacaaaagcactgccagattatacacatacaacaaaagcactgtgatttccctgccagaatcacagcacaaaatcaagtacaaatacaaatcagtgaaagaacaatccctagagtattgacagcaccagaacttaaagaactagcattgcctttcttgtcagcttttgagagtaactttgcaatgaagcaaagctgctttcaaatatctaaaagtgaatgtcacagagtaattctcaaaacccatcccagggataaagataaacatcagggttgaaatataaaggtttaagttaaacagaaccaccccaacctacactatgacagcagcaaaaagatgagttggatagtaatcatgtcaatattaaaagcatcattgggaagtctgagatttctcaaaataaacggaataatattttccaaggatattggagaataatatagggtcacattcagtgtggcagtatacacagtataccactgagggaaatactaaaagctctggagcatttctactgcaaaaaagggatttaagacttgagggagaaaatgccaaggtatgtggaaagaaggagtcacttgaaagattgtagctccaagaggcgttctagcactcaagtgataattgatcatagagaatgggtattaacagataacatttaatcgacaaaagaagttatgacaataagaaaacatttgattaattacatgtggtacagtgatgtcagaaaacctttataggaatttgattgaaagaaacttgtttttttagtatcaagttgtcagaagcttcaaacaatgcatacatacacatgaaaattatatggctttcatattaagattgtggacagtctgttcctaaaacataatctacatctattcttaa

SEQ ID NO: 587553 - DNA, 4001 bp, Homo sapiens
taaaaatgagagtactcacataagtctttagtgggttttataggtgaaaagacaagtaaccataacatagaaagagcttctaaaagtcaacaagaataaaacaaactatttgaaagaaaaaataggcaaaggcaaatcacagaatacacacagccaaagagaacagttgaaacaatactgaatcttattaacagtatgagtagtacaaatttttttttaaaatagcaagataccattttctcctatcacagtgacaagaactaaaaagagactaataatatccagtgttgggaagggtatgggaaaacacactctttatacaccattggtggtaatgtagactgggatcgcacattttggagagtaatttcatagcgtatcaaattttcaaatgcgcataaactttgactatgaaaatgtcttagaatctattccacagaaaaacaccaaaatatgactacaaaattgttgacacactgaatataatttcaaataatttaaaactatctatttaaatgtctaccaagaagagagtgtctacgaaatactacacaggcatgaaaaggaatgaagtggatctctacatactgatatgggaaggggtccatgagagtgagtaaaggaaacatgctgcagggcaaaggtagtatggtcttctcacttttgtaaccccttccccccaaaaccttatttatgtattatgcatacatgtatagatatactgcctacaaaacttaactctggttcagtttaggatgcactttcactttttgttctctataacaagtagtgtttgaatttttgtaatgagcacatattatttctagaataaattatgaaacagaagttttaacaaggataaaacataagaataataattaaactcttctgcaaaagccatgtcagcaatttatggcaggcctggactccttactaggtttgctttaggtatcgaagatatagatgaacttgaagatcttcccccaactcccacttctgcagagagaaacaaaacctcatggagagattcagtgcagtaaaagtgatgtcaagcgtcccactcacatgtcgtacagcagcctcccggcggtggcggtccgctctgcattccgctcgatggtgtacatctcatactgcaacacacatcaggcaccctggtcactcacccctgcccagaaggctcccagctcatccagcatcgctcgttggccctcctgcaggaagggagggcctgagagtgaagctccgcctggtgacacagcgccacatacatggcagacttgccattgggcttagagtgtgaccctggggttcacctgcaatctcaggctcccaggattaagtaggataatatttccaaagtcgcaggccctgaacaaactgctgccattatgatgaatgaaggagcgaatggccttttgctagtggcgatcatgtgctgtctaggccagatggcacgctgagccccagggacctaagcacacccgacctcaagcgggatcggccgtctctcaagtgctggggagagggctcctggaaggtgtaggagcaaggcgggtgaaaggtgtaggagcaaggtgtaggatgggaggggagagaggagggggtgggaggggagaaagcagggggccgggcaggaggcggcagcccccaggcaggcgcagctctgggccagggcagcccgggcgacgggagcgcgcacctccacgcagagcggccgcatgcacagccgggacctcacctggatgttaaagtctgccgggtagaggctgcgggccgtgatcagccacgccttggctgcccacaggtcttgcggcaccaactcccgggctcgctgcaccaggaactcgcagtccccctgggcagacatgacccgagcgctctccagccgccagcccgaagcggccggaacgtccggctctggactctcagccgccacggcagccaccgccgccgccgccgccaccgcgggggaggctactgcgcatgtctggaggcgcacggaggctggcagagtggatcgggaaagcttttccgggttttgcgagcagtctcctccccttggctcctcgttaccgcccggtcccctcctcttctgagaagccagagcagttgaaccgcttccaggtcacctcgaaaatgcggagaagtggattttcattcctgcgggctgcagcgtgaccttggtgaagtcagggagcatgcgcgggagcgggcaggcgccaggcctcttcgccatttccatcctctctgggtattgctcagtttgtcgggggcgggggcggaggcgggggcggggagacgggcggtcccggggaatgggcggtccctgggcgtccccccggcgtggaaggttgagaagaagtttgagaggaacagcagagggtcggggaggcggcgggaagcactctccacccgggccggcctgaaacaccttccccgggggccgctgcctgcgactcactccccgggcttcgatttacgcgaaaactcctggggctggtgggggtgatcgtgcaaagcgtgagctccggggttccttctctttccgaaatccgtccacgttttattatttcacctttatgcaccggtttctccaacaaacgtttattgagcaacgaagtacttggaaagcgctttggtggatgccgtccgtgggagctgcaaagatgactaaaaccctgacccagcaagggttttatatgttttaaatgttctggacgtgaaacccacagaaagataactacgctattattataattatctcctccagccacaatcaatgtccttttcaccaaaactccagatttgttttccatctaagagatgaaaaacatctaggagattctccatctaagagattctcttgcctcagcctctcgagtggctgggattacaggcgtccaccacgacgcgctagcccggccaatttttgtatttttagtagagacggggtttcaccatgttggccaggctggtctggaactcccgaccccaggtgatccgccctccttcgcctcccaaaagtgctgaaattacaggcatgagccaccgtgctgggcttcgaagcactgtttaatatctcctacttatgcacagaacagcataactgtatgattactttatgggccaggattactcagtgatacagttattttgggtttgtagaatagaagatggtagaaaattggatttaaacggagtaggataatttttatgttataaagtgtacagcataaaagcagattgctagcttgaattgttaaaattatttcattgatgttaatatatgaagtgtaagaattttcaaatggtaaaaatgactgatttggtcattaaactttctggttttggtctttaccaaaaataaaaaaacaactccacacttgttcctgagcctagtgttctgtggaataacaattgtaaattaagattttaaatttagaggctaaataaggaaattctgtttttgtttgtttgtttgtttttgagacacagtcttgctctgaaatccagactgccagtgagtgcagcagctcgatcatggatcactgcagccttgacctcccaggctcaagccatcctcctgtctcagcctgtggagtagctgggactacaggtgtgtgccaccacatctggctaattttaaatttttttgtagagacacagtctccctatgttgctcaggcagttcttgaactcctgggctcaagtgatcctcctgcttcagcctcccaaagtgctcggattacaggcatgagccattgcgcccagcctctgtatgtattttagatgccaaccttgagagggcctctagactttttgccagaatacaacgtaaggtttgtggttattttctagtcagcttcttgattttgaatggtccccagctaaacatttctcctacagtgttatgctggcatctcaaagtacagaagggaggtaacacaccaagtgagtttacatcttttggcctccttgccatgatcttgactcactgg

SEQ ID NO: 587554 - DNA, 4001 bp, Homo sapiens
ccggctagagacgaggtttcaccatgatggccaggctggtctcaaactcctgacctcaagtaatctgccagccttggcccccaaagtgccgggattattataggcgtgagccacggcgcccagcacgtaatttttaagagccgatatcataaaagcatatatagaaataaaccaagatatctaaatagcacttcaaatgaaatttcactgaaatcttggataccttttctctaatatgtctaagtcccacttcaaatgtgcagcaactttaagagcaagtagttttaaaatacgatttctcttgttatcaggcggaggttgaacttggttttgttcattaactgaaggtttggaagcctgttccaaaaactgaactataagttgaactggtgcaggatctagggtttaaaagaaaataaattcttaaatttaagttttaattatgtagatacaaaaggattcactattggtttggtttttttgggggggtgggtggggggggggggagtttgggttttttttttgccacaaaaggaatccaaacagctgcgctgttaaaatgactaaggaatacgtatgtaagaagtgtgcctgggggttaaaggagatgcggaagagtggtaaggaggaagggtaacagattagagtggaagaaagcaaaaaaaagcaccttacggggaagaacataacagtcatagatttctggttctgcaaataaccactgccaattagaagaatgagatataaatattagaactattattttgacacttaattagggggacctccatcaagtgacctctccgtacctgcttcttccaatgcaaaatagaggatcattttgaagattaaattaaaggaggtaacggatgtgagcaattaagcacagtgcatggcacccggaaagcactcaacaaattatctttcaaaaggaatgaattaagggcattatacaggtgccaaaactgcctaagtacactaacttcttacacagtggtctctatcagtgaaggccagtctgagactgaacaagccatatctagatttgaatttagagaaatgctatccgaggaacttacctttttgtgccaataccttttttgagaatgcctggagttttcctcctcccccatcaatcacacccatttaactgggctattaatcattatcatcactatacaaagccatcttgcaaatgtgcagcagttcctactttcaaagattttcttttaacttacagcccaactttggaataagagtcaataaaattccctcactgaagaaaaaaatgtttaaataaaacctaagataataactagcgtcacgatcaacacccaacagctggtttctccccagctccctgaatttattcagcttggggttgaaggaggcgtctggtcagcctccccgacccaagcaaccacaagacccgcctcgcagcctctaaaaccccaacagtaaaaaggtaaatcgtaaaaaggaccaaagggtttaggatgacagcaccaagccctcccctccgggggtaggagagcctttgtttcgagcttttctttgaccctccacccgggcatgtttaagggaagcgaggagcccggccggagctgggctcctgtgcgcgcctcccaggccgcagcttcggtgaccgagaaggcggggagcggagggaagctgggcggacagcgccggtggccgggtcccgctccccaggtgcaggcgccgcgctcacccgggcagggcttgcgcagatgtttctccaacagtgactcctccagcagaaactcaaaccagcaggtctgcggcggggtgcagggccggctggaggtggccgcctcccggtccgccgcctccgcgctcatcctgcccccgccgccgctaccaccagggccgcttcccggctccaacctgacacttggatgcgggccggtgcctggggtatgcggaacccggtgggagagaggccaccctccgaacgtcccggaaactcacacaatccaaaatggcggcgcgggccagccggagctgcggtcctggatccgcctccccgcgccaccgccgcgccttcggaccaatcgttgttcgggttggaaggaaaggggcgtgactaaccttcgaaccacgcctcctcccggttgccataggagacggcgccgcatgaagccgggtcgcgggtgggttttccgtgttccctgacagttctccagcgagaaaatgagacaacctcatctagggttgcaacgggcctcaatattttcgtaaaggcgaagcgaagggttctagttgtgacccaagcaaagtttatctcctgtgctttcaatttccccgttcccatttctgagatttcctcgcacctgggtcctctcctcagatgctcccgccgtcctgccgagaacaccagcttcccactcgcttcctggacggatggcagcatacggtgagcagcccttgctgctagctcccgatacttagagcctagttgatcctttcgatatccccgctagaggcgctgttaaccctatacatttacctccgttctgtgatgttcttgtatttttcattaacgattaaaactgaaaaaagatgcattcatagatcgtgaatacaaggccagcctgaccaatatgatgaaaccccgtctctactaaaaatacaaaaattagccgggcttggtggcggacgcctgtaatcccagctgctcaggaggctgtggcaggagaatcgcttgaacccgcgaggcggaggttgcagtgaaccgagatcgctccattgcactccagcctgggcaacagagcgaaactctgtctcaaaaaaaaattttttttaagtagccgggtatggtgacacacacctgtggtcccagctactcaggaagctgaggcgggaggatcacctaagcctaagagattgaggttgcagtgagctgtgattgtgccgctacactccagcctgggcaacagagtgagaccctgtctcacaacgagaaaaaaaaaaagaaagaaaaaaaaggaaatcagtacagattaacttgacattttgacatttgtattacatatgtaaaaataagttttaattaaggaagagttcattattccactaccatctaatacaataacaacattatatatttcaagtcccaaggtgttttatttagactcaaaaatgtcttgccataaaagtgttacagcactgaactccccttttcagagtgggtaattgaatacttgaaggttgacagagatcttgaagtttattaaacttagagaccatctcttagagggagtcataacttaagacttcatcaacattggaggagtctaatgaactcaagcttccagccagggactcttgtccctctaatgcagggcaggtgaccccaaattggaacttcaccccagagagttctttgctttgtccaggaaagaattcaagtgtgaaccagtggtagaagagaacagctttactgaagtggcagtgttacagctctgtgactgcccctgcagagcagggctaacccacaggcagtgcgctgagaataccagctcagggaggttctgcaggcatatttacacccacttttaattgcatgcagattaaggggaagtttatgcagaaatttctaggaaaaaggtagtaacttctgggtcatcgggtcattaccatagaatggggtggcaatgcccaggtgttgccatggcaatggtaaaccgacatggcacactgttgagcatgtctcatggaaagctgcttcagccccatccctgaatttggtccggtgtccaaaccctgactccagagtcgcatctcacctcctacctcacttctgagcagtatgtttggagggtgtctgtcagaagaccctcaaaactaccagttgcttctgctttgatgcaagacacatatcccagctgtggccaagtttgcttgcctgggtctggagtgacacatctttccctgtcagtgtgtgacaatcctggtgtgggttcagtgttcttgaaaggtgt

SEQ ID NO: 587555 - DNA, 4001 bp, Homo sapiens
cctgacctccccaatcctctgttctctgaattcccaaaaccctgaacacgcctctatttcaccatgaacacagtgaattataatttcggaccaggcatggtggctcatgcctgtaattccagcactttggaaggttgaggtgggcagataccttgaacccaggagtttgagaccagcctgggcaacatggttaaaccccatttctacaaaaaaaataagcagggtgcagtggtgcgcgcctgtattcccagctatatggggagactgacgcggcgagaggatcgcttgagtccgaaaggtggaggtagcagcgagctgagaacgcgccactgcacttcagtctgggccccacaaagccagaccctgtctctaaataaataaataataactttggtttacttttctatcttcttcttaggttgcatgcttctgtagggcaacggctatgacttttaattctgcattattaaatgtgtaacacactgacccaggggtaagttgctattctcaaggtttagtgacccgcatccttccccttatataaacagatttatacggggacaatttcggaattgaatccacttttaatactttctctgacttcgcagaaaacagctggctttgcagaatatatgcctgtagcacaatgattatcaagatgagggtaggtgtgttgtgtggtttggcaaagcatgttcagataattatataaatggtaaaaaataaactttttttttttttgagacagagtctcgcgctgttgcaaggctggagtgcagtggcgcgatcttggcttactgcaacctctgcctcccgggttcaagcgattctcctgcctcaagtaaagcttgacaataacttggctgcacaaatatgggttttaaaaggttgagaaacagtgtttcacacctgcctttctacactatgttattaactaattgaatcgagttggaataaactagttagacttgtgtgcacaatgagtcaaatggctcaaatcaaaggtctgaggagcctccatgaaccaggtgcttgagctgtgtgatgttaagacttcaggtataccgagcacgcttcattcagccttggctcatgaagtccctacagtcttagaatggaataccatataacacttctctgcccatctaaatcccatgcagggtttaagactcaacttctccacactctgacctcgtcctgaattccaagggcagtgaggagtctatataacaggatatttaataagtgattacgttctgctggatgttttttactgtctgcttaaatctagccagtctcaacaacagtagggagacaggatactcaagcgccaatcgaatggaaacggattgttaacagcctattataaccctcacgtgggaaccaggacgtccaaacctggttaacagagcccacagagttcatgggcgaaggactgtgacagtcaacctcttgtctgaacaaaaagacccactaacgagtgaaaaaagacctcctgggagggatggggtgggggagagggaattcaaaccttctcaacaacaaaaagcagctttccttagcccactccactttccagctcaataattgctacccctcccgtgcgacgattccctgcccaacgtaggaaaaaaagaggtccaaaaggttatagcatcacctttgccctctgacctaggagcgaagactcaccagtttcataatggacttttggtggttcaatagcagtcactgaactcctcaaacccaggaagcgtcttccggtgcaatctccgccacctgccagccgagagcatcgcgggacttgcagtctttcatcctcacgtcccttccaggggaataatgggaaatgtagtctcccctccaggcatcatgggaactgtggtcgcctttccttttcctccctttcctctccgaacgcctccttccgtcagctcaaattcatcccagccgccaatgcatcctccctctccaccccagcatgatatcatgtcttccttacgggcctggggcccatggtgttctgggatgtgtagtcccgacggctccgactcccctttccctcctcccaaagggaaggcggatgggcacggggcttgccggaagttgtagttcccttggccctctaggcgccgggctccgcaatttttctcaggggaggcaggaactacaactcccagggacgcccggcggcagcaggtgggagaggggctgttgatatcaatatggcggttgtcagccagacaaagacagtcagtctgatgtgattgagacaagggaggtttttcagggggagactgggagataggggcctcccctcccccttctcctcttcctgcgccggcctcaacccctccccagtcccctcccgacgggcgccccacgcggaagacacccctccccctcccgccttccctcctccctatctcagcccttcgtactgggacgttggggagggggctgtgccgggcggagagaactcagcgaggattctgaggtgagtcgagcggttttgaagccggactacctcaagtctctttcctcacttctttctcttcacttaaaacaatttttttggaggggttttggggaggaagtgagcggacgctggggatgggtctcgtaagcggccggattgagaggagggaggaagcagggggcttccgagtgggtgacccagacgcgggctgtggggtggggcagttcgtggggtccggtcctggaaaggcgtcgactgccccccaactcttctggtttcctctacgatgagcggaaggtttgaatcctggaggtggggtctccggtgtggagttctggaaactgtgaggtgatttgcaggtgtgttggtttgtttggggtgtgtaagtgtgtttaaactgtgtgacgtgtacttgtgtgctctgctcgtcttggagcggtgtctgtagatgggaagttagacagcgcgagtcctcgctcgctctgggcctgggctgaggggcgggcgtgaggtcctggtgctgggcgtttgggctggcgacgtggtgcgaggcggccgggctcaacaactcgcttgtgtcccgtcgcccgctcacactctgccactcgcctccgccccctcccctggacgaatctccaccccaaactccagccacgagaactgtagagatggtgtgatgtggagatggattttttgcatcctcaagtcggtagataggtgggaaaggaaaagtgtttcttaatattttattccggaaccgtgttttggttacactattggggctactttgaaaggcgtcctccacccaccttcaccccgaaacagtaggtagaggtatcttgtcttcgtgtgaattagatgaataattgctgaagattcggggggcctggggtgggggtcgggagtgctggattgtgtacgcgtctgtgtgtgtctactaaggagacggaatgtctgttatgtatctggagatagggcgacttattttcgtagcaggaggaactgttggaaattatttgcgggagagggggtgcgccgaaaggcgctgcttgtatttttcttctactccaccctgttctgtcttgcatttgcctgaaagctggtggaatggaacagtgaagaagcattgggtgagtaaagggaagaatgcagttggcattaaagataacactatgtaaagttgaatggtataaagtgattactgtttttatttacgctgaagcttaaaaaaaatcacccatgtatcatataaggtagagtgatgtgactagctcatttctctggtatcctgcaggtacagaaacctctggcttccctcttccttccttcctatcctccctccttccttccttccttaagtccttcctttctttcttggcttcgtacaacatttctctttctgttggacataataccgcctgtgtctttttatttagtttgtgctaatatggttgtgctttttgtggttttaccataaaatgcatcgttaaatgcatttattattttgcatttatgctgcagg

SEQ ID NO: 587556 - DNA, 4001 bp, Homo sapiens
tgagcaaactaaaatatatgtaaagtaaaccctggctttttgataccctcactaatgagttgttatgggaaaaactatttcacacttccctgccttcttaaactgaacacattaaatataatttgctctttattgagaacacagggtccatgctttagccaataaggtaccaagctcttatgctcctataagctgacctctttcatggaaggccctggcttacttatccttatcagttcaagagtcacgtttccaggaagctgtcccctgacctccccaatcctctgttctctgaattcccaaaaccctgaacacgcctctatttcaccatgaacacagtgaattataatttcggaccaggcatggtggctcatgcctgtaattccagcactttggaaggttgaggtgggcagataccttgaacccaggagtttgagaccagcctgggcaacatggttaaaccccatttctacaaaaaaaataagcagggtgcagtggtgcgcgcctgtattcccagctatatggggagactgacgcggcgagaggatcgcttgagtccgaaaggtggaggtagcagcgagctgagaacgcgccactgcacttcagtctgggccccacaaagccagaccctgtctctaaataaataaataataactttggtttacttttctatcttcttcttaggttgcatgcttctgtagggcaacggctatgacttttaattctgcattattaaatgtgtaacacactgacccaggggtaagttgctattctcaaggtttagtgacccgcatccttccccttatataaacagatttatacggggacaatttcggaattgaatccacttttaatactttctctgacttcgcagaaaacagctggctttgcagaatatatgcctgtagcacaatgattatcaagatgagggtaggtgtgttgtgtggtttggcaaagcatgttcagataattatataaatggtaaaaaataaactttttttttttttgagacagagtctcgcgctgttgcaaggctggagtgcagtggcgcgatcttggcttactgcaacctctgcctcccgggttcaagcgattctcctgcctcaagtaaagcttgacaataacttggctgcacaaatatgggttttaaaaggttgagaaacagtgtttcacacctgcctttctacactatgttattaactaattgaatcgagttggaataaactagttagacttgtgtgcacaatgagtcaaatggctcaaatcaaaggtctgaggagcctccatgaaccaggtgcttgagctgtgtgatgttaagacttcaggtataccgagcacgcttcattcagccttggctcatgaagtccctacagtcttagaatggaataccatataacacttctctgcccatctaaatcccatgcagggtttaagactcaacttctccacactctgacctcgtcctgaattccaagggcagtgaggagtctatataacaggatatttaataagtgattacgttctgctggatgttttttactgtctgcttaaatctagccagtctcaacaacagtagggagacaggatactcaagcgccaatcgaatggaaacggattgttaacagcctattataaccctcacgtgggaaccaggacgtccaaacctggttaacagagcccacagagttcatgggcgaaggactgtgacagtcaacctcttgtctgaacaaaaagacccactaacgagtgaaaaaagacctcctgggagggatggggtgggggagagggaattcaaaccttctcaacaacaaaaagcagctttccttagcccactccactttccagctcaataattgctacccctcccgtgcgacgattccctgcccaacgtaggaaaaaaagaggtccaaaaggttatagcatcacctttgccctctgacctaggagcgaagactcaccagtttcataatggacttttggtggttcaatagcagtcactgaactcctcaaacccaggaagcgtcttccggtgcaatctccgccacctgccagccgagagcatcgcgggacttgcagtctttcatcctcacgtcccttccaggggaataatgggaaatgtagtctcccctccaggcatcatgggaactgtggtcgcctttccttttcctccctttcctctccgaacgcctccttccgtcagctcaaattcatcccagccgccaatgcatcctccctctccaccccagcatgatatcatgtcttccttacgggcctggggcccatggtgttctgggatgtgtagtcccgacggctccgactcccctttccctcctcccaaagggaaggcggatgggcacggggcttgccggaagttgtagttcccttggccctctaggcgccgggctccgcaatttttctcaggggaggcaggaactacaactcccagggacgcccggcggcagcaggtgggagaggggctgttgatatcaatatggcggttgtcagccagacaaagacagtcagtctgatgtgattgagacaagggaggtttttcagggggagactgggagataggggcctcccctcccccttctcctcttcctgcgccggcctcaacccctccccagtcccctcccgacgggcgccccacgcggaagacacccctccccctcccgccttccctcctccctatctcagcccttcgtactgggacgttggggagggggctgtgccgggcggagagaactcagcgaggattctgaggtgagtcgagcggttttgaagccggactacctcaagtctctttcctcacttctttctcttcacttaaaacaatttttttggaggggttttggggaggaagtgagcggacgctggggatgggtctcgtaagcggccggattgagaggagggaggaagcagggggcttccgagtgggtgacccagacgcgggctgtggggtggggcagttcgtggggtccggtcctggaaaggcgtcgactgccccccaactcttctggtttcctctacgatgagcggaaggtttgaatcctggaggtggggtctccggtgtggagttctggaaactgtgaggtgatttgcaggtgtgttggtttgtttggggtgtgtaagtgtgtttaaactgtgtgacgtgtacttgtgtgctctgctcgtcttggagcggtgtctgtagatgggaagttagacagcgcgagtcctcgctcgctctgggcctgggctgaggggcgggcgtgaggtcctggtgctgggcgtttgggctggcgacgtggtgcgaggcggccgggctcaacaactcgcttgtgtcccgtcgcccgctcacactctgccactcgcctccgccccctcccctggacgaatctccaccccaaactccagccacgagaactgtagagatggtgtgatgtggagatggattttttgcatcctcaagtcggtagataggtgggaaaggaaaagtgtttcttaatattttattccggaaccgtgttttggttacactattggggctactttgaaaggcgtcctccacccaccttcaccccgaaacagtaggtagaggtatcttgtcttcgtgtgaattagatgaataattgctgaagattcggggggcctggggtgggggtcgggagtgctggattgtgtacgcgtctgtgtgtgtctactaaggagacggaatgtctgttatgtatctggagatagggcgacttattttcgtagcaggaggaactgttggaaattatttgcgggagagggggtgcgccgaaaggcgctgcttgtatttttcttctactccaccctgttctgtcttgcatttgcctgaaagctggtggaatggaacagtgaagaagcattgggtgagtaaagggaagaatgcagttggcattaaagataacactatgtaaagttgaatggtataaagtgattactgtttttatttacgctgaagcttaaaaaaaatcacccatgtatcatataaggta

SEQ ID NO: 587557 - DNA, 4001 bp, Homo sapiens
tttgccttctacttttgagcatggaatttagttatatagtagagctggggcctccaacaaaatccagtcacaaactgacatatttacagcgctgtcaaccaggtactttatgcccattcagaacatttaagggtcccaattaactactgtgaaactcgggactcagccccacataaaactattagagaacgtttttttcttttaatccatgagaaccatatgcttaatttatactgtaggatgaaaagatgtcctttttagcaagttctaccattctgccattttgcatttgaaacacggcccaagtgttctgactaagtgaagtgtacaaattgtgtaagcttttatataagcaatggtataaatggggttgcagtgggctggagaaacttttaattgcatccctttaatatcctccaactctgagctgcttaattccaaaaagtgatgtcgcctcctacaacccttttcaactaaatatgattatgtttatcaggaaatgcactttgctaaagcataagctattcatgaatatctttctcagcgtattacacaaggaaattcatcaggttttgacacctgtttcaataatgtatacttttcctaataaaagaggaacttctgtcctggtatatacacaatctctttggcaaatattgttaaatattaaaataaggtgatctttgttcacagccaggaatactggcttaggtcacacataatgcaaattattgtttcagtattgccattctcaggagtagtagctgctaacttagcagctataggaacacacctgctaattgtattctttaaaatgtagacttcattacccatttctaaaatatcttcctagtaatttgtccaagatctccaggtcagcaaagactgctactcttttaagaccaatactttaagaaacggaatgaaaactaggaactcacacactctgaactccacctgcatcaggtggcctttctgctcccataactaggacgtttccaaatgcacccccaaataaggtacaattccccaacatcctagttacggggttctggcttctatctttaggctactggaggaccagaagcgaaatacgactccacgtgaaaccaatcccgggagcggtcagcacggaccgccaacctcacccgctcagggtgttcgctctaactccacgggagtggcgatttcaaacccggccgggagagggagggatcaggaacgtaatgtgacgggctcaagtgacagcgtcctctctccagcccaaccctcccgggcggcgctccctcccggtggcagcgcagcgctggcgccggccaggtacattcacgcctagctcccctgagtgtggatacacggcccgctccaagaacggggtcagatccagccctcgcgccccagtccggtcccagcgccctctctgggaaaggcgggcgcgggcgcgggggtgggaggcgcccccaggtgttttggcgggtttccggacacgtgcgcccggcgtcctccccgcttccccgcagccggggcagagcccaccgcaccagctcgcggagcagccgagccgcccgttacgccgctcacctccgtccccgtaggtctccacgccgtacccgtcttgcagcccgttactccaggtaccctcgtagcgagcgggggtgcacaggctctgccggaccccgtagcgccccttgaaaccatgtgaccactccccccggtacatccacttgcccttcgtctccacccccagcccgtgccgcttgccctgcgcccagtagccctggtaggtgttgccgctgggccaggtgtagcctccgaccacctcgaagccgtgcgaccaggagcccgagtactcgccctggcccttgggccccgtgcagatgccatgcccgtgcgccttgccctcctcccagccgccgcagtaggtgccgccatcgtcgaagtcgaaccttccgcccgtcattcggggggcagccccggcgcgctccccgcaggggcacggacgcgggcagtgctgggcacggcagggtgtagctcgggggtgggggcccggcgggcgagctcacgacagcgccctgggcagctcgcgctgccgctcggctccagtccgacgccgcccccgtcctccctcctcttttgccgccgccaccgccgccttcctcctcctcctcctcctccttcgccgccgccgcctgggccagcgccgcgcgcgagaggacagcccaggttcccgagcggaccttcagctgctcccgcccgcccacgtgagccgggcaccgccccgcgcccgcccctcgtcccctccccgggcgccgaggcccggccccgcggcgctcccgccccaccgggccctgcccccagccccgggagccgccgcttcctcggcaggcgggcgcgcgcggggaccggctggcgcgcatgtgttcgcgcagtgggatgccggtgggagggcgagtgtacccggggacgcacgagaatccctgcctggagatgaaggcgcggctgcctgtgtgggggccgctcgcgggcgccggagcccccggtgtttgtgtttggggtttttcaaagtggttaagctcctgtgagtgcggccacgtgtgtgttgagggaaaactcattgtatgcgtgtttgtctgcatggggtttgtagttgcattgttttcgcattccaacttgtgtactgttgcatttgtcatgctcagctgtcatcgtgaattaatatcgcctagatatatgtatgcatgtgatgtaaatctgcggcagcctagatataattgtgcagagtgttcttttacacctacccgtttcaaagcacacgtgtttgcatttatttaatgaagacactgagggtgagcagtacagtttgaaaaagcacagaatatattggttagttttttattaatagtgatgaagaggatgttttcaatcggcctttgcagtggtacaggatattccttttacattagagcctgccccctctcgtgcctcgtttgtgcttcttaacagccttagagattcttgagcctggagctgtgtgcccaacaggtagacggctcggtctgtgtacattgtataagtgtctggaatgcacacctctccactggtatccactgtttaagaaagtaaatagaggtttgcaaggaggaatatggtaagtaaagcactgctctaaacttgcaaagaaactgtgacctacaaaaccagggacagatgtcagctggtctactttctagctacaacactgctttgtcgaattcactttaggcaactcttctaaacttttaaacctccatttcaccatcttctgaatgggactaacaagatttgcctttctctttctatattcggtaataactgagtatattgtggctgcagtgccaaaccaaaaattagagatttggtaataggcaagttggatcagcattgcctctggtgagagaaagcattattctccacctcaccctcaaaatacccacgggagaaacttctcccactttcacagcctagggtcttagtttggcctctcaaggaaactgatttggagtgtattcctgctatttcttaggctgagaggcctttgggtgactatgcgagcatcagaagctgccaaaggttctctcactaagtatttgataatcagatatagatataaggacaggtgtcaggaagacagcctgggaaaaagtagactaaactgcacagaaaaggaactgaaattgaccttgattgcctctctctcaggacgagagccgacctttcctacttatctggctgaaagactgaaagaaaaatctcagtttatgcagaaccaaatcaccaaagagaattagaagccctcatccatggcactgcccgcagagttgccaggaatagtgcttaccctagtggcctgaaataattatgcatctctcgaagcatcttgtcctggactggggattgatttaggccgctgggaagatgagggccagggctttgcggctgagccataattccatttccctgtt

SEQ ID NO: 587558 - DNA, 4001 bp, Homo sapiens
ggtggtgagggctgaaaagctgtttgcccaaacaccgggcagctcagctggccgcctcagtgtggcgtgcgtgctatgggcaggggtctccctgccctcactcctccgcaggccagcagtacttgaggatggactcctggagttcccacctccctcccgcgtccttaccatagctgcttctgccaactccatgcagagcgtgtggccaaaggcctacttacatgtggagcgcagaaacgcagccctttgaggccagagctcaagggaaaggaggagtgcaatcaaatgcagcaaaagctccaaagaaaaattataggcttgttggctgccacctctgggtgagtactgtcctcttccggagtcagtttcctggtctgcaaaatgtgggctggtcccttaaggatcctgcattgttcgctgagggtgacggtgtgacgtgtgtgcggtctggcacagcacagtgagctatgtgcatctcaccatggggaacaggagggaaggcaaggccacaaaccaccctccagatttttaatatgaacccgctgtagaaaaactgggggagacacggaatcccacagtagcttatgagggactaactggggactgggatgcagagaaaagcttcctggaggagactcaacaccagacacagctcctcgcggacacgtctccatgcctgacatgcaggtgtagcaggatgacacaaagtggctgaacttgtttcataaggaatatctgaattttatttttaaaggaagtttttggtcttgcaagtgggacaacagtgtgttctgccagtttgtgtcatcctgccacacctgcacgtcaggcatggagacgtgtccacaaggagcccgtgtctggtgctgagtctcctccaggacgcttttcccggcatcccagtccccagtcagcccctcacaagctactgtgggattccctgtctccccgaaattagggtggtttcttgccttgcgactggagaggaagcactgatccccaaggccacgtgaacacgggatgaaacgtgcaattctcctgtgcccaaggcacagacaagaaacgggaggcctgaggggccagcgctggggctgactccgtcctgtgtgaggctaagaggccctgagaaacgcggggggaaagcgggaaacaaccttcgcaggggcatagtgtgtgtgtgtgtgtgtgtgtgtgtgtgtgtgtgtgcgtgtgtgtgttggggggtatggaggatatgaaggagaaatactcaaaaaacaagtcgcattctggagctgggggaagaggtgagctgggggtcagaaggagagtatgggacagagaaggaggggacagaaagcctggggccgtgcgccccgcagagagcgcccgagagccggcgccgagttccgctaggagccctccacgctgggggatcctggcgcagagacagcgctgggctactggcgaggctcgcttaaaaagcgtccgtaccccagggtccccgtttgtgggtagaaattcagtctgggacaagaacaagaacaaaaacagaaatggagaaaaaaaagtctcggtctggttttttaagggcaagcggacctcgtgaccaagcctctctgagagtggaagcgcaggaagggtccgggctggggcgtcaaggccaggcctggcggcaaggggtgggtgcggctcgggggccgcgcgctcaggccgcgggggtcgcgcgggaagcacagggcttcgggttccgagcgcggctcccgggagggggcgctgccgcccgcggctgggtccggccccgcagcctcgcgaccaaccccgccccgccccgcgcgcccgcctgcccagactgcggctcccgcccgcgccgcccgcgcccaccagggaccggagagcgcccgcacccatccggcccggcccggccgcccagcgcctcaggccaggaccctactcaccctgctcacccggagcagccgccgccggccggaagtgccggccactcggttctcctccagtccgcgcctcgtcgccttcccccagctacttccgggacgctctagacaggctggaggactcagcactcggtggtgtctgggagccagacgcaggctttcaaagagctgggtggccgcggagggcgtgggaggagaggaggcctggaggagaggagtgggggggtcccagggtggggggaggcgtgggaggggagaaggcgcgggcagggaggggagaggggaaacggggcgaaggcggggcgcgcggcctgggccccgggctccgccctgctctctccatctgtagaatgggcgcagggcgtcacattcctttcatgacagtgaaccctgcgctgaaggcgttggggctcctgcagttctggggcagccacaggcgcccagggtttcgtgccgatcagcccaggacggtcttcccggtgcagtttctgatgcggggagggcagtgctgccttccggtcaccaggaccagtgctcagcccgcctgcttgacccccttacttagctggggtccaatccatacccaatttagatgattcagacgatgggatttgaaacttttgaactgggtgcgacttaagtgagtatggacctgagttggtgctgtaatgagttgaggctgtggaggaccttgagatgggtgcgtggattttgcccatgggacctatgcaaattttggaaactggagggtggactgtggtgggcagaataatggccctccaaggatgtccacatcctaacttccaggtcttgtgaatacattacttacatggcaaaagggactgcaaatgcaatgaagttaagattctttaggtggagagattcttatgtttatcagggtgagcccaatgtgcagtcgtccctgggtatccatagaggattggttccagcacttctcaaggatgctaaaatccttgatgctcaaatcccttacataaaatggcttcgtatttgcatataacctacacacatcttcccgtatacgttaagtcacttctagattacttataatacctaatacaatgtaagcgctatgtagatagttgttatacagtattgtttagggaatagtgacaagagaaaaatttgtacatgttcagtacagacacaggtttttttccgaattgtttgtatcctcggttggttccatctggatgcagagcccacgggttcagataggagggcaggtgccatatcaggggttcttgtgggagttaggaagccaagtgagaggacaatgggatgaaagaggagagaaaaggaaatgtgacaacagacacaggggttggagtgatgtgctttgaagatggaggaaggggccacaagccaaggactatgagcggcttctagtggctgggagagacaaggaaacagggcctctcctggagccagcagaaggaatgcagcctgctgaccccttgatcttagcccatgacactcattgtgccattagacttctgaacccagagctgtaagatataaatttgtattgttttggatcaccacgtttatggtaatttgttaggacagcaataataaacaaatacagatttgggtagctcactcctcctttttccttttttgaggtagggtctcactctgttgcccaggctggagtgcagtggtacattctcctcaccgcagcttcaacctcctgggctcaagggatcctcctgcctcaacccccagagtagctgggactacaagcatgcactgtctcacctatctttttaattttttgtggaaacgaggtctagctgtgttgcctaggctggtctcgagctcgtggactcaagcgatcccaaaatgctgggattccaggcacgagcccatgtgccagctcactcatccttaggtccgttgttacctgggctcccagcaccctcccaccctctggttcttctcttcctcaccctcccttgctggttccttactgaccaggccattctttggctctttttgttcaaccagtccccactccctgggtgatctcctccagtgtcatgc

SEQ ID NO: 587559 - DNA, 4001 bp, Homo sapiens
gcttctcctaacccaaactaagatgtttctattcatatgctgaagagagtcacaactgtcaaactgcgtgtaagtaattcagacaggaaaactagaaatgaggaaggcccagaatcactggggtcaacgcacatactacatatcaaacggacggtacagaaaaagaaatacactggctacttgtaggactaaagagaagcccaaataataaagatataaattcaagattgctgtcctgaaacgaacattaataaaacataaacagaaatgtactgtctctctgaatcaaagtcagtatccctataaaagaatctggtagatgcaatcttgtttaatcactaaagtactgaattctgaatctaactcttttgcctccaaaaataagtttaactgaagtgttttttagaacttctgctctcattctggagatcatttgcattacaatataaacaatgctagacaaatggctcccacagcaactattcttggtagtgacattaaaatcaaacggaaaactaatacacactaggaaagagatattactattaactctgataggaaagaaaagagtgaagcaaacattcaaacctgagccaagatttgtttttaaatcagctgcctaaaaagaagccccctgggagaatcatgcttcaatttggtgagggtctcaagaggatagaaatcagagtatcattactccaagtaagctcattatacagatattaagtctaaactaaatgagaagctacatcctgagtttaacaagctgggaacgaacgtcctaattgactaagcttcgcaggtaaaagaatgagtgacagtcactcattgtctttccagtcgggattgtcatcagtctccaggtcttcggaaagtcaagcgcctgcagcctcggatcttaactcccggaaagtacacgagcggctagagcgagcgcaactcgcttccgacagtccttcccgtccccattccccacccctaaacacgtcttcgcgctctcttttcaaagagcgagaaactttaaaaacttggatctgcacagcccggcagctcgccgacggggcgctgcaccgtttccacgcgatggaaacagaccccgagcacaagttaacaatgaaatcacgtgaaggagttcagagcggtgcatagccccggcccagctccgcaccctaagctctgggggccggctcgagggcggcgcgggttgctgggagcctgacagtcgcgcaccgggccaagccgcgaggttgacaggcgcccggcctcccctcggcggctgggctgacagcccggcagacacaacaccacacgtgctgcgcctcgcaccacaacacccgccggcctgtcagccccgctcgccgcctcagccccgctcggatccccgcgcccccggccggagccaaagccggagccggaacccgagcccgagcccgaacccgagcgcccgcgagcgcggggagaagcggcccggcccggcacagccggcacgcgcgcggcgggcgggtgggcgcgccccgagggagagcgggctcgccggctccgccagcccgaggctccgcggcctgggccgctcgccgcccgcccacccgccggctcccccagggcgggcccggccggcgggatcgggggcgcggggcccgcgagcgcggggccgggcggcggcgcgcgggccgcgggccggggcagccgggcgccgaacaagcgagcaagcgagcgagcgagcgggcgggcgcgagggggcggccacggcgccccagcccgaggcctggcgcagagcagcgggaggcggcgcaggccgcggcggggcctgcagcggcccgccgaccccgcgaggcagcggagtgggccctggagcggctcggcctcgggctgggcggccgggggcggccgggaacggcccctcggctacttaccgggaggaaggacagccgagatcccggggccccgggccggaccgcggagatgccccaaactgacacggccgccatcttggagacagtgagctccagccggggggaggggaggcaaggcggcggaacagccgcggggggaggggagcgtcgcgagggaacggcggcctgggggagggagctggaagagcctgggcgggcggcgaggggaggcggaggcccggcagcgcgggtggggggcggccgagagcgggaagagctgggccgagagccgggaaaggccggagggcggggcggggcagcagggaagagccggccggcggggtcacgtggggccggtacaaaaggccaaagccaggggaggaggaggacttggtggggctggaggctggggagcgggggttcctcctctcccgtctcacgcgtttaagtcagacggcgacccgggagaggaggagctggtgcaccccatgccaccgctggggaaactgagggcaggagtctgggtggggtggcttcagtgtggcacggaaatccggcagccacgcaggatgggaactctcggcggcgtctgtttacagttagtgagccctccctccccactcatttgcctgcacagcgactttccggagcccgagggcggggcctggggggcggagaggaggcggcttcccgtcctcacccctggcagctcgcctcagcccccgacggctctcctgtgtcggtgggaagagttggggagagggtggaaccagaagcacccgtcttaacccctttcagcagtgacttcatttcttccctcccccagcagctgagagggttcttggagctcactagagccattttatgggagactccacagacctgggtcgtgtgacttggacaaggtcacacagctagtatgtggcgcgcacctgagcctgggactgagatttgtcttattccaaagccggtcttcccttcttgccctgtgcggaactcttgtccatacttagggcgttggaaccacgagcaggcggttcttcatggcctgcctgtccactactggctgtatggacgtttctttgtcttgcctttcatctactttaaactctttgatgcagagactgagtcatacttttttttttttttttgagacagtgtcgctctgttgcccaggctggagtgcaagtggtgcgatcttggctcactgcaacctccgtctcctgggttcaagcgattctcctacctcatcctcctgagtagctgggactgcaggcgcccgccaccacgcctggcttatttttgtatttttagtagagacggggtgtcactatgttggccaggccgctggtctcgaactcctgacttcaagtgatccgccctcttcggcctcccaaagtgctgggattacaggcctgagacactgcacctggccaagtcatgcattttttttttttctgcattcactagaaagacagtagacatgaaaaagacactaaatgtttaatcgttgacatggacgtgtatcctgctgcctgacctttatctgccctgtccccaaccccatacgacacaccccgcctagactgtcgcccgcaatacctcattttatctcagctttagcttttaagggcctccctctcacccactgccttaacttccatgctgacttccttttctgaacttctgtagtagtatcatttgctctagtcattttgcacttacatgtgatatatatatatatatatatatattccgaatacattcactggtaaatgctctcctataatgactctgcatctccagcacctagaataatgttgtacaagtactgtagtaggcggtttaaaataaaaaaatgttgctcgtgaatgaacaattttttaagccgttaagaaagccgtttgtggcggggcgctgctgtagcccagctactcgggaggcctgcttgagcccgggagttccaggctgcagtgaactatgatcgccactacactccagcctgagagacacagcaagagggaacccaaacttttctatctatcccgtctccactctaatccatagccctaccctccatacggtagactctggaccattcagtaagaa

SEQ ID NO: 587560 - DNA, 4001 bp, Homo sapiens
accccattgaagcgggtttgtattggagtttacaaatgatgcgataagctccaaaccacctttccggattcttccatccacccagagcaaggtgctctgaggttcaagttaggcccagacatcagtcaacacagagtcctgctccctgggaatttctttagtctcagagccacaacatttaagctttctcccctcctcccaagcccaatgctggcttaaatacagtcacgaatggttcagatgcagacaggttctgagaaatgatagttagataacttcatcactgtgcaaacatcacacagggcacctacacacctaggcggtgcagcctgctacacacctgtgctccactgcacagactcctgctccagactgcacacctgtgcagcgtgcacaataccgcaggcaattgtaacacaatggtgtttgtgtatctacacatttctaagcatgaaaaagacacagggaaaacagttttataatcttacaggaccaccgtcaacttggcggtctgtaattgatccgaacgtggctgtgctacacatcactataatgtaagcaacatcttttaactgattttattatgtgctgtccaatgctatggccagcaatgcctgtgcaactgacatggaaagttcaaaggctttacctcattacaatttttacttagttatgccctgatgggagcattgcaatgccagttaccataaatctgcacacacgaggttgttgctggagcaaatctgaaggcaatggaacgctcccttccgtgatgtcaggaatggggaggattattctaataatagcacactattagctcaggataaaaggctgaagggttccattgacatccattaaggggtcctaattggagcctgagtaactgctccttagtgggaaatggaggcgggaaccgcggggaatcgggcgaacttctcactcagggcctgaggggatggctggaactttaaaatctgacggcggcgcctttcgtgggctgagtagaataaagctcgctgcactgatttgttccttttcttttccttagaatagacactggagtgggtggagggggaaacgtggttttgtaggactctaaagaggtggagggactttggttcaccctcttttcatgctccagaatgagccccgcctgagaggagggacccctgcggaatcccgcccagaccgcccgggggtctccccagcacatggggcgggggctgcaaggggcgcccggcaggactcgggagccgcggcgcggtggggcgggtgggtcgcggtgctcggggctcgcgggggtcagcagccaggacacccccgcaccccgggcgcagcggcggaggaccaagggccgcgctcccctccccagggccccgagtccaggagagacccccgttcgctccggacagccgatccccgcgaccgccgagagccaagcggagcaaccccgggaggagcccccgccctggccccgcgcgcttggcttcggcttctgctcctgcttccgtgccggctggggcggcgggaccctcggcgggggcggtgactgcgggcgcggcgcgggcggctcattgtcttccggccggggttgccgcgtcccgggggagggcctgtggagaccccgcgaggaggcccccacgccccccacgcggcctcccggaggcggagcggagaccacccaccgccgcccaccccgccgcgggcagcgctgccccctcctctcccggtcccccctcccctcccctccgctccgctcccctccctcccctgccggcctcccctccccgcctctcccctgccggcctccccttttctcccctcccgcctactgccgctctcgccgaccacctcccacccgccgccccctccgacccgcgcctcgggctgcttcccgctccgcccgccaggccccgccgctgcctccccggggtccgccctacctcgccgcggctcctcttcagccgccgggcccgggacgcgcagccaggcgggtgggctccggcgcatgcgcgcggccgcttcccggcacctgtgggagccgcggcccggcctctccgagcacctgcgagcgggagctgctcctccgacccgcagcggggcgtgggcggcagagggggcggtggacaggcctctccgcctctccaggccgcgcggagccagcgctccggctccaggctgcgaggggcgcgcgcggggcgcggggaggggggcgggcgcgtgcacacggggcgttttcgggcgcgcgccccctggctgggtctgcggaggggctgtgggttccccggggcttccctgccccgcgcctgcccgccgggcgcttctccccctccaggaccgcggcccacgtcgccactcgagcccgagcccgagcccgcgcccacgcgcgggggccgcttcctgcgaggaggcggggacaggtgtccgcgggcgcaaacagcggagtttcgtgcgcctattttttggtaaaagtagaggcgatgcgttgttgacatatttagtggttaaaaacttattgccaaattctcaacagattccagaattttttaaagttcacaacacgagagtggacgaaatgtcggagcttttgctcatatccagaaatgtggcctctgcctcccactcgggccctgcggtgcagacgggttcagggcggcgaggactgagccaggagcgccgagagttccagctgctcccaggctgggttctaattaacgctggacccctgctggtaaatgctatttttaatggctttgtgcaaattaatgacgatgagatttccataagtaccgagagccagagcctttactttctctttttgtgttctttttgcttgtgacagtctttgccagttccatgctgtatacacataatgagccgttacaactccagcaccaaagctaacgccccgggaacatctttaaaacctttttcactctgttgccaagaagagtagtacctgctgtcagtacttgaattacaggaggctgaaactcagcgagctactgggattttttgaaaattgaaaacttccgttaactatagcagaaacagacccttttggtggaagctaaaataattcccatgctgctccgtttttattttgttcagtttactccaaaaatgttccaaactctactgtgatcttcttagtgcatctctacttcctttcggctgcagaataatacttctttttctcttttgtttttttttagagatggagtctcactctgtcgcccaggctggaatgcagtggtgcaatctcggctcactgcgatctctgcgtcctgggttcaagcaattctcctgcctcagcctcccaagtagctgtgactacaggcatgcaccaccacacccagctaaattttgtatttttagtagagacagggtttcactgtacattggccaggctggtctcgatctcctgacctcaagtgatccacctgtcttggcctcccaaagtgctgggattacaggcatgagccaccgcgcctggcctaactacccccattcttttccagagaaacgtgaacaggccaaacaaagcctcacctggctatcccgccaccctggggttgggcctccaaaggcccgggaggtcacctaagacacggtgttctgaacatgcaagcccgacagcatcttctctaccattctgccagagtccagagacctgggaataggtcataccccccactgcattttacaagcttggcatacattaggttctcaataaatactgaattaatgaaaaaattgctgaagtaactgaaaacatccatccaaaccccacaccatctggtagataagtagtctgtggggagtcccatatttttcttaccttagatatttatttggaaatggactgtaggcccaatatggtcaatgaaacttgcagaggaacatttcatgcctttaattagttcttcataactgcagggacctctagagttcctgaaattgaactgggttgtaatactgtcaagaaaaaggaggaccta

SEQ ID NO: 587561 - DNA, 4001 bp, Homo sapiens
gcatattaactcttctaggtgataaggatacttttccttcagtggggaagaaagttatttctacgttggaccttcagtattttcagagtccatgcaatcacacaagtaagcactttatccatgcccttaaattaaaaacaccacctcaaacggcaattaaatgcgcatacacatgtgtaatgtgccaaattactaaactgtttgagttaatttaagaacaaagaactctctagcctagatgtctagtctagatgggttttattcatgtattacgttaagctttggacaactttatatttattgacacacacacacacatgcccctaaagagtgaaatagataaaacaaaactttattttcttgatatgtaactttagaatgttaccctcttttacaaaatctttcctgtaagttattcagcactgacaggtaagacaagatttttgaccgaaatctatctctcgcttgtcctatgaaatgtaatatattgattgctgtttattggtaaataaaccaagagacttccgacccacactatactacacatttaacaataacaataaaatgcttactcttcctttccctcagtttcaaaaaatcagattcccaacaaaataaaaaaattaatcaatgcaaaaatgaaaatgtgatacgatacttaaaatcttgacattactacacaacttgattagaaggaatgttgaacctgcgcggaattaacccagtgtatgtgcatactaaatttttttcaatgtaatcttgtatgcattattacttattgttgaaacacatgtgcagtcataaatgttgcataaatggcatgtttgtgcatattgcacactgacagtttttatgaatgaatacgcataaatgctcacaactcgagaaaatggatggcggcatactattttgaagaggatcattaagcatcgggagcaaatgatgaggcaaatggtcgatgtcttttggtgctattcagggcaaacgtattcccaagtcccctagcagagtgtgttggaaacagccatgaagctctttccttagagacccgttctccctctcaggaatcgtgctacagaacggagaccgcgcaccgcttgaagaataaaatgcacgcatgtctctgtgttctgaggatcgttcatacatcagagacatcacactccctaaatccagtcccacaagtgtgtgcatgtgagtgtggcatttaccaacaaatggacggaaggcaacaagagctcggctcctagaaataacatccccatcccttcccagtcaggctgctgggaagcttttcaggggctaatacttgagcgccttccccaccgggaaggagcctgacattaaaaaccctctcagggctaagtcagctttgtgtgtaagtccactgggcgccatatggcagtttccaattcctttagcaactcaagtctggctaggctgccgcgatgattcattcttaaaggaagacccccttcggggagcagcaatgcccccgccacttacctagctcccacagaccccgctcagcaggcggcacgggctcgggcaccacaaagggctgtgggattccccgctccctccggggagcctctccccgcgacgatccccttcgccaatgacctgtcgctggaaatccccctcccctccacagagaggagggtctccccggctggctggagctcccggcgtgctttccccctgtctttacatccctgactctggttcacggtctctagtaggaaggctcagaggaaaggcggcgggaggaagctaaggcatcctttaaaagaacaataatcttcatcgatcttcaaccccttccccacacggggtccccatccccctgccgccgccacagccacccagacaagagagggctggaacagaagaggaaaaatcgagcggggctgagctcgccgcgcggaaggagccagaaagcgagccgcgccagcccgggagttgccgctcgctggggctgcccgaggcgcagcggcggcggcggccgcgggggcggagggcggagggcggagggcggtgggtgcttggtgggtgtgtgtctgtggcggagcagggtagaggctgcgcgcgggaggctaggcggggcgctctggggcgccgctcccccgccccgcagctagccggcccggcgcgcacacagggctgcggccaccccagcctcccgctccgcctcctcccgcgctccgcgcacccgcgggctggagcggccgccgccttctcttcctcctccccctccccctcttcctcctcagcgctcccggctgtcaaggtgggcggcggggcgggatggctgggctgcgcgagccggcagcgcaccgccggggacgccggggctctgcctcgcggcgccggagctgtgcgctcggccggggacagcgctctggtgcccagggcgcggctggggcgcgggcaggcaccgcccacacctcggcggggtgcctccctcagcttccgcgcgccagccactcctgctgccccgggcctggctccacacccacctgcttcgctctgcagctcccacccggctgcactggactagagggacgcagcccccgcggctgccgcgcacccggggccgggaaagccccgggaggccccgccgcgacgcgctccggcggcttcgcgggattccctcggcccttctgcttccaactgcagggctgtcctcccgcccgcccacagcaggaccctgaccctgggctgactgctcgaccccggggaactggggcgaagacagatggctcctgagtggtggtgccaggattattttcctggagaaagagctgcggagataactaggagcgcagataagatctgactttcctcgcggcacctgcagccccgctcgctcgggggccgtccctagccccaagtgacccggctttcctgggtttgagggtaaagccgggtccgtggcaaccttaacccttgcttctcacgggggcgctcttcatacccttctttctttcctttgcctatcaacttaccagctggaaaactatgccaagttaccccttggcgaggccgcagggtgaacacttagacctgtacccacttccagggctcggtaaagacaatgaacttgaataataacactgagccttacatatttctgaccccagtgctccttcacaggcacgaaatagagacagctggcacggttacaggggctttcaggaaaacaaagtagcttaaaacaccttttagaaacgaacgcaggccgtgacaagtctatttaaagctgggactcctgagtttctatagaccaagaaggatggctgttgaggaagttccaagtacactgttttatttatatttatttatttatttatttatttattttttccttgtatcttctgtttattgagtgtttttttaaattttattattattatacttttaagttttagggtacatgtgggtttgttacatatgtatacatgtgccatgttggtgtgctgcacccattaactcgtcatttagcattaggtatatctcctaatgctatccctcccccctccccccaccccacaacagtccccggtgtgtgatattccccttcctgtgtccatgtgttctcattgttcaattcccacctaggagtgagaacatgcggtgtttggttttctgtccttgcgatagtttgctgagaatgatgatttccagtttcatccatatccctacaaaggacatgaactcatcattttttatggctgcatagtattccatggtgtatatgtgccacattttcttaatccagtctatcattgttggaaccaagtacactgttttaaatatactccatgtcatccttgccttagttttagccctgatatgccctggaatgcgctatcctctctaattctctgcaccttgacttcccacctcgctatggggaggtggccttactttgtactgagggtttttggttttgtggtgggtttttgttttgttttggttgttgttgttgttttgaggtg

SEQ ID NO: 587562 - DNA, 4001 bp, Homo sapiens
aggcatatttcttactctccagctctccagcaaacaggcccctgtctcccagaatcactgccctgtgcatctgcgtgccactgccacagtttaaagccagagaaaatggcaatgactggccctctcagaagctggaaacacagtgtgggaagggaaggagtcatctgtgtttggggtgctgggcaaagggcgtggggcaagcaagagccaagctgattatgtagataacagaaggacaatttccttcacaaacagaaaaacctgcaccaatgaattaaacatttaaaacaagatgactctctaaaaagtattttcaaccaagaaggaaagacaggccgtcctgtgctggcgcttcctgttgcatatggcactgagaaatcctttttttttcagtatgcagagatttccagacaaagaaaaatatcaagagggaaattagaggaggaggtccagagaagcgagacaggaggagctgggaagaagggaggggggaaggaggaggtccctgcccagggcacaggggtgtgaagccctgaggggtgcaggaaacagaccacccccactaacacactggccttggcaagtccaaggagatggccctagagaggcagcctgcctcactggggcaagtgaaccacagagacaccaccctgcctcctgccatgcagggtatccaccacgtccacccgaatgaaggtacctgccccagctcccacaggtctccaagtataacgtccgggagtcctcccagcccccagccttagaggggacactgccctcgggaccgaccagagaccctgctctgtgaatagcgcccttggcagtggggctggcgggcatccctgcagtttaccagctggaccccctctcgtgactggggctcaagttccctggtttctgggcaatgtctagactggcctttcccagtgtcacagcctagggagtgggcaggttctgccctgcccccactctccacctctactgagagcaattgaggggctgccacccccaacgcaagcaccagagagcaaactctctcctcccaggggcctgggaagtccaagctccagaactggaactcaggggaaaaaaggagccgggcggggggaagagagatgaaatctgagctcagagaagcctggagcggggcccaggggctacggagggtcagtgcctctcacgccccaggcgcactcccctgccacctgagtccctctaggagccatgggtgccaggccagccctctccaactcccagagaggtagtaagtgtaaggctcagagccccgcgcagcccagcccgcgccggggcggtgggtgggtgggtgtctgctatgggattattcttagcgctccactctcttcgcaaaagtggcgcctccgccctcccggctcaggcacactcgctcggggctcgcacgcccggcccagacaccagcgcggtggagagcaccgggtggggtccccgaagggtgaggctcggaggcgccgcggagggggggctccctagagaggagggggcgctgcgggaaggcccccaagggaggctgcgtttaaccctcgacgccctgcacccagcccggcgcggcgcgctcagccgcctccccggactcctcccggggcgcgggagcccagcggcgcgcccagcccttacctatggtggtgatgaccgtgatcgcaaagtagaaggagccggcgaatttccactggacgccggcgcggtgcggttccgactgcaggatcaccagctccagctgccggtagtcctcgctgctgatgttgtacttccccttgatccggatctcctcggctttgagtttctcctcctcgcgcatctcgtggtccgactcgagggcgtcgaacacggcggcgcccaccagcaggtaggtgaaggtgcagacgatgagggacagagtccgcacgttctgcctcttcatggccgccagcaaggagccggcgcggggggcatgtcccgcaggctcacagccgcgcgcgtcccactgcagcgcccggcggccgccgccgcctcctcctccgccgccgccgccgccgcctccaagttgtaagcggcggcggcagcagcagcagcagcagcggggaggcggggggcggggaggctggggggggccccctccgctggggccgccacagccaccgccaccgcgaggcggctggcggggcaggggcggcgcgggcccgggctcagccgagaaggcggacaggcacaggaggctgctcgagcgccggggccaggcgtccgggaaccccgacaccctgcgccagacccggccgaagcagcccgccccactgcgcagggccatgcagggcggccccgctgggtaccgcgcgggccttgctgccctccgcaccccgccccccgctcccgcgggaaacgcagggacgggaaccggagccagaaagcggccggagggcggccgcggggcccggtacccctgtgggtccagctcgcgggtggcggtgcccagcaaggagcctgcaggtccgcgcgcccagcggaacctgcttccccttttacccctcctcgccccctctcggtggtggggaggaaaagtttgcgaagtggcggtgtctctggagtcccctgcaagcggggagggggccgagcaggtgcagcgggaggggcagcccgctccccaaaggtccgcgcgcccagcgcccacccgggcgcgcgggtgcgcagcggggtccccgccgggcgtcggccggtgcgcgaagtttgctcggctcaacccccaaggcgcgggagcggggcgcggccccaggacggcagggaccgcgatggagcggcttcgggggcggccgggggacggcgcggtggcggtcggccagcccgctcctccgggggcggcgggcgcggcggcggcggcgggaggggtcccgcgggcctcgcggagcagcggggcggacgcgggcgcatgagccgcgcgggggtcggggccctccggcgtccgggcgtcccgggaggcggccgccgcgctggtctgccccgggcgctacgtgcgtgcgcgccgttgggagcccgaatgtgtgtgtgcgcgtgtgtatgtgcgtgtgtgtgtgtgtgtgtgtgtgcgcttggcagccccgctccggcgggagggcctcggggagcgggggccgggctacgccgaggccgggcctccctccctccctccctcccgcagcctccagggcgcgccacctcccgcctggtccccagccagctggcgaggctgctgtggcagctcccgctgcagacccagcgcggcgcagggcgcacgcggagggagcccgggaggggcggcctgagccgccagggagggggcgggggcggagccgccggcgggttttggcgggggatgggaggataaacgcggcttcttgggtccttctagccccgctccccaagagcgcaagcagccctggcgggtggagagtttgagggactcggggttggaggaggaaaacgggattcagccagagatggcaggctgacagcttcaggcagattgggcagagagtggggagcagaaggggagggggccatgggcacacaggagagcggcagcagcggttcacgaagtcttccccaccccccaccccccacctagccacccggcgcgggagcgtgtcattggccagggacatggcctcgtggagtggtggggtcccgagggctgcctcggccccctcgcctcccagcggcacagcccgcttgggccagcacctgcagacccgagtcgtttccctggagagcgctaaggacagcatgggccgccacttttggagtcaggacagcggggaaagacatcgcaatcccccgacccagtaacctctctgttgctttactgaaggaaaaaaaaaaaatacacacacacacacacacacacacacacacacacacacacacacatatatatatatatatatatatatataatcactctttgatatatataatcactctttggttccccacagctgggcgcaaggtgcgccgtg

SEQ ID NO: 587563 - DNA, 4001 bp, Homo sapiens
aaggaagagggtcaggccccagatcaggagaaggagaggcagctgtgagcaaaggtgaggaggaggaaaggcaaggcaggtctccatggcccagggcagcacagccacgtggctttcccgcctctctcctccagactctgcgttcactgtgggcagggacacattagcttgcatttatttcccccatgcacctgccccatccccaacataaatatttttaagggaaatcaagtgaatgaatgaatgatattactcaactgaggcactaagatcaagttaagaagaaataaaaaaacgactctaataagcagtaaagccatgaagacatcttccccaatcctccaaatcaaattaattttccctcctttgggcacccttagttcttctgtgattagccccacccacccaccccaaaaaaacacacaaaaaatcattattattaatatcatttactgagctcttactatgtgtcaggcatttcccatacagaatcctattcaagtctcacaactaccccatttcacagatgagaaaatcaagactcaccaaggttacagaactgggctaggtcatacggttagtaaacccttggtttcatctcaagtctctgtttctgaggctagaactcagctgtttctctacatccctatctgtctgcctattaaacactttataattttccaagcaagaagtccatcttacatgcccatatgcccgggataccttgcacaatgctgggcacagagtagtgtgctccatgggcatttgcagagctgaactgtatttaatcatctgtgtctattcaaaggctgaggtctttatcagatgggagcccagaagggataagctgggttactgtttgcctctccaagcagaaaaagaaccagatgacctcctggtacatgtttattgctaacggccctgcagtggcttccacaacatgcctcagcctggatccaccaaccttaagctactctaaagacaatgccttcgtggtggccaacaagattagcacccaattaataactaattttggaaagactgtgcaaaacagcttggcaaactgcatcatgccacacattagcttgacctgagagcaccctgcctggaaatgaacagatcaaaggggctgaaaacatgagcttgggagacccggactctgctctccttggctgctgggaatctgtgtgtccttaagcaaactccctccttccctgggttcaggttcttcgtcctttaagctgaaaagcagagctagactgggaagacctcttccaggtccaaaattctagagctccgggatacaattaaagccaagcaaggcaaccaggatgagtctatgtgtcagcaaaaattcccaggcaatgctaattactggcacttaaccaactcatagttaactccaggtaatttccagaggatttattacaactctgaatgctattttgtgagggaagcaatgtatatttaatattgacagtacaggaggcaagttccctttctccaagcccataaattatcccaggcgacgggaggacaaaactaccaaaggcttgttacaagcaggctgcctcccaaacagaaatcaggcttaatagaaaacaataaaaaagatgtaggaggagacgaatttaaagccagaagcacgtgagtggtgtgtgagacagcatgtatgtgtgtatgtgaatggcctcagaaaatcaaacgatagaagtcagagaggaatgtccaattcatctcattaccattagggtagcttcctgttcaatcccacaacaaacatttcctgagccccttctgggaacccagggtgagtcacatcagacttggtccccaaataagctatgcatgtggctctttccctctccccctgggactctgagtccatcttaggatgctctgttttcatatccccaaaatgagaatccaaagacttacatcgtggcgtgttctgcaggcttcataaggtaatgaatgcaagaacaagatttttaacaagtggtggtaacacagctagaaataaccctaaagcagggcagaatgggcagacaagggtcaagataaaggtaccagagaaaaccacaggcagacagtaaaggtttctaggacacagatgtggagaagacactgcaagaaagaagaaaaggaagaaggtggggaagaggtggtggaggggtacctgtgcgtgggccacacagtgattggctgtgtgtgaggaaagagactgaaaaaaaacaggagaaagaaaagtaatggagattaaagaaaaagaaggagcagagtagcgggtgagctgggttatgggagagagagaagaagaaaagaggacgtaaaccataagggagataagataaaacagaaaatcaatagaagtgcctaaagttgattcatcaagagacagcgccacgagcgcatgatttagagatgcaggagaaccaccaggagttctaaggacagaaagaacgagactgcctctggggaaggggctgtggcttttcatttttaacctgccttcctatatgactttgggcttgaatatatgtatgtattcctctgatagaaataaaaataattgaaagcatttttaagagatggaaacagaagttaccacggcgtaagtactacctgctgggcatcacccccagcgacttataaataccatctcatatttgtcatcccaaccacactacagcgtaaccaaatccccttttcattttcctttagctgcacttactttgtgggggctgttgtgaggattgaaagagcacaggtaagcagctacaaatgtgcctggaaaatgcaaatgctcaataaacgttccttcctattgtcaaagaatttgacaagcactcctcctttttcctgggagctattctgccccctgttttgtagcagctgtcatgccatcttatgatcctttcacccaaagacacaggtggggaataagggttctgcagtaggcacctgaacccagctaagtcagtgggtccctaacttaggaaggcaattacttttcttcactgtaaagccacacccctcactcaggccttcttgatctcctttggggtccatgagcaagcaagatccctgggacgcctcagctggtttaagatgggtttctgctaccagcctctgaaagtgtcaagggagttcaaaagcaaacgtcatgtaggcgtaggtctctccagggctttcccagaacaagaagctgagctctaagggggaagaaggagaaatatgaaaaaaaaaaaaaaaaaaaaagaggaagaagaagaaaacaaaagaaaaagtaaaaaggaggaggaggaaggatgtgcttgcagtgaattctgcgttttgattgttgctattttatagctaggaaaaactaagcaaaagcaatctctggtcacagctagaaaactattatttgcgtttctatctttccaacccacgatctgtgccatttggatttcatggtctaaaaatatctcccaaacttccaagtatgttggcatgggttgatggacttaaatttttaatccatttgtaaatgttttcacacagctcttttttccctctcaaattctatttcttgctgaatcacttccatcatttagtttggcatttatttgagcaggaaggaaatcatcttgaacacaaatgtcagccctggccccgaaggctcctgagagagaaaaaaggccaacacgggttagagactggtgaggttgccacggtacggcaggaagagcaccggcttcggtgtagactattctggttgcatctggctgtgtgaccctgagcaaaatattggacctctctgagcatgttcttcagctacgatgtggggataatgaaattcagtttaacagtgtttgtagccattcagtgggttagagccccatgtgtacctcctagcacaaggcaggagcttagtaaatggcctcattgtgaattttaggtgtcatcttgaaatgtgtcttgtaaagaccatgtgtatgcctgcctccgcatccctt

SEQ ID NO: 587564 - DNA, 4001 bp, Homo sapiens
gcttggtaacctccttgaagaaacctgttgctaagtctgaggtcctgtgtggacgcccccacctggtggccgaacctagaaaaacgtctctaaccaagaaaaactggcaggtagtgtaactaactccaaggctcctgagcccttccgaccacatcagtcatgggtgaattggaggagaatagagaggaaaatccactgctaaacgcgtgggggagagaggggggagggggggttgccaaggtcataggcaattccctgccaaaaccctggtacagtacagcttcctagaagcagccatcaggatgactaaaccagagccagaaggcagagcttgatggctggacgtgccctgccagctccgagatgggtgctgacagcacagatttccaatcttgaatgaggagcacccccaccatcctctcccccctcccaaatacgggtggattttccatccccagtggcaggtgcagagggagttccttcttccttctggccatgcatttacatcggactagcaaggagattctttctaggagaacagtgcctgggtgcaaacctccaggccaagcccctcacattcccggtgccctaggccagccaaagcaggagaagcagcagcgactgaggctgagggaatatcggatcccaaatcaaggagatgtttcagccaaaagagtccccggccccctcacctcctggctctgtgaagccccagcccctcagtctaggcttagacacacacgttcccattcacttccctaaaaggaatcctagaacatgcattttggccagtcccagctcccagtcagagcagcaccaggttcttctctgtaccagtacccagcgatcagaagggtggcacaagcaagcgacacacacacacacacacacacacacacgctccccactatgggtggtgcgcacccctcccatccccaactaaactcagtggcgatcccaacagaagggatccacccgaaacagaaacacagagctcacgggaggacccgctttatcctcttcaaccctcacattaattggaaaaacccacataattattttaagcttccaaaccaacacccctagaagatgtcataaatgtgcacccgcgcgcgcacacatccgcccaaatcagcaggggaaccacgcttcgttttttaagcccctagtgtggaacacccggagagcggcaacacacacacacacacacacacacacacacacacacacacacacccagggaaacgcgtgctgaggacgggctggtctccccttcagcgggaaagcatccatgggtcttaaagccccagagacttctcagctccagccccgaccccaagtccccaagcgcgccgccgccgagggcgccccgagcggccgggtactcacaccaacgcgtggtaaagcagcgcccagccccgcggtctctccagggcgtcgtagatcaaagtttggatgcgccggtacttggcgttgtttctcttgactgggcggctcagcggggtcttggccaggagcccgatgccctgcggggtcctccgctgcccctcgtcgcggccgccgccctccagcagcagggtcccgtctttgtcggctccggccccgagcgccaaggtgacttgctccacgtcgccgggcgccagccccactttccgctcctcgtcgccggccgccgccgcgtcccctccggctgggttagccgccccgccgcctccgccgcccccgtcgccgccgccgccagccgcccccgccgccctgcgcgccttgagccccatctgcctcgcccccgccggccgcttcgccttctccgctgctgctctgggaagaaggggcgctcggggtgcgtgaacgaggcggcggcggcggctgcaagcccgggaactccaatgccatgatccgcgcgcccctccccacccccccccaaaagcaggcaaaggcgggccccctggggggcaggggaggccaggcagggggtcagggggtcacatcccgcgcgggtcagccgcaggaccccgagggtcgcgggccgggggctgcggagaagctgggagggcgcgcgaggctggcgcggaggcgctagggcgcgcggcggcgggagcctggaaccggcgctccggggcggcggcggcggcggcggcacccaggccggcgagcccaagacagcatcgcagtttatttacaagcccggtgccagccgccctcccgcccgccagccacacgcgccgccgccgccgcctcctccctcctccgcgctcccacccgcgcccctccccgcccgttccagcctcagcctgtcagcagcagcagcagcgagcgcgccgcgggccgagagcacgccgcgtccctccctccctccttccccggggtggggccccattgtcccgccccgtcgcggcgggaggcccgggcggcggcgccccgcctcttcccgccgacccccaccgctgattgtctggggacccaggatcgcctgggctaccgccgcccccgttgcaaccaggcagtgcgccaggcggctgcagagcccggctcctggagctcccgtgggcgttggggcttcccctggatggggcgtgacggcgggcagttgggggaagaagaggaagggaggagggactggggggttgtcgcccaccaaacattggctctgtggttgcagctttgtgaatttccctcaccccctacccctgctcctcggcttcagaggtaaaagccaagttgtcgggttggtcaaggccgggcgcaccgcgaacgcacctgctctgtggtagcgaagctcgtgactccctcttccctcttccctcttccctcttccctctagttcgtggttcatggtggatgccgcggccctctcctcccccaatctttgaatagcaccttcacctgtctgggtgggcaaaggactgaagaaatgcagtcagaatctttgattcctgctttgctcccgacttgcacccaagccagtcattccctctctggtccaaatttcaattcaatcaaccaatctgtaacccctcgtgagcttccctggcaaagggtagtgatctctgtcctgaagatatgaggtctctgcactcctaagacctccgtcctagccggtggaagacaatgaaaagacaaattttaacagtagaatttccgatattggtaaatagtatgtggtaacaaattagagtgctgcgctatagtgactgggggagtcactctaaaccggctggtcgtggaaggccttattgtggaggtgatgcttcgaggtgagaccctaatgacaagctgggagcaactatgtaaatgtccagagagccctccaaacagcagaacagcgggtgcggaggggaagggtggcttgagcttaatgagagtaggccacaggcaaaggctagatcttgtaagacactgacaaaggacaggagcatcctgcacttcttccatgcccaccgccatcggggaagcctccattcctgctgccccatggcatctgtggcctcctttccttcccactctctcacctcatgtctgtcagctggggtgagagacatggggtgaggggagaccctgtgaacaaggccgaggatctatccctagtgtataagaaaagaggaatcagacctgcaagaacaccagctctggatttgcctggagaagttggccaaggagagcataggagacagggaagggaagaaggaagggaagggagtaggaatgtatgggctggggcaggggaagggtcagagaaccaccaccctatagaatgactatcaaaggggagaacctcaaaagaggtctccaaatcaagaagggaggagtttccagaggaagttaaactgtaagactgaaatcattaaaacagtgtgggatcggtacaaaaataaactctcagtgcaacagaattctttgtccagaaacagactctagcatgggaacttaatattaaacgggaagagttcatgacaagaaccccaggggaaaaggctgttcactggttgatgggttttgtgagg

SEQ ID NO: 587565 - DNA, 4001 bp, Homo sapiens
taggccaccacggagaagatggaaatccccacggagaggtagagcaagagcagccctacttctttgtagctgtatttcaaagtggcccccagggagcggaggccagtggagtgcctggccagctttaagatgcggaagatccgcatcagcctcaggacctgggccaccctgcccaagttggctaaagtaggtgtgctctccaccaccaggttcaccaccagagtgatgtaaaaggggacgatggacatgaggtcaataaggtttagggcattcttgaagaacttgaggaagtcaggggccacagcaaacctggccaccagctcaaatgtgaaccaggcaatgccaaagtgctccacgatttcgaacctagggtcctcgccagggttgccctggctgtcagggatttggaaatcgggcaggctattgaggcacatggtgatgatggaccccatcaccaccaggatggacaggatgctgaagaccctgctcagcactgagtagccggggttgtccagcgccagccacagctgcctgcggaagttgccgaggggctgcccatcgaacttggaggcgtcgttgtagaaggcaaggatctcatcgaaggaagacgtggtgctctcctggtcactctgctcgtcccacttctcctgctcgggctctactttgcggccatggtagctgtagctgcagcaggagtcaatgaagaactcgttgatgccccagtactcgatctcctggctgaaggagaagacacatagctcagccatgacgtgaagcttgccggtgtgatagaaatgcagcacgtaggggaagagctcagggttgcggtcgaagtagaactcccgctggacgtcgtcgtagtcatcgcagagctccagaatggcctcgcgcgagtggcagagcagcaagcggcccaggcgcgtctcggggaagcgcagcagcgtgtgcgagcgcagcctcctcttgaagccgcccacattgatgcggatctccccgtcctcgacgttagcctccgacacgtcccacaggctctggccggtcatgctggaggcgccggccgcccgcgccgcgcgggggcgctacacctggaagcggagggaacagcgtcggcgagagcgccgtgcgccctggcggggccccctctccctacccattactggcgggcccaggcctcctggtgggtcttgggtgctgaagggctgggctggggcaagagtttgaggggtctgatcccctcccaggaaaggctgggggtgggtatgtttctattagcacagctccaccccaggggtctcggtgggcgctttgcgcgtgcggggtcgcgtccccgcggctctgagcgcccagggggctgcatgctgaccttgtccatgggcaggcccgggagacgcccccgcccgctcgccgcagacaggcgggaccggagctgagatacgcacgggcagggccgggccgacacggggggcgcgtagctttggtggggtgggggggatgcgctggagtctggaaacccgggccgcgggaatgaggggggcggcccggcctcccctgggtccagatcccacgcctgcagcccccgcgtccccggcccaggtctccctgccggcctggcgctatgccccggggccgcgtgcgctgcgcctcacccagcggggctgcccgggctcgccctgcgcgttctggaagcgcttacctgggagcacgggtgcccgcggccgaggccggcgggaaacttccccaacccgcgggcgagcatcgcggcggtggccgctgcctgctggcggtgcgtgcgcgggtgcgagtgtgtgcgcccggcgggccggcgggcgggggccgccgagcgtctcctcccgtctcgggccgggtacgccgccgccgcccgcagctgccgaaggctcacaggtggctgcgtggtcccgccgctcccggagccccctctccggatccgcgcgcccctcacccacccagagaggcaggaacccgcgccgcattcgccccgtgagccggggcgggagcagagcgggtgtgacggggcgcccgccctgcgcggggcgcggcgcggtggtgctgaacggacagctccgcgtgcctcggccgccgcccgggctcggaaggcgcagccgccgccgccgctgcttctctgcgcttccccggcgcgtcaccgcgaccaccttgcgcccccggctcggcgcggggccgacacctctcccttccccccgaccatcccccggtgacagctgttattatcaccacccccagggcgcaggcagggggctgcctacggtgacctttccccgctgggtctggcgggagctgggctgggaaataaagggcggcttgcgcgtgtccggggacagggcgggaccggaggaactccaggtgtccccttttagggacctgaagaaaagtttcccgaagcccgggggtggggttgttggggaacaggagctggaggggaaaagagggggccgggaagtccaaggtggagatcggcttagtacgcggggggcgggagcgcaggccgcacggcgggggcgggagtcgctgagttctggtcgggagctctgtgtgggcacagtttgtgtccaggccggtgtggtgtgctggctgtgcgggactgcagggcgctgtgtgtgtatgtaggctgaggacagcaggacttttcagtgtctgtgtgtaccgcgttcattaaaatgggtcctctgtcggatgggaagatgcgtcggcacaggggggacctgggacgtgtgtcagcgcagtgtgtggcatggggaaccgtgtgctgtgtgtacatgtgctgtgtacagtgtagtactcttgggactgtgacgggctcatgtgtgtggaatatgttgagagcggtgtgcttgccgacagtggggactggggggttcaagctggagtggggactggtagatgtgctcaggatctgtgtccctattcctaagaagactcgtggcccagatctgagctcttggtctgctgggattgtccttaaggccctgcctactgggctgagctgagaaatggacccagtccctggggagccccctccctttggtgtttctctgtggtgtccacttgcaaagactggagcaccgtggttgtgtgagcttagcagggagctagcgtctacatgtctcggtcagaagtcctgggaatgcccttgcagggtggctctggattcatggtgcaaccaccactgccacagtgggaagtacattctttctttacgcaatcctggcaatgccgtcccagctgaaaaggtgctctgtgtagctctggagggcttggggcctccttggaggacctgtagaggaccgttaatctggcttcgaatgggggctcctgcatccaagtctgacccatccctgtgacccactggcttctggacatgtgtgtgggtgtgaatgcaggtgtgtttcctgctgagagggcttcacacccatgcccctgcaggcctctgcaaatgtggtggattccacagaggcagccacatgggagagggatagtagggtagtgagggccacacacacttcctctttcttgtgtatgacctttccccaggctttgggaaacttttcttcaggtccctaaaagaggaatccagtcctccattctgccctaccctcaaacacacacaagccaccctttatttcccagtgtgtttgtgtgtgtgtgtgtgtgtgtgtgtctgagagggagagacggagaaaaatctgatcttggttatccttgtcttcatctccctttctttcagggtctgtgtgtggacagcagcctctatctaggtctgctgggtccatcattggaggtctgtggctcccacacacctggctgcagtctgggagcccctggatctccttcatccccatgggggtgctgtggagagagtgccacccttgctgagggggtgtgtgcttcagtgcatttataatccctgtgtcagtgcctctttcacccttttccaatccccccttccacaccttcggcggggtgat

SEQ ID NO: 587566 - DNA, 4001 bp, Homo sapiens
acattaatatagaatactcatttgaattccatcataaaattggagctaccttctgtggaaaaacaaattggtcctaagatataataaactcatatttatagatgtaatacatgttttaaatgcacatttaaggagagaaattgtaactctccaaataatttttaaaataactcttcacagtacacctagatttctgatttttttttttttttgcatttgtccaacttctccaaaggcttagagaaaaacaggtcactcttaatttgatgtaataaaacaaatcattgaaaagtaactcaacttgatcaaactctttcctcaagattcaaaagcagaatggtacagcattctggttgctcaggctcacttcttaacattttgtaacatttgctaaatatttgtaattaaagggtatacctggatcgaagtgtagacataaattacacccaaagtaagaaatgaaaaatataggaaattgacaaatgtactgtcacatttttgtaatcacacaaaatgaacataatggagaagaagaacattgcctggagcagaagactaagaagatttaaaaatcctacaaattcagttgtgcattaacaacaacaaaacaaggtagaaacaaggaggcagatccatcatagctatttacccatatgtcagtatcccagaattctttctccaattattgtgccacagcttaaaatccataatgtagaaataatcaatagaataaacttgtttaggaacaaaatctataagcttcagtattggataattttcaaatatggaaaacaaaattccatattaccaataactttaaaaacttatcaatttatgaattatattttatgtaggttttagcactaaaagaaatgttttaagcaaattttcaatattatgatgcacaggtgaaatgtgttgtgttatggaaattgctataatctatcagagaaagaaagtttgggaagcaaaattggaaacaaactacacagggtatagtaaaactcttcacctttgacctctggtaatagaacatccattacacagcatttgagagctttatttcaagctcttaagcaatgccttatctgtataatacatcatttattctcatcatcatcatttgccagctgttattcaacaacatcaactcctgctaagcttgtttgggtataagaaatgtccttgcatctatgcctggatggcacaggcatgtatgcatgggcttctctgtgtatgtgcaactcaatgtgttgtcttcatatggtatacaaaaggcaatgtacacgtcagtacatatgcattatgcatgaacaatttatgaaagcaaggttgatgttgatgtcttgttccctttcacctcctttctatgacctagcacaattgtcttgttaaaattcgagatagaggcatggacataatgtttatgaactttttttcagaacagtgacctctgtttccagagctaacattaatcattatccatacaagacattgctttttccagtgatgggagagagaagaggcttggccctgtctcttcaggcctcagaatgtggcctgaggtctggcttaccaccctttctgaggcaccaggctatagaagctgactctgttagcttgaaaaactgaatgaagcttagatcttttactaaacacaaaactaccccaaactcatctctgacttcacacagagggatccctaacaaggaaactgaccaagataattcctgttcccttgatgatttgccattttttaacagatctccagatcagcctgaagatcaacaggatgatgagtccactgaagaaggtcacaaaggaagagagaatgaatgctgcttggatctcagttgtgcaggacatttttggcaagtcttcccaagtttcatttcgtagcttagtctgaaacatgttcgagacatcagtagacggaattgccaggtcatttgatgacgccgtggtcgcctggtaacaattccaggaatcagagttcactgtaccacagtgttccaacattaggcgtgataaccagtgagaagttccaggaacaagggtctgccaatcccccggtgccagctcatgggttgtgaatgaatacacaactggagatggctggggcctacaatatgaatagtcaaaaaaatcataattctagatcggattgttacgactttctctatgccttgaagaaatcccattatctgtagcaatgatcagctggttatcagttcagttaatgcagtcaaataatttcaaatcaactctttcggagtgaaacaacagccaactatgtgtgtgaatgagttggttctctatctgggaggatgccacgtgcttagtaggcttggaaggacagaagagagaagtactttaaagtttttgtttatcctttatacaaaggagcagatatgcagaatgaataagtctagaagatctagtgtgcagaacaaagaacataattaataaaattatttgtattcaggatttttgctaaaagagtagattttaagggctcttgttacacgcacacaaaagatgattaactctgtgagatgatagatatatgaatttgcttgactgtagtcactgcttcactatgcataagtttatcaaaagagcattttgcgtttgtacttgtatgcggaagctaaaacagtggatctcataaagatagagagtagattcatggttacgagatgccgggaagggtggctgaggaaagaagttggataaagagaagttgattaatgggtacaaatatttggtttgatagaagaaataacatctaatgttctatagatcagtgaagtgactatagcttatgataatctattgtacatttaaaaatagctagaagagaaaaatttgaatgtttctagcacaaagaaaatacaaatatgtaagttgattgatatcccaagtacacaaattatgtgaatgtattaaattatcacgtgacttgaaaatatgtgtatctgctgtgcatcaatccaaagaatatcacgttgtactccttaattacacacaatgaaaatcaagattatcttgaaacagaaaaaaaaaggttttgtttattctttacataagaaaggcatagtatagagtgcaggtattgaagaagacaatttaactagtgtggtcattggttgattgttatttcagcccataaatccattccacttatctcttctttatggaactctcccctttcttgcttttattactgccctggcagcaaaccttttggcccagcagaggtaaagttcagaatgagagaaatttctttgattttccctgatgttttcaaaggtgtaagaaatgtcatgcctttcagtgtgcacaagtggcaggcaaaatgtcagagcccagtggagggcctagttcaccccagttattaccaagataacctgacaccaggtgaagaggcccaagaggaatcatcacgctgtccttgggagcccgccatgactccacactgtttggcaggctgtttcagaagataactgtagcatttcctaggactgctgccacagttacatttcctgcttttaagcttacctatcatttctacaaaatcctgtcattgagctagctaataacaaagggcgatgtttaaaagaacactggtctaggagttaggagccctgcgttccagcccagtccttctattaagttactgtgtgatttctaacaagtcattttaatgttcgtagtcttttgattttatgtggaagataatacctacttgatagaattattgtggggattcaagaaggtagtgtgaacatattttgaaaagcataaaactcaatataagatgccattagccatttcagttccttttttgaatggcattaattataaagacaggaggaggaagaagtaaaggaaaggagggagagaaagaaggaaggagggaggcagggagggaggtagggagggaggtagggagggaggaaggaaggaaggaaggaatgaacggagggagggagggagga

SEQ ID NO: 587567 - DNA, 4001 bp, Homo sapiens
tcttctgtgtccttcttgaagtctaaagtttcactcagctctttccttctgaagtatcttttagagaaaacaatttggtgattagtctaactttattaaaatacagaagtataagataattaaacatggcagggaggtcagactttttcattcaacaaaatgcagaaaaatgtctattcatattttacttaggttgtgtcttacccacagtattcagaatttctcccttagaattatgattatttttccttttttttttttttttgagacggagtcttgctctgtcgcccaggctggagtgcagcggagtgatctcggcttactgtagcctccgcttcccaggttcaagcgattcttctgccccagcctcctgagtagctgggattacaggtacgcaccaccagcacccccgggtaatttttgtatttttagtagagacagggtttcaccatgttgtccagggggggtctcgaactcttggcctcaagtgatccacccgcctcggcctcccaaagtgctgggattacaggcgtgagccaccacgaccggcctggattataatttttaaaatgacactttcttagtagaagtgtatacatagtaaagctactttggattaatacattttattacccattttctggtaagaacagatgtttggcaggtggaacttttttgtgtgtgtgtaaaggaaatgtattcatgaagaaatggtagtaatagcaaggtaacctcagagttccacaatcattcaatcaagggaccaaccttttatcttctatatttaaaacaattctccattcaagtttttcaaagtcagtgttctaggtttgataaatgataatgctgcgtgccaaatcttttatccctatgcatgcatttttggagcatggcgtttctgattcatttattcagtcaccaaatatttattgtgggcctgaagtcccttgccttatacgttaaattagcatactcaaaaaagggaacaaagagattcaaaaagttctattcaaaagttggcgttgatgctttccagtcccccacccccaccccacctgtcagcccagaagtggccacaccttattgctaggcctggctccagcgaagcttgtgtaaagcctcaaatctacctgtgccttcctctctttctctgccgcgcccgcctccccgcccagccgccgcgtgcctccggggtacctgtccctgcagcaggaatcgatgctgagctcatcgatgccccagtactggatctcctgcaggaaggagagcgcgcacagctgctccatgacatgcaggcggccggtgcggtagtagtgcaggacatatcggaacgcctgcgagctgcggtcgaagaagtactcgttgtccacggggttggcatcgtcgcaaagctccagagggctgggcacggcggccagggccccggggcggcggtaggaagccaccaccacggccagcttgccaaggcgcgtgtgcgggaagcaggacagcgcctgctgcgagagcacgaagcggctgccgcccacgttgaccgtgaagcagtccccgagcgccaagggctccccttcaccctcgctgcagaagacactagagtccagggaggtcagggagccgctgtccagcggcgagtccagcagcgctctgccgctggaaggcatctctaacccagtcgccgcggcctgagggcgccacaaagttggggacacgccggaagctttggtcccgcgagggcggtggcacggcccctggtggcggccgggattccccgggctcccgaaggggttacctctccttggcgcaccctctccacccgctgtgcgccttcctcctcctgccgctagggagccgggagtgcgcggaagcagcgcacaagtggcagaaagaggagacagggagcagaggaagggtcgcgctaagagagaggatcaggtgaggtccaagcccgacacagtccctgtgcacactgccggtcgccctggcccttcccaaacgttgtcaccccgcctcccaacttcgcaattgcgattcccagcccaggaggtgtacagattgaatgactcgctacttggtgggtggaggggttggggaagggaggaaggagggagatgtggggcggaggaggaggaagaggagagaagatgactcttagctgaacgcaagcaagcaagcaagcaagggggatggcgagactcactcctgcccgcaggagaccaaaacaaaaagttcagaaagcaaaggaagtggtaaccgggtcccttccaacttgagaatttatattcctcccttttcttttactgctgcttcataggcctcccccggggtgttcgctgggggtgtgagcaggtgggggagggttctctgggtgagggggccgcaccattttctcccaattcactctcattctagtctgatgatcactgacgctccattttcttccgccgtctcccttaggttctgacctcctggttgagaaacaagaataattaatgatgactttttattgaagacccagtgggtcactaagaactaggagtgtcactgtcagctcccaccctgtcgagggtccacctcgtgttgaggcacttttttgaggcacccttccttttaaccatttctgtccctacaagtttcccggagagcaggtgttctgagcacagcggagctctcattttagaaggaaaggcaaaaagacaaggaatagaacaagcgtgggctggggcaggaatttaaatagtaacgacggcctccctcggtaaagggagaagccgaggccagcgcccaggtgagactagaagtgtacccacggggcccctggaagctgcgctccagccaacctgttggactcggggtgaggaggtgggggtgggagggaagagcaagtgactcacctgcagctcccggcacatctggtctgcgcacaaccggcgccgcaggtaacgtactcttcttttgatcctcttagtctacacgtgaggtctgactcgaccggtccaggagggaaactgtgttccagctgagctctacccagcgcctgctgccttgccttgccccgcctccacctccctccgggctcctggcccctgcgcttacgctaagcgtgtccgccccgcccgctctagctctgagagccactcgcccagtgcttccagcaccagcagaggggagtggcaggatctaagggagggaggtgagacggcgggggtggaggcggggggtagtgaggtgcccggtgacactcaatattacattcatcctgaatacacttgcagaattactgcatttgattcccgtttccccggatctgtgcttttgtaaatgctccagagcaaaatttccaactggatcagtgtgctaaacttgaggttagggcagttatattaactgcttcatttggcatggttcaaggttttcacattttcagcaggcatctcagaatcatgcatttttcaagtctttgccagagagagtgaaccacactcatcttcgttgttttctagtatgtatatatagaatacatattggaaagcatatattatggatacacttacatatataagtatatattagaaagcatacacacacacacgtattaggtagtatatataaagacataagcaggcagcctgatgtagtagaataagctttttcatagattggacagaaacgtgactgtttagttctagctttgccaactggctgtgggacgtctagctatcatttactttgagggtctcagtgccttcctcagtgaaatttcaagctttaatgaaaacacccaacatttaatgggtgcttactttatgccaggaaatttgtaggctctttattcatgcagtaccttatttaatcataatgacaacactatgaggtagcatatatccattttacagaaaggaaaagtgaggcacagggaaattaagtgatttgcaaagggccacacagttcaaatcaaacccaggactacatgtcagaggctgccttcataaacaaaattctagaaa

SEQ ID NO: 587568 - DNA, 4001 bp, Homo sapiens
actgccaacgtcttagaatatgttcatcagctgagcagtgaagatcatggctttgcttctttttatctagtactctccagtttggatttttacgttgtaacataaacatatttatatttaattatttgagatgcattttccccaatcttctgagattctctagcagaatatttttaaagtaaataaaatttaaatccaagaatctaatctagtcaaaactagatagcttaaaaaaaaaatccgtgtgaacaacaatatggaaagaccaactcagttaatttttgacaaccaaattgagtggatttgggagagatttagagcaaaaatatttatgactaggtttaaatatttgtcttccatgagtaacatagcagagatactgcattaaaaaggtcaaccagaagtttgtttttgagaaatattaccaattttgaacatactaaatctttcttagagtaacaacatacgttttagataacaggtagtagctaagtacagaacaggtttagaaaaagttaatagtgatgagaaatgtaaacttcgtgaacatattttcggggtagcattcatgataactcaagaactcgaatttatacgaattctgattttaaatgagtattaaatctctaagaccaaaagaacataaaattatagccaacaaaccacactctggttcgaattttcggagcatgtttactctacactgaataatcggaaagccatttttaatgccactggacaatttcactatttaaaaatttacagtgttccccgaatgtgcaggcagcagagtattttggcaaccaacacagcgagacccatttacctttaccttagactcgtaaaggctgagttacttctaggtatcatttagcaacgcaataaatgtctgcctcgaacagtgaaaatttcccaaaggagcagaacaactttcatgggtggggcaaaaggctgggaaggaagagaattcgttttggcttgctccagcgctggaagaacactgagcaccacactctccgcaaaggcctaacacagcaaaggcgactgtcaaatcgatcccttttgggtctgctgtacccgtcctctagggaatcaaaataaggcaaaataataaaaagagtacagagaagtttggcggcggcggggcgtgggggcttgaggcatctcagagaggagggcaaaaatcaacaagaaaatgcccccattttaaaaatcctgtctgcgacctcggatgggagattttgtttatccacgggcagtttacttctgtctccctgacccatctccacaggctctggtgctcgccgccactttccgagcagatcattactcagcaccggagccggcgcgcctcctcccgcaggcgggagcggggtctcggggagaggcgggaagaggcgcgaccgcccgggcgcccaggtgaccgcggccctccccgcgcccccgtccccgcgccccccgcaccaagcatccgggagacccggagcccccgggccgaaccgcgccggcccccaggcagctgaggcactgaagggcaggctcgggcacgggggtcctgagggtcgggaggaggccgcggggaccctgtgctgtccccgagcgcccccagcccgcgcacgcccacctcccagcccctctacccaacttcaccgctgccccgccagccggttccgcaccgtccgccctcgccccgacccccggcccgccgcgccccctcacgcccccgttacctttccgttcttggggctgccgttcaggaacagggtcacccgcctcatcgcgctgcccccgctgggtcctgagtgagccgccaccctcccacctggtcctcctcccacctttttctcctcccgcccttcccctccctccacccactcggattcgcctcccttcgccaccttcctgcccttggggacacaccacacgcacgcactctgtcccacacccaaggttcggccggtcctccttcccaccccgcccctaggctcctcagcctgcctggggcccttcccccacctctccgagactgacactctgccgtaccaaccaacccgcgtcaccggacagagtccagccaatcagcacccagtatcgggcgggctctggctaacctagccgggacggagggagggaagagacgctgaaggctagtagacgggaaggggcatcagccaatcagagaggctcctggagccggacggcggcttccagcgttactgagcaggcgcaccctctagtttaggtagcgcttatctgcatacgagggcggggtctggggaaaggaggtggagcgctgaaagggacccaagcaccagtcagcccctcctccagcgttagccccgcccacaagccggcccagctaggaaacggctgcggtagggacggactgattgggtaagagccagctcgtcgctctgttaggattggttgaatgagtcttttcgaagtttgcagcatccaatagaaaggtgggaggcggagttaaagcgctaagagaagcgttactccgcgagactctcctgaaaagtagtccccgaggtcacaaggcagtggcaggtgtctgtagtcctcgggttgactgcagctcgcggtggtccctctccgagcccaggaagccactccagtgccgagggagaggcctgggagcgctcggagtgtgcgcggactggagaagggggaggtggcggagtgattcgtagagtaaattcggtaccgaggggcggggtcggggatttgaatcggtcggcgggcggaggaggcgggtggaggaggctgccgggcagagcgcaggccaggatcagcgcaggctgtgagtccaggtcagccgtcgggacctcgggctccgggttcgaagagcggctcccggctgcgggtgctttgccaggagagcccttccggacagaggagccggggtctggaaggagcggccgacgcgacgctcgcctgccacggggctctgggagtaagcctgtctgcctggcgggccttcaggtgcggcgtgagaggtaggattgcatccgcgctgccacggggctgtttctccggggcatttctaggcactttgttcggcttaccctgcagcacagaattagtactcctgtcaggagctgctctgggtgaccaggagtgcatccggacctgttgagagaatttctggaaatggatagagctgcgtcttgagaggggtacccttatgattcaggttttcgctacggttgaaaagccatggcttatcctttggggtctgctttggtgcctgaacagcagttttctccatttctttctgtttaatttggctttaaaagtacgcgcttagagtaaaagaatggttagcacagggtgggaagtgtattggggatggatgggaaggaagtggagatggttaataggtagaaaaacaaagaatgaataagatctagtatttgctagcacaacagggtggcggtccataatttaattgtgcatttaaacataacgaagtataattggattgtttataacaaaaaggataaatatttgagataatggctacctcatttactttgatttgattattacgaattgcatgcctgtatcaaaatatttcatgtaccccataaattatacatctactgtatacccacagaaattaaaataaaaaatgaaacctgtgacgtgtgtttctatgccagtatggactgtattacaattcagtcctgaataaggtacgtgatcgaatcacgttcatcttgctggtggggttatttttcattgtttttcttcacctcttagatggatgccaattcaaaagacaagccccctgaaaccaaggagtctgcaatgaataatgctggtatgtgatgatctgcctccttgtgaagttgaaggtttagacagagagttgtcctcacccctacaatatgtcgtccgtttcaggaaatgcctctttcattttgggaactgggaagattgtgactcctcagaagcatgccgaattacctcctaatccttgcacaccagat

SEQ ID NO: 587569 - DNA, 4001 bp, Homo sapiens
gttcagagggcatagaaataaaacttaattttttttcttttatttaggaatgcatgcccattcactttttcacaagcccattttattaaagaaataaaaataagcctgcaattaaaataaaatgagggagctccataagtctatttctgttcaacaattcaaatattcttaaattcttggagacagtaaagagtctctcctccaccatcggtcaaccacacacacactctactctgaagaactggttgaaacaggcaaaaactggaggtcactgttttaaaatataggtatctatatacaaatagaatatgtctgcctcatctttcacttccaacaataaaaaagccagggcgagcactaagagcagcagatccgattcatctagggaaccacagactgtcagtgcacagtaattcctgcaaaaggtaacagatctgaccagatcatgttgctgccatttcccagagaaaagacagaccagtggcacccacacccatcttcatctgaaacacatattccaggaaaagtaggagactgctcccaggaaggaaggcttaatttaccgtgcatgccagcagatgattcaggaagccacaggaggaaaaagccaggggaacactgtcccgggtaggcgtgcctccagaaatctctgtatccctgacccgcagtacttcctaggatctttcacaccctgagctggctggagtcgtgtgaaaatggcaaggactcccttcaccactattccgaacctcaagccagccaccaatgagggtcacccaacccaacgccctccggaacggtgctcttttgccggcctcttctcccctactgacttctccaagggccagcctgcaaggcttggcatgggctgcccatcccctgggagggctgactgccccgccagggctgttggagcctggacacaggagagacaaagggctgggagggggaactgggctcctcccctgggaccacggagctcctctcctctcaggtgctggggtctgaccccaaccctcttccaaggtccccaaacttcgctaacaatgcaagcacctgttcccttcacctcttctgcatttgagtccctcaagtccttccattttcctccagctttttctccagtaccttagacaaaccaaacgccctacttccccgagtccaacacgctccccttccatgacataattcaacctcgttcccaacgaagcccccagatggtcgctgtcccccacccagaagtttcccctgggtgtgcccgagtccccaaagatttccttcaagtctcacccatgcgccccagccttctccttccaagtccccaaaattcacatcagggtcttcccctaggtgtcccacagcctcccaggtccccgtgcaaacgaccccgggggccacccgggcctccgtctccgccgcgtccgctgacagcagagggcacggaggggccccctgggcccccgcgtttccacccggcccccaaccgccgccggccggcagttaacggccggcgcctcaccttggttcaccaggcgcagggcgtgcgtgaaggaggggtccagggagtccttctccgccatcagctcgggcaggtacttctcctccatgctcgccggccgccgggcccgggatgtggactccaggcgcacggggggcggcgcccggcaacccccgaccccgcccgcgcccccagcggcggggacccgggggccagacgcggcagcagcggccaagccgggcggtcggccggaaggcggcggcggcggcacgggggcgggaaccgaccgctcagccccgatccccggtggccgccgagtacccagcgccggcggcccccgcgctccgggcgcgggccgaggaggagcgggcgcgggcggcgcggttaggcgggccctcgggccgagcgggctgcggcgcccctgaggcagtccacggcgatccccgccagtcccgccagcacctgccagcacccgagccacagctgcgacctgcacgccgcgcgccgccccgcgcactctgagccaccgcgccgagcgcccagcgcctgccgccggccccgccccgcccggctccgccccgccccgccccgcgcccgccgccccgccctgccgcgccgcgcctgcgcactggcgcccaccgccccgccgcccgccgcctcctggggccgctctccactgcgagtccgccgggactaaccgggcgtttgcgagagggggtgcgtccaagggcccctcccgcgtgtccggcgcccacctttggccctgagggccgagtggggagccccacgacgctattacagcctttcagatgcacggactgggaaactggggctcagagaagtcaagtggctcgcccaaggtcacccagcgagtgatcctgggaagaggggacaagggccgagctggagctgggaagggcgccccagttcgccccagtcgcgctctgaggaatagcagcgggaccgccctgctctctaaagcttcctggacttctctaagttatgtcgcgttgctgtcccctcgtacttataagagagtaaggcaggggcgccgtcctttctccgcgcctgagctcagagcgccaacctcctgagatccgccagctcagaggtcggttacataaaagcgcgtgcccttctgggcgtctttgtcatcccgacttgctcctgggttgtcattctcttaggtcataaaccggctgtgcctggacacagctgagtgagccgcgtctgagctcatccgctcctggggagaggccctgggacgccccgcctgtcggtggcaatgctctctgtccccttccgcccacccccaacccccagcaaatgctctccaaggccatttcagatttcccgaggcatgtggaataaacgtcccccaggaaggcgaaggactccagtccttgccctgccatttttcctgccttcaaacagccagctcaagtcccggcctcaatgtcaccttccctggacagcctctcaggacctccctggcaaagcaagtcacaagtcccttctctgtgtccccccagcttggtcagaggtcattcacagacagctgtaattctgttttcagtagaccatgagcatcagggacagagtttgagttttgtttttgagggggaaggtcaccagtgtgtagtacagggggcagggatggagggtactggaaatgtctcttggaggaataagtcagtggcataccactctcagccaatagcctgaggacaatcgccacagtcccccaggcagcccccccgcactcccaatgcaaatggaggcagctttacaaacccgaggggagtgggaggtggtagaaatcttggaagctctaagtcccagacccgagtactcaactgccctcactctcaaggctccactcctcccccggctaaggtgtcatttcagagtccccagtaagagtcttcttcatggctctcttcagtctcaacttgcaagaagcagaaaaatggcacagttaaaagcaaagcctctggggttaaacagcctggatttggaatcatggatctgctgctcactagctgtgaccttgggcaagtttcttcacctcagggtcctcatccgtcaagtggagatgacaaccaaacttatttcataagaagttcatgagaataaatatgttaactcataatgaaatacccaaaacagcactctgcctatcggaaatgctgagctgatctttgctttgggttttttccggctgcaaggctgtcctctgggccttctgagcctccctcgccttcccttcagctgtaactccagggatgctgggcagacacccatctgtggactcctcactgctggtcgtggtgcttcgccccggcctggccaactgagtgaaggacctgtgactgtcgcacctctgtttctgacctgggcccagcgtcaggcttgtaggctgcttgtggctgctcttctcaatcccaggtctatgactggcctctcagccccagaaacaaaaagggcacttcccaaaccaccc

SEQ ID NO: 587570 - DNA, 4001 bp, Homo sapiens
agaacatgaggaggataataataaccaaatatgttcggcaatagtaaaacaaatattatgggtctttattacctaggtaaatcacctttctaaaattctatatataaactttatattaaatttttaatgcaaaagcatatgagttatatttaatatacttttactgaaatgaactcactgcttgtaatctgttttgccccatgaagggcacttgtgttttctatttctaataatgcaagcatctcctgctaagtttttgaagatggaagaagttaaaacaagattagctgaaagaaggaaatcacttagttacattttatgtactagacctcctaacccggactagttatattttccatgtaacaaatggaatttccataatttgtacaaatataatttggctagagtatttggtaaatagccccctcgttggctgaaggactagtcctgaagaacagaatctaagaaccatcattaaaaatgcctaatcaagttgcagctaagaggtaggtggatggctttacaaagtgttaagactcagctaagtcttaaaaaaccactttagaattaggtccaaataaacactgtagaagaagctatgttaaattatcctttcagaggttctcttggtgctagggatcaagaacacttgaagatcagttttctcaatacaggctatattattattggcatgaaatccagagatcccactatattttcttattttcttttacaagtgccggtaacttcatttttaataatttggcgtggaactgtgattttcagtttgggaagtaatcctaatcaaaagacatgctttcaagaataaggcatgacatccttacaccaattaccctgagtacagaataatatttcttaaggaaatcgaattgtcgtggacaaacagtttaccctcttcagaggacaaaagaaggcaggtctatttttagcctttcgcaaaacctcagttccataaaggaagcactggtctccacaaatccattatcacaaacaaaatataacggttgctgatcaagataaatgcaagctgcatatattttccagaaaagttctgaaatgaggctgaacctgaaatcctgggaaaggcaggtgaaggacaattagagaaggtgtcccttgtagtgcacaaagacagtaaaacttcgccctcactacgcctcacctatgtttgagggagctccatgcgcttgcaatcaggagacccagttttatggctctgtgactttttttctttctcctgtccgatcataatcctgattccgatcccaggaatcagggccctgggaactttttttttttcccccaaatgcaaaggattttgacatcagtatgtcacaggtgaaggcattaaggcgcggcgagcagcaatgacttgcccaaactcacagcccatggcataactagaatgcaaatccacgtctgtcagcctgtaaaagtcctcactactagcctttcagttttctcaaaagcaaagagaaataacgacgacatccatacagcagtgttcccggaaacttggaaggatgagattcggaccaagcagctgaacggtgcttcctaaagcgaggaaggggtgtgcaaaatgatttccccctaagcggagacgaagagctggattacagcccccgccccagaaagcccctaagccctccatcccgagtcccccatccaggctgcacgcgactctgcagacctccccgtggccagcgcggcccagcggggaggggaagggggccatgcaaaaatggggcgcgctcactccatccccactcacctgtcagccgggccgcgccacggcgcacgcgcagggccggaggtcgcgcgcggagccggcacccagtttccacccctccctcaaggcggcggtcctcttctatccgcagtcccggacctggagcgggtcagaccccgacttccgcccctgactccccaggcggtcacatgaccgaagcggctgggagcagggaggggcatcatgtgaccactcgccggcgacggctgatgacgcaagagcccgctctcacttttcagcggcaggcgaagggggctgaggaaaggaggtgggtctaggcaggggaaattggggtgccaccagacggagacagcttggactaccaggtagggaagaagcgggggacggcaatggggagggtggcaggagtttcgccaccctcagggacactccacggggactccgagccgggggtccgtctacccggattatggttgtggaacttttcacgccacggtagtgagtctgggacagtttaccctcctgtccgagacgccatctctccatcctttcgcctcaagtgtgtaggggcaagattacgaatttttgatccaaatagattttgtttgaactgactttaaaagtaaggccacgggaaggtcgtttgaataaactctctggacctcaatttcctcttcagttatgtagattgcagtgagaattagcgataaggagaataaagtgccgggacaccagtttatggcattctgtaggtgaccgagaaatgatgatgtctgttgttatttttgtaactggccaaatctttattggtcccctattttgtgtgaggaattgctttatatgcaatagaatatgtcagggttctagtttaaggaggtgtcagtttaaagaagctgcagacatgtgagcaaatagttgtgatgagtttcataataggagtgtgttgtgtacatgtgcatgtgatagggataatggtagcatgagggagggaaaagcaattgtatgagaaggattcagagagaagggattatccttgcatgttgaaaaaggagaggcagctctggctgacttgtacaaggctcccatggatttaaaggaagtcaacatattgtctataaataacatgcagagaaaaaactcaggaaatgcacaacttgttctaaactttcttggagatcataggtaccgggaagaaaaagatcagtgttattacctggggagggatccaagagagattgatttaaaccagttattctcaactgatgcactattgacattttaggccagataattttttgctgtggggtcagggtgagggctgtcctgtgttttgtaggatgcttaagagcatccctggcctctgcccgctagatgccaaccacaaagtctacagatactgctaaatgtccccttgcgagaggggtaaaatccttcttggttgagaaccacttaaaccaagccatgaaagatggtatcttagtcaatgtgggcttctgtaacggaaatgccataaactaggtagcttatgaacaacagaaatttatttctcacagttccggggcctgtttcctggttcataggtggcttcttgctgtgtcctcacatggtggaatggcaaagcagctatctggagcatcttttaaaagggcactaatcttattcatgaaagtgggcctcatcacctcccaagaggccccacctcctaataccatcaccttggaagttaggatttcaacatatacattttgggtgacacaaacattcagactttagcatatgggtaagatgtgggcagatagaaaactgaagagaggccctggcacagtggcttatgcctgtaatcccagcactttgggaggccaaggcgggcggatcacttgaggtcgggtgtttgagaccagcctggtcaacatagcgaaaccctctctctactaaaaatacaataaataaataaataaataaataagtaaataaataacataattggtgtgtcctggcacacacctgtaatcccagctactcgggaggctgaggcaggagaatcccttgaacccaggaagcagaggttgaggtgagccgagatcatgccactgcactccagtttgggcgacagagcgaaactctgtctcaaaaaataaataaataaatagaaagaaaactgaagagaaggttttctcatggtgggagcaggatgaggaaaagtcctctttttcctttttggtgacag

SEQ ID NO: 587571 - DNA, 4001 bp, Homo sapiens
cttgatttaaatgtgatctctgctaagccttccccaatcaccccagaagaaagcatttaccatctgccctatgctctcaaggtattcaatgtttacctaagaatgaataaaagaatagaaatacatgataaactaatgaaggccaattttcctaaactagaatagtactaaactaattcatcacatgcctctttctctttttcctttttctctttcttcctttcgagacagggtctcactctgttgctcaggctggagcacagtggtgtgatcttagctcactgcagccttgaactcccaggatcaaatgatccttccacttcagcctcccgagtagctggggcaacaagatcaaaccaccacaactagttaattttcttttgtagagacaggggttgcactgtgttgcctaggatggtctcaaactcctggactcaagcaatccttctgcttccgcctcccaaaacgttgagattacaggcatgagccactgcgccaggctctttcagttttaactgttctctatttctatacaccataagtttgttctgatccaactactgcctccattgagggttttctaaatctcggctagaatgttagatatagtcattgaacaaacagtgctaactgacccacattaaatgtcagaccataaattaactgtcagtaagaaatgctaactcaaagttctccaacttttgacttttacaaacctataaaccattcgttaaattagatcacagctgtcaactttttattttgccaagtaaagcattatgatacaatcactacccactatcattactatctcataaaagaaagaacattttaaacattttccattcaaatatttattgagcacctacattttgctaatactgtcctaggcactggagatacagctgagaaaaagagaaattatatctgtcctcaaaaagcttgatacaagagcacacttgataaaaataaaaggaaaaaaataatctccaaagaaagaacagttctctaaattaagcttacattaagacagaaaaatgtgaagttcgtttttttttttaacaatttctccgtagacttcattcaagttcatttttggtctgctttcaggaatctttagttaaccagctatgtttaatctacatattgcagggccaattgtacattaaggggcgctcaagtagttttgtacagaaatattactccacaacattccacctccaacctcaaaggagatgtctgctgatgagtttaactataattctctcaactctcccctcttcgcaagtattctccgtgaatgcatctcattcctaatgtgtgaaatctctccgagagacaagtattaaagtttcaggccaaatcggagagcaccgtaatcctaaaccaagtaagtgtcacaactggggaacataattcccgacagaaaagaggccaaagagaaaggatttagaaacatcgtgattcggaaaccacgaagccaacgtaaactgctcagactccggcactactgtcaaacactactggcaaaccaagacccctcccaaacgccatctgaggtaaacctgagaaccctgatccttctcaaggcccaaacctgacaggaaaaataaaaaataaagccatgcaagcagaaaagccaactcgaccaaagacacggagggcccaagttaaagcaaggaaatgaaggggctgctgcagccctccctcagacgcgatgctcacacagctcgggggagggtgtctgtgtgtaagcgagaaattaaagaagcaatctgcagaaggaaaagtggagaacgcctaacggtttttttgtaaagatcccaagtcaagaagcagcgtcagaatcaagtcgccaagccttacctcagcgctcgggtgtttaaaagtatctaaaaataacagctccatcgccgagtccaccgccatgtttgccgcgggcggggaacaggggggaggacttccggggcagcgctccagcctccgcgacagcgactcaggagagggagaaacagagggacttccggtgaccagagcactagcgccgcaaacctcggcctatcccaacgcatcttgttgcccggagttgccggccccgccttttccagcgcggcggagggcgccccctagaacgcagagggggggcagagggaagtgagatggggactacggggtctccagtggttcaaaccctgtcgttcctccgcgttacagagctacagcggtctccgggtggcgaagtgcggagacggggttttggagacggtggatggaggagggggagggaaagctgccaactttggataccaaccccgtacacccaccgaaggggatgtcccactttttccagcgctgggagcaaaaagataacagtgagcgaggttgaaaagtaagacattgatttaaatagaagaaaaactgttgtttcaaccaacgaagagattctttgttttcttatctgtaaaatgtgaaaaatcgtacctaacctacagggtgattgtgaggagtaattgaaataaaattcgaggaattgtgtaacgtgaagtaccatgaacaataaaacaggaggcagaatgaaaagtaagcctctctgtcgggtgttgatgagctttggagcaacgagataaactcagcgggtttggtagtctaaatggcacaaacccttagcagagcaactaggaaatagcttgtaaaattacacgtgcctaccactcttctaggaaaattctcgcccacgtatctacaaatacaagaatattcatagcaaactttataagttgcaaaagagcaggaaacataagtgccattgacagaagtaataagtaaatagtggcgtatttatataatagtatatagcaggtacgaagaatgaaccagtgctatgtttactagcatgaaaaacccaaaaaacagggttggtgggcgctttggctcacgcctgtaatccagcacttagggaggatgaagcgggaggatcgcttgagcccaggagttggagaactgcctgggcaatatagcgagaccccgttattcacaaaaagaaaaaaaaaagacacaaaccaaaacaaaacaagtttaactcctctcatcgcaagccgggtgcggtggcgtgttcctgtggtcccaacttctcgggaagctgagacaggagaatctcttaagcccaggagttggaggccagtggggacacccatctcttagaaaaggaaataaaaaatatatagtgtaaaataacatctatatatttaaaaacgtgcaaaagaatataaaattttaggagtgtacatatgtcatgaaattataaagtcatgtattggagtaactaaaatttcaagatagtggtaaactggaaggagatgtaatggagaagaacagaaaggcttcacatgccttggtaatgttttgttatttaggttaatgttaatttcacaagcatgccttatattattgtttgtaccttctggtatgtctgaaatatttaataataaatgaatttctaaagtaaatctcctctccacatccttcctcagccatccagtttcctctattagctagctatagtttatcttttattatttgttcttgcattgatatttattgcttttaatatttttctgttttctgattcttgcctctttttttttttagaaacagggtcttgcttcgttgcccagcctggtctcaaactcttggcttcaagcaatcctcctgcctcagcctcccaaagtgctgtgattataggcgtgagccaccgtgcccccccccttcttctgtgtttaggcttatatgctgttctctaatttctaccactgatgtttatttttattcatatttcttatttattactatatgtatttatataaattttcccctaagctctcccttaaccaatgtactatatagtgcttttatagttgtcatttttacagtctgattttcttagcattgatatcctttttttttttacatttttatttttatttcaacagttttgagggaac

SEQ ID NO: 587572 - DNA, 4001 bp, Homo sapiens
cctcttaatgcttacaaccaaaatggatctaacagtttcaactgcaaatgagactatcagagagcaagtttccatagcaaccatctcttgccagtccttactagttccaaggttatggcttccaggtctgcctcccctcagcatacgaagaaatagtccccacctaatgttggataaatcaatctttcatctattttaggaaaagagcaaatcatcttattctgcaattttgttatgaataactccattttataaaagatcatctttcttggataaaacttattaatcaaatagtttttattttttttatttttttgagatgagtctcactcttgtcatccaggctggagtgcagtggtgtgatctcagctcactgcaccctccgccttccaggttcaagcgattctcctgcctcagcctcctgagtagctgggactacaggcgcttgtaccatgcccggctaatttttgtatttttagtagagatggggtttcacatgttggccaggctggtctcgatctcctgacctcctgatacacccacttcggcctcccaaagggttgggattacaggcatgagccgctgcacccggccaaataggttgatttttaagagtgtattgggacaagtaatttgccttgcaaaatatttttccattgcaaaacaaacaaacaaaaaaaaccttgtcataggattccattaaatatcaagtttccctgcatatttaaatatggcagatgtcatgtattccttacctgcatgtatttcaggcatggattttttccccccattttttggcatgtgtgttttctggtcacacttgttgggaggatatgagaaacacattccctagactcatgaacgatctctggcagcaaatgagcagagtggcattataaaaacaatgcaatccaagaccagatgggacctaccttctccatgaacttgagtaccagtgagtggcagattggtccaggtgacatttggtttgttagccctagaattctctgttaacaaaggccactattttggcctaaaaaatggtaatataacttctaaaaatctactttgctttggattaatctggcttcatttaaatataatgaagtgctattttcaatgagtaagattcctctaatcctttcttactcaaaagaaattggaatgaatcataaaaaaactgcaataccaagttgaaggtttaaatagttaaaacaatcatatgtgccataaatacattttggagttaagtcaaatcagtcaagtagttgaaacaatttttttaaattagataaaataaattacattgacatttctacacagaacggatgttgagtcatgagaacggactaaaccgggtcaattattctcatggcaaagggtgaatgtgtgatctggctgccttacctcctatggagatgatggcatcgaagccctcatccctaaaggggagattaaggttgtcacataccatggcttcacatcctctattccgggcaatctctaccagtggcccacagtagtcacagcccacggtatgtacctggctgttcactttaagatattttccagtcccacaacctataagagaaaaacctgcgttacatgctatcctcaatggaaaatgtgaaatacttcatttgtctcataacaagaaatataattaaccttttatttatttatttattttgagacagagtctccctcagtcacccaggctggagtgcagtggcgcaatctcggttcactgcaacctctgcctcacgggttcaagcaattctcttgccttagcctcccgagtaggtgggatcataggcgcgtgccaccatgaccggataattttgtatttttagtagagacgggtttctccatgttggtcaggttggtctcgaactcccaacctcaggtgatccgcctgcctcggcctcccaaagtgctgggattacaggtgcaagccactgtgcctggccaactttttttttttttttaactaaccaagacagaatacaacatggtgtgaaggtattcacaaaagcaaaagaaaagccttcggcgaatacttacagattctcatatagaagagagaaaggcaataggaaaaaaataacatttattgaatatttaatgaggtgatgtccacagggctcagtacactggcgcaaccaaggcacgttagctggtccaaggcaagaaagatagttctagtatccgagagaccacgtgtagcctctaagctcacattcatatttcattttgtatatacgcatgtttcggcttttattctcctgttgtctctccaaagattcttaccacttgctgactgcaaaacaaacaactgtcaacaacttttctattatttatacactaaaacatgcctttcaaatttttaaaatttgaacttgaattagaaaagaatttttaacattgtttttatccaatctctattcattgctacatttaaaatgatctctatgggtccagtatacaactcagattataaaaactactttttttcttaaatagacaatttttgatattcactttccagtagcagagacctaagtaattcaggatttacaaagcccaaatatttagatcattgaggtcttactgatgttatgattgaggtaggtagtaacatgaatgaataaaccaccttgaaacaaagccttctacagtctaatacttagtattatattctatcacagatatataatctaattactttccagaaatattaaaagaaatcattagagcctatatttgtacttattggcattactgatgaaatttttctacctgaaaagatatctaccactattcaaagatgattagtttgctgcttctgaaatacatcaggacactaataacccctccttactaggcactttcaaaattatgatacagtaaaagcaaacttaagattcattaatgccagctgagacagtggagaatatatgaataaaaaataaaatttggggtctggcgcggtggctcatgcctataatcctagcactttgggaggctgtggtgggcggatcacttgagggcaggagttcgagaccagtctggccaacatgatgaaacccctctctactaaaaatacaaaaattagctgggtgtggtggcaggtacctgtaatcccagttactcaggaggctgaggcagaaaaaaatcacttaaattcaggaggtggaggttgcagtgagctggggtagcatcacctcactccagcctaggtgatgacagagttagattttgtctcaaaaaagaaaaagaaaacaattccaggattattatttctacgtaaatgtgaccatattatttctatgatattatttctttgatctcgtagccacactgttcccaataatgattatgagaaaaagtaccctctgtttgaaggcaatcatggggaaaatataattcacaaagtattttaaaattaaaatcctgtgtatttcaaaagacgatggtcctattttaagaaaaataaccttgcaattcatttgctttttcattggctcgagggatactttaggagaaatgaaagggaaagttacttcaatgatattaataaaatcagactcatacatctttagaatgaggagggcctgttcagagagcattttgtaataagaaggaaacagaggtcttttctcctgacatgcttccagtgccctagaactcttgatttgcccctattcatttctaatggccttcatgtttaaatcttgaatgtgaacaataaaagaattttaaatattttttaatccaaactattgtctattcatcaaacagctgatgactttagctaagtggaaaaacctagcaacagaaaccatttcctttagaggacagtcatattaccatctgtcttttcttctcctcatccctttgaacttctttctttttcatttctttcttctttaacttcaatttcattaaaatgcatctttcattttgcaatgaaaatatgaccctatttattgaatagttta

SEQ ID NO: 587573 - DNA, 4001 bp, Homo sapiens
ccattattttacttatcctcattggctatcacagtccttagcacttagaactcaatgcacatatttgcattaatatgcatgtgttgccataagcctcaaaatgtgctgcatgatgcttatgtcaccatttcattcacttcagccttgaccatctattttattcaaggacgtggtctaaggtactggctcttagccattgagggtgcttacctattattagcttaatggagacttaccaaaaaaattactgtatttttacccacttttctccacctttccaagtcatcccatatttttttagtggttttagctagtttagcatgataacatcttgatgcataaggaagtggaatcatcaccaggctgaatggtagacccgggtgagcttaacttcagattgcaggaagaaattgtgaggtgtgttccagtctctcagactgatctttaggagactggagacaaaatattccaacaacagggataggcaaagctcaagctttatggcctcattggttttaaaggattccccacagtgacccagtcagaatggactgagaatcaaagagctcacagctgtttattagtcagcacaatttagagacagacatgctaaccaagagctgtctttgtcattttgggatgttcacgggctggagtcccagtagccatctcctaaatcctaaacccttcagttcttcagccattttgctgctagaaagtgtgtagctgctgcctttatccaaggaactgatatcttccacacctctgaaacctggaagaccttctcaaggtacatagggaacttcctggcattgggaataggatggtttcttctcttatagggttttatgcaccaaaaagagaaatgccacttcttctctttcttcctgaacttttaaaaaagtagtcctgccaagtctcatcatttctcaagcacctgtccttggtcctctgcttttctctctatataatctccctagacaacctcatccacctttctaactgcaaggaaaaacgctgtgtagatttctcaaaattctgtttctctgaattggtcttctcataaacctgcagatcccatgctctcatcttgcttgacatctccaccagggtgacatcaacacattcgaacctgaggtccttcgccctccgtgcacctaaagcagctgcccttttctttcttctacaatctccgtcctcccagtcacctggcacattcttagactctgcttcttcttgcccttcatagcccatgggtgaccaccgtctgacaattttgtatctgtactgcttttatttatcaactctgctcccttcttattgtttctattctagttctttatgtcccattacttcccacctagatgattacactaattgcttaatctgctcttctgattgccaaggccgtctcttccataaaagataattccagacaaaaagctattgtctagattaatctttctgtcctaagaatgtatcagttcttgatctagatgcttcttacatttatcactaacctttgtataaagtattattttattcaacaaagattcattgctgagcagtctgtgagaaaagcaatggggagcaaaacagataagatatctaccctcatggcacttatagtctcgtgggatgacaaacattaatcaactaatcacaaatatcacaactaaaatgtgcaaccccaaattgcaacacataccttgaaggaagactgcagagttgctaggagagctcacaggtttcatcactttcccagagggaggactgtgtaggattcagccttagatcctgaaagtctagtccagagccctgcacatggaagtactgaataagttgaaggaacatatgcatcaagaaaaaaaattcaaaacaaactaacaaaaaacacaaaaaatgaaaaaagaataaaacaaagaaaaaaagccaaaagaacatgtgcatctacttctgacatatacatgtgtgatcttttctgtactacacaatactgaataaaacacacaccggatgttccctcaaatactgacctcaacacatagccacgttagctgtttgcttttgtttccatgaccacatgtccatggggcatctaatctctaaatacaccctattttctttgccagcatgacaacatgtagaaacttgttatcctggtagcattaccaagaataattgttgctttatggtgaaagtttttaggcatgctttaatactttgctgttatcaccaacacaaacccatcatccctcttccctacagtttggaatgtttgctgaagatgtcaaacaacattgtttcttttgccccttgggaaactggttcatcctccagctgtcctttgtgtcattcgccagcttcctctccatttccaaagctgtttgagtattacctcttcatcctcatgctcttaccttttgtctgtcactctttcatcattctgctattatgatcacgtaatttttggagtcagcttttcgctggaacactgagtgacacatatcacttggcttattttatctctttttttttctttttacaatactattagataatttgtttcaagaagcacttttgtgcatagaatctcaggtctgatttgggtgtgtgtgttgtttgtttccagctttgaatgaacaaggactggaaaagatgagcttatttgtcatggtaggaaaagaaaaactgcaaaaaaatacaataaatttcaccaacagagaatgtgttatataaataagggagcaactacatgttaaaaaatgcagagccatgatcctgaagacaatttaatgacctggagatacaatgcagtgttaaataaaaagcagtttcaccccaatattttaacattatatagtatatttacatatatgtaggggaaaatgctggacaaccatacaaaaatgtgactagtgattttctctaggtgatggaattttattttcatatatatatatatatatatatatatacttttttttttgagagaggcagacttgctctgtccctcaggctggagtgcagtggtgcaatctcagctcactgtaatctctgactcccaggttcgagtgattctccttcctcagcctcccaagtagctggaattacaggcgcgtgccaccaggcctggttaatttttttgtatttttagtagagacagggtttcaccatgttggtcaggctggtttcaaactcctgacctcaggtgatccacccactttggccccccaaagcgctgggattacaggcatgagccaccacacctggcctcttctatatattttttaaagggaaggggattctatgcagtttgcgagcaaagcatatccctatttatagccacaactcttgtctcataaattttattgctatttcatcactgctcttaccaatgaaatatgtgaggagcagtaccaacatagtactctttcgttctctttattattattttaaattctcaagtgcaaaagtacgagaaagtccaattgtttcaagtgtagaagtcacaatgacctcatcattctcaccgtaaaaagctattttatgtctatgtcaaaaataaattacctattgtatttacatcctgttttttaggtgaaggcaaatgttggctccctggctaagtgtcttgatgagatctacctattagtaatggtaatcttgggtttgtatgacagtcagctctaggaaaaatggagaaatagggtcactctgtgtgtgtgtgtgtgtgtgtgtgtgtgcattatgtgcacttgtgcactcacctgtgctcgtgtcatccctagagatttgattctggggaaaacaaagggtgaattttgagatagttggtttttatttttctctggagatatattttgaactttttgggggatacaagttttgagatattttcaaataaattaatacttaagattagatcctaatgtatgttactagaagttaacgcattgtaaaatagtttcagaaagctgtgccataagaaaattttgttc

SEQ ID NO: 587574 - DNA, 4001 bp, Homo sapiens
cacgtcaggaaatataaggctaagaatgggcactaagtgaacacaggaggtactttacaccaaataatgcacttctctatataggctaatggaatctatgggtaaacctcaatttcaaaatgattgttgaacccaaggatcagctcacatccgttccacagctaaaactattattctttgccttcctctaaactctgatgtttattacaaccttatcaatggcaatttataagagaaaagcataagaatttccctcaaaaagtgaaaccaatggggaaagggagagggaaagggctctaaatatctgagatgtcttttgtggtggttggttagcggcctctttttagcactgacatttccaagttttttgtgaaaaggaaattttaagaatgtgctgaaaccatcctttcagaatcaattcccagataagttatgtttcatttggcttctttctttaaattattgtgatggtaaactggaagtaaactgaaatacagatacctgaatatttaaaaactgatgcttctgaaaattttcagaattgtatcgacgtttattgtgtgttgtcagagcacgagattagtgaagcaaagcaggactcaatcttgcactagttgagaacttaaagtaattaagttcttagggaaaaaaactcacctgacagctttaatcggacctagcaggaacaggacaaaacaattcccatagatgagataactccaagcgagaaaccaatttccccgagaaggacaaaccaacaaagcttatgtcaactggttgatctgtatgtctcaatatatacaaaagaaagcaaagaagaggaaaacaacctataatttctacataaaaattaaacaacacttgattttgctaagaagctacaactttgtctctggtacttaaatgattctaattagttcaaagtctcatcaatggcaaagtcatctcctgagacagtaatagtgacccccaatgacaggaccttgtatataaagcgttttcaaacacattatcttatttaaagcaactcacccagtcatgctgctttgactatcaaagccaagacccagcccacctcctcccctgacttttggggttctctccactccccgggtctacagattatttaaatgtactcggtttatctgccttctctacactccctgcagagttaagagaatgtcagaaagatacaattccacaagaatcttggcactttagctatttattgagagatgatgaatgagacttcaggcaaaaccaaaactttctcaactgtccaaaaacaacgaaaagggcatctcctccacctgaccccaatctcaggacgcccaggtggaaggaactcgccgcggggcacccgcctggccccctgcccttcttcccgccgcgggccaaggcggtgcaggcttgggcgacccgggcgagacgcggggtcccggggggtcccgggcggtcccgaggcgggctgcaggggctggcgacccgcgcgcgggggcgacgatgacagctggcggggaaggagcgaggctgaggggccaggacgaggctgggcgcgagggccgagggcgccctcgggaacctccgggggagacgagagggcaaaagggcgcaggggcggggcgggcgcaggcggaaggggcagcggggccggcacgaggggcccgacggcgccagggacggggctggccaggggggaagggaggggagaagagggagccgggcgtctcagcgcgggagcgggtttcagggtccccgggcccctcctcgcgccccgccgctgactataggggcggggccgccggaccccccacggcggccgagggaagggcgcgccaggcacctgccgcctccgccccggcggcccaggagggctcggctctcacctcgccggttcatgggtcgtatccgcaccgccactttcactttggagtcccccatcctgcagccgccgaggaactcgttcggcttccgtctgccgcggccaccggcgactcttcggggttgacccggcgggagggggccgggggcggagccgggggtggggaccgggctgggggcggggccggcgcgagctccgggcgctccccgctgtatggcgggacttgtagttccccagggtcgtcgtgggcggggccgcagcgaaggcgggggcgggaatgctcgggcgcgagtcgtttgctacaacttacctacagcaatgacggcttttgtaaattacacaccattcttgctctcgcagccagtattgagaagtaagccttcaagagctgatacctcttctgaaaaacaattgaatagatggcgtcagggaccccgctacctcttcctgctcatttcctgccaatcttagtgtttgatccctggctcaagttatttcctctgcctggattgacgtccggccttgtttgctgagctcgtccttcacgacaagttgcaaatcacgttttctgggagtgtccataggtccacgggttaacattgtcctgtgagtccccctcctttgagacaggaccttgggctctgaaaaccatctgagttcaaagcccacctcagcgcttcccactgtgtgaccaggggcaagttatttgaccgctctgggcttgtctttaatatgaaaagtggatatgatactaatacctagtaaaataggtacatttttaaataagattaacatatgtgtaacctagcctttagtagagacccataaacattaattgcatgaattaatgaatgaggccacactaaaattagctttttattagccctggcagacattctaacaggtggcctgggtgccagagccagcacgcaaacatgttctgtttggcccaacagtgttggccaacacataaaaatcagatttgtggccaggtgcaggggctcacacctggaatcccagcattttaggatgctgaggcaggaggattgcttgaggccaggagtttgagaccagcttgggtaacagagtgtgaaatcagatttgtgcatgcagtactgggcctacattacatattggacagagtggattggaactaaatagcagcagccacctttatcagagacccgtctctccacttcaccacggcccccctccaggtggctttaccacacatgcgcctggaccttgtgggtttgtgacccctgcttagatgtgtttaaatgatagtaatagaactcagaaccattttacagatgagtaaatacagaaagctggtaagacttgcccttttaccaaccatcctgttattgagtatcttcaatacaagcaatgttgtcaaaaagtataaaaatacttttttttttttgagatggatctagctctgtcacccaggctggagtacagtggcatgatctcggctcactgcaacctccacctcctggcttcaagcgactctcatgcctcaacctcgacagtagctgggattacaggcatgtgccaccaatcctggctaattttcatatttttagtagagacgtagttttgccatgttgaccaggctggtctcgaactcctgacctcaggtgatccacccacctcagtctcccaaagtgctgggattacaggcataagccactgtgtccggtctaaaaatacctttaaaagaaaggaaattctgaaacatgctgcaacatggatgatgggccttgaaaacattatgctaggtgaaataagccagacacaaaagaacaaccactgcatggttctacatatatgagatacacatggtagtcaaattcatggagatagaaagtagactggaggttactaagggctaggagaagggggtatgaggagttagtattcaatgggtgcagagattcggcttgggaagatttcagctgcggaaatgaatggtggtgatggttgcacaacaatgtaaatgtacttaacgccacctaaccacttaagagtggttaaggcagtaaggttttttgggtttttttagagacaggatctcgctctgtttgcccagactggagtgcagtggtgtgatcat

SEQ ID NO: 587575 - DNA, 4001 bp, Homo sapiens
gagctctagcaatgcctctgcctcctcctgcgggagggtgggggccaggagggactcagagagggacggtctgtggtaccatttcacagatgggaaagtcaagtcaagaggtgggcagagctggctgtgaacccatgcctcccagctccacgcagacctccttcccacagtccctctgctctcctggggtcagccactcagaggggccacggagaggggggtcttcccattggcatcagcctccctgatggggctgccctacacagaccatcccgggaggtcctgaggaggctcgggccctgtggctgcatgccaggtgtgcaagagccccaggctgcaggaacggctgcagctcgggagcagagtacctgcggagccctgatggggggcccggggccccagtgcagcaggaggtcccgcatgagactcaggctctgcttcagggcctcgttctccagagtcagatgctgaacccttttctctgagtccgtcgccccctggtggagaggaaacctcggcactcacctgaagcaccccctccatgcccggccctgccaggtctccctgcagcctcaccacgcccaggcgcagtcgacccaactcctcctcctgctgttccagctgctgcttcagctcctccagctggggagaagtaagagagacagggtggacctcctttttctggcgtcccagccggcaatcccttctggctccagggacctcacctgtcccaggatgagctgctccagccgctgccacgccctctgatcctcctccaactggaggggctgctgtccctgggtctcatcccccagtggctcgcctgggactgcggtgaagtgggaagggctttcttcttgggatgtggatcctggagtagggtgggcccagttagcactgaagaggtctctagtccaaatcttccggaacatgaccccgaactccaggccgcccaggttctaccgggatttgctccctccagagttcttcttcaacttactgtcctttactcaccatctggagaggggggccggacccgaggggctggctgagtcccctggagcagggcctgcctccccctggggcttcgaagccatgccagaagggccaagagctgactggtcactgtcaacagtgaggggacctcgccagactgcgaaggagacaagaatccgagcagggctgtgaaagccaggaaggccggggcaggtggtacctgccagcagccccctccgccgcgctcacctggcccaggtccgccgggcccccgcagctctcttccgcccccagctggacggagaggaactcggcgaggcgcagtagggcctcttccagggacaccgcggccgcgcggccctcggctgcgccttccgacccatcctcaggctcggagctggctgccggtcagggaggagggcgggagacatttcgggtcacgtgcttgagccaggcctccgcccctccctgggaggtcccggcaccgccctcgcaccgcgggactcccagcccgcacctaccggccaggccggtcagctcggtccacagctctggcgcgggcaggtctgggcgccggcgaccccggggcttgcgggctctctagggagggggcaggggcgcccctgaggaggggggcaggcagcctgctggccccttccctccgcgaaccgggccggaggattggggccgaagtctacgcttccagcatcggggccgagccgagggtcctcggcacggccccgtcgccccgcgccccgtgcccgcccccgccccgggaacctcggcgtgggggtggggcaggcggcgggagacgacgggctgcacggccagccccgctcacctgggcggggtccccgggctccgcggccgccgcggcgccaccatccctgcggaagaggctgtagaagatgtagatgagcaacgagtaaaaggcgtacatgggagcgcggggcggcagagggccccgcttcgcgccgccccgcgtccccgcgcccagactcggcgcccgcccgccgcagtgccggtgcgcatgctcgcgacggccgcccccacggcccggctcccacggctggaaggcgagcgcggggacgggggtactagaaacaggtgcccgcggccgcacctggagacccgccgtttctcacggcgccgcccggcgcgccccaacccctacaccgcggacaccgggctgagagcgcccacggctcccgcgaccctcctctcggaatccctcccaccctccgcgtagtcccccaccgctccggtttcgcggagccttcaacacgccggggttctccttcctctccctacagccccgcccatctcagccccgcccatctcagccccgcccagaccccccctcctcgcagccccgcccaaaccccgttccttgcagcctcgcccaggctcctcccctctcggtccctctcagtctcgcccagacccctctcctcgcagccccgcccaggccccgcccctcgcagccacgcccagacccccccatcgcatcctcgcccaggccccgccccacccaggccccctccctctcagacccgccgctctcagccccgcctaaaccttatctccctcagccccgcccagaccccccgcccctcgcagccccgcccagaccccgcccctcgcagccccgccccggcccttctcccctcatcacgctccttccaaaccactatgcccacgcacgcacccacccaaacagagcgttttctggtccccgagctcctcccgaccccacccgctcctacggcctccaaccggccccccccaggtctcgaccctctcccccaggcctcgaccctccccccccagccgctctagccccgcccggccgctctagcctccgctcctctcgctggtggaggttcccgaccgcgctcgctcccgcaactgggggcacggcagaggaggcagggccgacggcggtgggcggtgcgttgcgcaggctcgggcctcccgctcgccgctgcgttgggaccgcgcagcccggtaactgcgcacggctggcctcccggagtcctgcgccgtcgctcctcctggacccgggttcccaggacaacgcctcccggaacgcagggagcaggccgaggccgccgcgtgggcctgcagcgcctcgccgctctctcttccccaggcccgcactcccacttgggctccagggccccagggctgacgttccccccagcttagaccctgagtcgttttcccccgtttcccggctgaattaggttcttcttctccacaggtgtgtgcagtggcctcagggatccggaaagtctaggactgaacttctcctaacatccagtaatggggacctggaacctgggcttactagagtgccgcgcgtagggctccaggtcgctggcttctgcgcttccttcctctccaaagttgagtatctcctatctgtgtcctcgtacatactgccgcctgaggtgccatggcccccaagccgggggccgagtggagcacagccctgtcccatctggtgctgggagtggtgtctctgcacgcagccgtgagcacagccgaggtgagtacactggggctgagcaggggcgcatccccatacctcccaaaccccaaggacctagtttcctgaattagagagaggttggtgggaagtgcgtctaagaccaggtctccatggaagccccaaaccctttcctgtttaaaagggtgaccccggcctctttttcccacgtgttctcccttccctgtgttgacaggcaagtcgaggggctgctgctggcttcctgctccaggtcttggctgccaccaccacgctggccccagggctgagcacacacgaagactgccttgctggagcctgggtggccaccgtcatcggccttccccttctggccttcgatttccactgggtgaatggggaccgctcctctgccaacctgctcctgggaggaggcatggtgctggcagtggctggcggccacctcggccctgagggccgctctgtggctggtcag

SEQ ID NO: 587576 - DNA, 4001 bp, Homo sapiens
agagtgacttgaagtgtacagtagatggcgctggtgccatcagatttgacacttgagagggttcaaagtcagaaggactgtaaggtggagtcaaacactaaagaaaagggaaatacatagcatgagaaatctacagtttattatataaattttaagaaattatataatttacgtctatcttaaaaacaataatacttacaaatgctgggattgtatgaaaatcaggtgttcccggaagcagattctcttcctctgacaaatcagatactggtgtaacaggtctgttttcaacgtatttcttaaaatcagacttccaactgcagctcattgacataagtgcttctacagcttcaaaatcacttttctctgcagttttgttccaggaatacatactctcttttggcctttcagaaatcatttccattctttcctcctataaaaacaaaagaggaaagcttataagcatattttttgtcatccaaatgacacacagaaaaatgagcaaattttttttttttttttttttacaactcacacaactttccaaattaaaatcagaaataattttcctctcacacttactatgatactaaggaagttcagctacacttgttaggtaggtaacccaaacctcacagtagtggcaataaaatcttcctcattttttctgttaacatttagactttaacactgataaagcgatatccgttcatgggagagaggcacacctactaccattaaggggactaagacgaaaattatcaatgcatttgtgatccaaaaggagaagtatttggctaagaagaaaaggagtattttatatagactttccagagtagctacctgcaactggagtcgggcaaaaaaactaagagtgcggcaaaaaatttatcttcttaaatattacaggtatggtatgaggtcttttgaggtacaaattgctgatagaaaaaaaaaatagccaaaaccttctaataaagacaaaatgtagtagagctctggcctgttgttatgggtctgacctttggaaagtcactttgcactttgggataaaaatcaaaagataagggatcctcagggtatctttcaagttaaaattgcattatttaagatctaaaatttgatcacttgattatggtaaagaaaaatcaagtgatatacatagaaaaaaattctaatgtttattttaattaactttcaacctcttcatatttgtgctcccttttactgaatctatttgacacaatggtttgccatacataactacaacatagctaatgcaatattactaaaaactggataatcaaaaaatttaatattctacttggaatttgcaaaaaccgactttaaaaagtcagcataatcaaagtagaatctattttaattccttaaagaactgcttgatgacaaaataacagcacaggttttgcacttatttgtagaactacctaatgttttatagtaaagttctttgaactacgctaaaaaaaaatggtactactcaccatttctcctattttccattaaaagaaaactgtccagactcgtttggtcaaagtagagattgtgtaaaaataccaaaaaacattctttacgttgcaaggtattattctcaatactagtttttcaaaaatgcatgatgccttcgtgttgaaatcctaagaaaacgagccattgctcttgaaatatcgctaacaatataattgcataatcgcgcccgcctttatgtaagctgcaatggacagcgcgcgtgtgtgtaacagccccaagacgccaatgcaaaaaaaggaaaaaagaaaggcaggcggcagggaaagagagcgtgagctgggaaggacaggaagggaaacagggaggggaggaaagggagtggggcgcgaggcaggaaagggaagcgcgggcggaggcgcgggcgggggaggcagacgaggggcgggggcggacggcgggggagatcctagctggcggagaccgacggatggggccgccctaacctcaatgaggctcacgggtgagtcactgggaacattcctcgccgctcgcacgtccccgcgcccctgcccccgccattggccggccggctcggcggcccgagcccggattggctgtgcggcccggggcgggggcgtgggcgaggagggggcgaggcatgtgaacaaagcgtgatcagcggctgctccgggaggcgcaggaaacgtgaactgggaattgccgcgccgtcacctttcccctacttcctgagcttgcgggcccccgcccgcgcccgacccgggggaggggccgcgggcgccgccgccaaccgcccggccgtgcgcgccgggcccgcggggaggggcggggctgcgggcgccaggctccgggaggcgcccgccccttccagctccccgcgagccgccgttcccttaggaaccgacagcggggccgggcctcgctcccgcccctggcggaggccggggctgggtcactcggggacgagaagctccccgggcgcacccgctcccggcccacccccggcctccgcctcagatgcgggaggaggagccaggtccccgcggaaacccggccgccgccctcctcccgccggcagcccccgggaacccggccgagccctcggcacttcccgcccacgcggcccacgggacctcagaccaccccgtctctccctgtagacgcggcgccccctccccgtggcttccggcagctccaggcccctcccgccgcgcgtctccacgggttcccagacgtgcagcccccacaggccccggctccagacgcgcggcccccgcgtctcgcggcccagctccccccgcccaccttcccgccccagctgctgggtcccgcttcccaccctcctgccccagaggcggctccccgcctcttccaaggagtcgtcagaaggcggccacctgcccctggggtaagagtccccctccagacgtctgggggagcaactcgtcccccagggctgtcggcgggccctcgtgtcatccccccgctccgacgacaggcgccccttcccccagccccgagctatctgctgagcagcccccgtcttccaagcgtgggttcagacccccaggatgggtagcccactcgcctctcctgtggacaccccgcctcccgagtgcttgcgagcagccccttcctcccctggctcgcgttcctgagccagaccgggcatctctcctcggtaccaggtgagggtagcccccttgtccctcccgcgactctcgttccacactgtaccccaacctcgctgcagggcaacggccccctccccactcctcccccgctcgtcatcctcctcctcaccagccctctcgggtctccatgcggagttgtcccttcccctcagtacatctagagcaagacccctgtccctgtctgaagatcccagccccctggttcgaccccctcccgaacacacacgccctcactaatgcccatagtctgcaggcaggaagccctttccttccccacgactccgctgcagccccaattctcaggcatggctgatgtccggggctcggggttcgcgccccctttggccccccagacaagaccaggcgaggaagcacaggggcatccccaaatgacttaccgcagtctgctggagagaggcaccgaagttgagcatggttggctgcttggccgccggcggcaagctgactggctgctaggctgctggctgcttggccacagacgggcgcacggagacactcgacgccgctcccgccgccgccgcgctcagcgccgtctgccccctccccattcaggtagccgctcagcctgccccgcgccgcgggcgggggtgggggcggagcctgaggccggccaatcaacggcaaaggtgtgtgaggcgccggccaatgggctcgcggggccacgcgtgatcggcgactgcccggcagcgtgaagctggtgtcagtggagcgtgtacacaatccccggcagcgtgttccctctgccctgccccggggaactccagaggccacctgatt

SEQ ID NO: 587577 - DNA, 4001 bp, Homo sapiens
gcggacggcgggggagatcctagctggcggagaccgacggatggggccgccctaacctcaatgaggctcacgggtgagtcactgggaacattcctcgccgctcgcacgtccccgcgcccctgcccccgccattggccggccggctcggcggcccgagcccggattggctgtgcggcccggggcgggggcgtgggcgaggagggggcgaggcatgtgaacaaagcgtgatcagcggctgctccgggaggcgcaggaaacgtgaactgggaattgccgcgccgtcacctttcccctacttcctgagcttgcgggcccccgcccgcgcccgacccgggggaggggccgcgggcgccgccgccaaccgcccggccgtgcgcgccgggcccgcggggaggggcggggctgcgggcgccaggctccgggaggcgcccgccccttccagctccccgcgagccgccgttcccttaggaaccgacagcggggccgggcctcgctcccgcccctggcggaggccggggctgggtcactcggggacgagaagctccccgggcgcacccgctcccggcccacccccggcctccgcctcagatgcgggaggaggagccaggtccccgcggaaacccggccgccgccctcctcccgccggcagcccccgggaacccggccgagccctcggcacttcccgcccacgcggcccacgggacctcagaccaccccgtctctccctgtagacgcggcgccccctccccgtggcttccggcagctccaggcccctcccgccgcgcgtctccacgggttcccagacgtgcagcccccacaggccccggctccagacgcgcggcccccgcgtctcgcggcccagctccccccgcccaccttcccgccccagctgctgggtcccgcttcccaccctcctgccccagaggcggctccccgcctcttccaaggagtcgtcagaaggcggccacctgcccctggggtaagagtccccctccagacgtctgggggagcaactcgtcccccagggctgtcggcgggccctcgtgtcatccccccgctccgacgacaggcgccccttcccccagccccgagctatctgctgagcagcccccgtcttccaagcgtgggttcagacccccaggatgggtagcccactcgcctctcctgtggacaccccgcctcccgagtgcttgcgagcagccccttcctcccctggctcgcgttcctgagccagaccgggcatctctcctcggtaccaggtgagggtagcccccttgtccctcccgcgactctcgttccacactgtaccccaacctcgctgcagggcaacggccccctccccactcctcccccgctcgtcatcctcctcctcaccagccctctcgggtctccatgcggagttgtcccttcccctcagtacatctagagcaagacccctgtccctgtctgaagatcccagccccctggttcgaccccctcccgaacacacacgccctcactaatgcccatagtctgcaggcaggaagccctttccttccccacgactccgctgcagccccaattctcaggcatggctgatgtccggggctcggggttcgcgccccctttggccccccagacaagaccaggcgaggaagcacaggggcatccccaaatgacttaccgcagtctgctggagagaggcaccgaagttgagcatggttggctgcttggccgccggcggcaagctgactggctgctaggctgctggctgcttggccacagacgggcgcacggagacactcgacgccgctcccgccgccgccgcgctcagcgccgtctgccccctccccattcaggtagccgctcagcctgccccgcgccgcgggcgggggtgggggcggagcctgaggccggccaatcaacggcaaaggtgtgtgaggcgccggccaatgggctcgcggggccacgcgtgatcggcgactgcccggcagcgtgaagctggtgtcagtggagcgtgtacacaatccccggcagcgtgttccctctgccctgccccggggaactccagaggccacctgattgagtgacgccccccgcccctcgcccacccctcgcccactccttgcccctcgtcccccgcccctgcctagagaggcggtgccgcggccggggaggcgcggcgactgcagcgcgcccaggcactgcggagggccagccccacgtggggggtggggagggatgcccgctccgccccgtcccctccgcgccgggcctcgtctcagcccgccacggagtgggcgggacgccaggcaggcgggggacgcggcggctgccagccaaggggccggagccaagagatttgcattggaagcgccatcctcttgcgcgtctgatgaggaagcagaacccggtgaccgactgagctgcatttctgaagcatttgctgggttttgcctcactaagcctcggggagcactggggcgcgggatgggggaccctgtcacggagccgacacctgctcgcgcgcctctcccccgctcacgccgtgccgcgggctcgccctccccatctgcagcgcccgcagcgcctgcccgccccgcccatccttcctcctgggcaacccagaggatggcgtgaggactcctggaagcccagaggaccggaccaggggcgtggtggggagccgtagacccgagtttttatccttctctggcgccgacactcggctgcggaatcgagtttgagctcggtgtagctgaagtttaaattgtagctgtttcaaaggtagaccccacctcacccccacccctggaccaagacctctggaagcgtcctgcctggaagccgcttgtggggagggctctcctagggtctccaggctcccgctggagcacgcctggaggtgggtttgccggccgttccctgaaactggcaccactaccgccccacccacccactccagctggtgggaggcaggctgggtttctgaaaggaagccgcccgtgtgctgcgcctgggggctggggctaggccttctgatcaggaaagcccatggccctgctttggcacggatttgcccccgtttggccgtttgtgcgtgatcacagcagctgttgttggagaggaaggcagtgataacggggcttaaagcaaatcggagatcttatccgatttggacaggctgaatttaaggcaaaaatcactgtctctccttcgagcactcacgtctctgtaactgaatgaaaggctggtaatgcaaatagcatttctatcccagtaatcacagaatgaacacaggaagggaattaattcttttagaaactgccaatgctatgcgtatcttccgatggtttttttctaatgtatctaaggcccaggctagcgaacaacagcaataataatgatagtaatactgttggccaggaccagagaggcccagggctgcggggatgaggagggaatggcctcctgtcaccgcccctcctgagtctgctggagaggcgccagctcagcagcccggcagctcttcctgcctctccccaccccatgtccctgcttctgtctgcggggtgtccctccccacaggtttccttccgcctgggctgtcccatcctgttgacccagcctgagggctggagcagttggccctggacactgtggcgggagaggaagctcctgtatgcccctccggcaggcctaccttccttcctgtcgggccctcccctggggtggcttctgctagaccctccaggccagaaccctgtcccttcctcaggaatgtggggcctgctggcctggctccccagcgggctaagaagcagggagcggtcttgacttgtgagagtgattcaaaacaggaaagaaaagagaaaaggggtaggaggaacagtgtggtggtggcacaattcctagagattcagagaaacatgtttgccgggctcctcagacaacatatccaaaactagaattgctgattctactccttcccggatgcgtgccttgtctccttccagccttca

SEQ ID NO: 587578 - DNA, 4001 bp, Homo sapiens
acttcactatctgactttcaatatgctgtataataacttgaatttttagatatatatttttctcatcaaatgaagataaactctgtgcatagggatggtatttgatatcctttgttatgtattatttttgcacaaaaaaattcataaattgaaaaatatcttgctgaaaatccttcttccctccctcccttcctctcttccttccttgcaaataacaagtgttggtatgtgtgtacatgggtgcacatgtgtgtgcatgtatgcatgtacgtatttgtgttcgtgcatatgtataaatgtgtgcatgcatgtgtagatatatgtaaatgtgtgtatgcatgcatgaattgtatatgtgtatgcatgtgcacacgtatgcatgttggcatctgcatatatgtgtgcatatgtgtatgcatgtatgcatgaatatacatttctgcatatatgtgtgcacgcatgtatgcatatgtgtgtttgtgtatatgtgtgcatatatatatttatgtgcatatatgtgttttttggtgtgtatgtatacatgtgcatgtgtgtgcaagcaggtgtgggtgtgtccaagcacacatactcatgcagttacgtgatgggaagaaccggccatttacctggataaggcgcacagggttctgcatgatgtcctctcctccaaagagatagagtctttggtctttcacagcgactgcggggtggagcacccccacgggcatgctggccatactctcccagacattgcagatgctgtcatacctttccatggagcccatgagctcctgcccttctccaatccccccgatggagaagatgaagttcttatgggcagtgcttctgtgggagtagcgggccaccagcatgggctcccccagcctccactgattgagtttcagggagaagatgtagacattgtgactgaccagactcctccctgagctgacagccatgccccccagcacatagatgctgcggtgcaaggtgatggcagaggccttgtacagccgtgtcgggagtttggcaaggctctgccattggccggtctgtttgctgtacagtaggacgtccctggtggtctgctggctgtccttccttccgcccaagaggatgaggaaatcttggtaagagtttcttggagggacatgcaacaggagtttgcagtctgggacggtggtgccacacaaagagaacatctgtctcttggcggtctccaagatgatctggcatgcaggcgaggactgcaggagggcatcgttggcgatgaagtggtgaaagaaggctgggtggatgtactgcagcctgacctgcttgaacagttcctgcatgtatcgcttccgggcctggaggtcatgcttgatccaaaccatgagggcctcaaacaccttttcctcctccccacagagcccatcatctccgagatagtccctcaactccaaggcacagagctccttcaggtcggccgatgcggccacctctgggaaggacgtcagtgccacctccctggctttcttcttgagggtctcgcagcttaagatttctgagagtctgatcatacccaggcagttgctgggggccaactggctctgcaagtacgaggagcaggcctcaaacagcttggggaactgtagcatggaggcggcctccatcacggggaggacattgtcagtggcaatatgtgcctcccccgtatacacgtaggagacgatctggtccagggttggggggtcaatgcctttcagctgcactttggcttcactcttctcccggaagctgctgcagaacatagccctgaagtaggggctgctggaggccagcacgttgcggtggcaggggatctcccgggcaccggcacagatgctcacatcagtcaggatcctgctttgccttaagctgttgagctgcctcaacaagtcagaagagaagtcgtggtctttgaagagcagcccatctagtgactcctcgtccatcctacaaagagggaaggaagcccccagagtcagcaagagtcaaacctttctcagctgcatgtgctggagggttcagctgtggggactccaagaccagtgctcctattccattccccatgatgtttgcggatgtcaccatggatattgtgtagggaagattggaaaggaaggccacatacatctcagacctgagcccttttgggttatggttattttcaaaagtaataggcaaatagtatcttcagctaatctgagagaaacaaccaaacaaacaaactaaagttgttggaagttactctgttatcagaagctgaaatgttagtctgaagcaagataacagtccatggatttgaccagcagaagttcatgagcctttttccagatcgatggcatatctgttattgagtaacagatgtctaaacctctctttctgggtgtcaatcattccccaaggatgatattctggaggtgtggccctctggtcactggacagaaatgagggaagaaaatggacctttgatgcatatatttaaatatgacttcattgagtcttgttttaaagatagaataaataaaaggaaagaccaaacaatcccctggtttattggatgacacctggttttctacttgcagaagaaataagtatgagggacacttaccttgttttgctgcggtgacatccactggtgcctggtctgacttatccccccggagagtttctacctctagctccaagggaaaccataaaccccaggcctttctttcagttggcaaatgatttgtcctgggagatttctggatttgtttatgctgaaggcactttcatagttttctagagctttgtgcaaggactgctgggcagggagacagtgtatacattccagggctaagaatagttgcatatgtactttccactgttatgacatgtgactttccagttgccttttgcagcaacccgagggcctgcagggccggcgcatgcccacatgcctcgtttccttggcaagtgtttacatcggcaaaaatagatcgggaggagcggcttctcttagagaagactttgctgtctgcttggaaccatcccgagtcccctgtcctaaaagtgcttgggaattctagccgtctgtaaacaggttgctgtgacctgtggagagtcactgaagatggttctgggccacagtggaggtggcaggtggtcacaagggaagccggaacatgagcctgtgggtgctattcaatggatctctatttcccaccatctgcctggcgggatcgctggggagagctgtgatttcctcctccaggatcctaggtgatgaaatccatgacaaaagttgttgttttttgttgttgttgttgttgagcatcccagggtttccagactcctgaaggcccaaacctttgtcaggtctccttactcaggaacctctgattgacagtggtaaggccgagctcctcctgtcgcgtctgcctctcccagacacgtgctgattgctcttcagctggctttttatagttcagacttccttttctgtcttacttttccattttgtcttgtctggcagcttgagctagaggcaggaggcaaggcatattgctttagggagagagagaaagaagatgaaggaggatgaggaggaagaagaagcagggacagagggagggagagagacgagaggaggaagaagaggaggaggaataggaggaggaggaaaagaagcaggaggtagagaatcgggggaggaatgatgatagtgatgtggtaggaggcagctttcaataacaatcagaatcacgagagagagtgagggggacctcaggtctgttctgcccctgccttcagggaggtccatgattgtcttagccacaaaaggcagggaagcctgactttgtctcctactcaacgtcttgctcaactagtgcaatggtcttccatgcatttttttttctttgctcctagtacttctctctccaatacatccaccctgtcttctctggagcagcccctgggaaggcaactcagaa

SEQ ID NO: 587579 - DNA, 4001 bp, Homo sapiens
gtcgtcaatggtgtcaaagcactgaagttcaaggaagatgagaacagaaaaataccattggggttagtgatacaaaagccgcttgtgatcttagaactgttttgtgaagcggaacaggtggataccaatctcagaacatctgacaaggggccaattaatattaacttctagccaccttttactttacaccttttactttatacagtagcattatctacacttatttctagctcaactatacggactctctagttcaactatatggagaaataatttacatagtgcaagtaattccactggccattccactccattaatttatgtgagcaacagtgttaagtaatttaagacgagagactataaatctgcttttccctcagttagtctttaagtctctcttagcactagcactttgctatgttgagtgtgattatagtgtttaaagatacagtatgtatttttcatacaatatagcccctcaacacaagccaatttcttcacctggttttcaaacagaatcagccatctgtttcaacgctggaaaaaaggcaggttgtgctgaacttactgagacaatacactgatctccaacatggtgttcttctaagagactttccagggtaattctgataatatgcatcttttgtctgaggtattgactagttcaagatgacacactgtagagagaccgcctatggatttacttggttgagggacttccagccaagacagactgtaccctagagatctggcatttttcctgcttaattctctatcctcctagattctggtggcagcctaaacctttggtaactacctgaccctgccttatttactctgaacttaatcttttacctgcccactttgcaggtctgctgcttctaaaattcttatttactggaaaaacgccaaacagtagacacttccaaggaaaactcaattaactgtacttactaaatcgtttttagtaatcaattatattttaaaaataatttatgtcttgactgcacaattaaattctatgctcaagagaaactacattatctgggttcatccagtaaagactacaaaagttgctaaatgcctaagacttactatgcagtaaaccaaatctcccattcctgcataattccactaaaacagaatgcagctaaacaagagcaaaagtatcttcttagaaatacaggtgtgttactgtgtctgcaaattaaactcaaacaaggtcacacacaattgtaacaaaaaacttccccaaattacttatgtcagctcctcttatgagcccacaggctgcagagaaccaatttggaagccaggagaatcctgccctctgctgctgagttgaggaaatcgcctcaacataattaatcgcttttgagaagggaagttacactctgggcaaaacaccagtgaaagtcaagtgagcaaagtaaacgctttcttggactcttgacatccgaattttctcaacagtttaaacacgcacaccctggcattcaaacatcaagaacagtaaatcgggtttcaaaacagaagtttttttttttttttttttttttttttccatttctccctaaattagagagctatcacctggggtggtcgtattttagctagcttcgagatccgagtgtctgcgtgcagtcccgacggggctgctaggcgcggggctgcccagctagggacaggacgcggcgctctccactgcccgcgcagccgcgatcagtcaaagcccgggctccggggccggctgcgaacgttggggaggttggagagggacgtttacctggggccggtccccactaggtaggtgttggtgccttggagggtcatgggacccgggttacagcccaacacacgcacgactcgattggacagccgctcgacgcgctgcagtacagcagccattcccgcctcagccgcccgccggcgtgtcgcctatctggatactccagcgcggaagaagccaacaggccggggatagcgagtagcgtccacgtgatgcctcgcaacccgggagggaggggattggccagcggctggtccaggtgtcatgtgacaccgcggacgagccggggcggggatccggcagctaggccggggggtggggggggcggtgcggaactagaggtcacgtgacgccgcgcgggctgcgcgggcagtggtgggaaggctggcgcgaggcgtgaggtggcgtgaggcgaagctggaatctgcctctgtcacgggggctggtgcctcacgggtttgtgtcctagacaggcgagtggatccaagtgggcgagagacattttaatctggaagagtcttgtgatttgggagacaggtttggtaaccgttcgttattcagtaataaatgtcaggaaggattgccagatttttaggcagtggctctgtgtgtgtgtgtgtgtgtgtgtgtgtgtgtgtagtagtagtagtagtagcctgttcattttttttttttttttttttgagacgaagtctcggtctgtcgcccaggctggagtgcagtggcgcgatctcggctcactgcaagccccgcctcccgggttcacgccatcctcctgcctcggcctcccgagtagctgggactataggcgtccgccaccacgcccggctaattttttgtatttttagtagagaccgggtttcattgtgttagccaggaaggtcttgatctcctgacctcgtgatccgcccgcctcggcctcccaaagtgctgggattacaggcgtgagctaccacgccgggccagcctgttcatcttttataataaatagtggtaagacatatttacttagtacttcctactatgcctaagtgctttcaacaaacatccgacttaacgcccttaatcctcagaacattattaagaggtggacactatttttgttacaaatgaaaaacggggattgggcagctgcccagatgacagagtctgcgtgtgcggccttgctcctacctgcctcgcactaacacttgtccccctcagtgagattcaaggagcatgcctctgcctgccagtgttacctgcctgcccagagagctaggctggtcttgtggagccgttttgtgcccaagatggaagggactcattttctctgtaacaagtcggtttcttatcagccaagtattaactatccagtgttaactacagcttcccataaaaaaagttgagttataaattacttaaaagaaaatacacagatcctgtagacagttccatcgagttatgacaattgtatgtaatcactgccccaaagagatgtagaacatatccactgtagcagcccactctttttttttttaaaaaaaggtgagaaattgacacatacagtgcttggtggcttttttttttccagatatttctgatgaagaaaacgatctgctcttacctattttatgaatcagcagcatagtgtatcagagtggctaatgacatctgctttgtgtgtgagaaatgtctttgccttgtttcacacagttgtacttttaatggaaaaatattcaaaaaatcatcgctgaaataatcatataagttatcccctgttgcaatgggaagttaaacagtatacccttcaaaaaatacttaaagtaaccaaatctcctacatcaggcatttcaatctgtcaatatgtatttatgatagccatcaattaatggctattcaggcaggaggctttgcacatcttccctttttaagaactctgctggaaagtcagtgaaccctggagaagaggatggaacagtaatttctggaccagattcctgagaatctgggcactccccttcttttattctttggcttaattaatttccttacttaacttacttatttacttacagggtctggctttcacccgggctgcagtgcagtggcactatcatagctcactgtaaccttgaactcttgaactcaagcgattcaggtgatcctcctgctttggtctcccaaagtgctaggattgcaggcttgagccaccatgcctggctgagataaa

SEQ ID NO: 587580 - DNA, 4001 bp, Homo sapiens
atgttttgcttaaaatggtacaaggaaggggttcacagttagacaaaaagtccatattctacccaaaaatgggcccaataaacaaaccacacacacacaccccaactcattaaagagataagaatttttctcggccgggcgcggtggctcactcacgcctgtaatctcagcactttgggagtccaaggcgggcgaatcacgaggtcagcagttcgagaccagcctggccaacatggtgaaaccctgtctctactaaaaatacaaaaaattagctaggcatagtggcgggcgcctgcaatcccagctactcgggaagctgaggaaggagaatcgcttgaacctgggaggcgaaggctgcagtgagcagagatcatgccattgcactccagcccgggccacagagtgagactctgtctcaaaaaaaaaaaaaaaaaaaaaaaaaaacctcactgaaaaaagttatatatgctatttgtctaccattttcagggcattttctcgcgatgcagtggtattcactgcaaagcaactctggtctaactctccatcatgatgtcacaaaacccaaaatgcagcggaatccgactcagtgctggtgcagtctaggggtgccaccaaccaacgcagggcaggtgcgggcaagactccatcaggtttcctcactagctctgaaaatcactgctcctcatacaaaaaaagacttcaaaagttccaaccaggaaaaaaaatgccagatttgcccgctgagtctgtcaagaaaaggtctgaagaccaactgtccacgggcaggaaaaatgtgggtggaaaatggcttccccgggcagatggaaacgcagtaaatcacactcacatcccttcctggagtaagggctttaaaacatcgggggggggacccattcacaagaggatgccaagaactcccaaccacttcaactcgggatccgaacgtgcgacggcgtgaaagcgcaggccaccctagcggagacgcggccagggagaacgagcattgacaaatccgcaaccctaaccacagagctgcaaaatatgcgccgtcacctccgcgaccgctccgtccgcagccgtcgaaacacaaagcccacgggctttaagaagaaaggaaacacgtgctcggcagataagctcagtttgtctgccccggtgcgccctacgcgaggccgcggggctgcgcggaggctggagatcggcgacccacaccacctgggcgccaagggtcgagtgcggccctccgccccgcgcccctggcctcccccatcgccccaaactcctggcctcccccagtcggcgctggcccagccgggggaagtgcggacgcggcacccggagaattaagtttctaataatacaactttaggcggatgagcgcacgcctcaccccaccgcgaggccgggccagaagcccagctaggggcgcggaagcaacgcagggtcccgggccgggcgcgccgcgctcaccagataccagacgccgagcaggatggtgccggtgcggacatggcagcacaagcagcagctgttggagtagaaccgcgtccagggcgcgaccatcttcatcgctccgggcgcagtggcgcgagcgcgcgcgcaagttttcaggagcgtcgaccgcctcgcctggagcccgccgcgccgctgctgccggctcctccgccgctccggctcccggcccgctcgcccgtgcgcccgcgggcctgcctcctcgataccccgagagctccgagcttctgccgggtcggtacccttcgctccgaaggcgaccgctgcagcggcggggacggggagggggcggggcggacttggccatgtgacccgagtccgtgacgtcatcgcgggctccagccagctgctggagctccaagcacccggtgagtaaatccatcagcgtgcaccctccgccagtcccctagtcggccctgagtggaggtccgggccttccttctttcatctggccgttcgtgtaactccattcaagggtcgagattcttttagtctagttccttgcgattttcttcccttctacttcttttttttttttttttgagacagagtctcgctcttgtcgcccaggctggagtgcaatggcgcgatctcggctcactgcaacctccgcctcccgggttcaagcgattctcctgcccaaccaaccgagtagctgggattacaggcgcttgccaccacacccggctaatttgttgtatttttagtagagacggggtttcaccatgttggtcaggctggtctggaactcctgacgtcgaatgatccacccgcctcagcctcccaaagtgctgggattacaggcgtgagccaccgcacccggcccgcttctacttctatcttgcaggtaatcgatacagctcctatcactcttatcttgcacgagaggaaggaaaactgcgcggtgctattccagtcaattgcagtactttgaaccaccaccgagagcaatttgtctccgcttcacagctcaattactgtggtagtaatcttttcccagaaaataggatgtgtgtcaaggacatcctcgctgtgcttccggtagctttttttttttttttttttttttttttttgagacagagtcttgctctgtcacccaggctggagtgcagtggtgcgatctcggctcactgcaagctccacctcccgggttcacgccattctcctgcctcagcctccctagtagctgggactacaggcgcccgccaccacgcctggctaatttgttgtattttcagtagagacggggtttcaccgtgttagccaggatggtctcgatcttctgacctcgtgatccgcccgcctcagcctcccaaagtgctgggattacaggcgtgagccacaacgcctggcacagcgtttttaatcatgagtgcagctctaaagattcagtcccagcctgggcaacatggcgaaaccctggctctacaaaaaataccaaaattggctgggcgcggtggctcacgcctgtaatcccagtgagagacaagagtagcggatttcctggggcgactaagaattcctaaacctacctggggaaggggaccgcacccacccttaaacatggggcttgtaactcagctcacacctgaccaatcaggtagtaaaaagggctcactaaaacaccaattaagctaaaagcaagaggtaaagaaatagtcaaatcatctatcatctgagagcacagggggagggacaatgattgggatataaaccccaggcattccagccgggagtgggcaaccccctttgggtccccgcccactgtatgggagctgttttcactctattaaatcttgcagctgcacactcttccacctggagctgagctttcgctcaccgtccaccactgctgttcgccgctgttgcagacccgccgttgacttccacccctctggatccggcagggtgtcccctgcgtttctgatccagcgaggtgcccattgccgctcctgtttgggctagaggctcgccattgttcctgtgcggctaagtgcccgggttggtcctaatcaagctgaacactagtcgctgggttccacggttctcttccgtgacccacgacttctaaaagagctataacactcactgcatggcccaaggtcccattccttgaaatccgtgaggccaagaaccccaggtcagagaacgaaaggcttgctgccatcctgggagcagccgccaccatcttgggagtggcccaccaccatcttgggagctctaagaacaaagacccaccagtaacaccagcactttgggaggccaaggcggggggatcacctgaggtcaggagtttgagaccagcctgaccaacatggagaaaccccatctctactaaaaatacaaataaaattaactgggcgtggtggtgcatgcctataattccagctactgggaaggctgaggcagaagaatggcttgaacctgggaggcagaggttgcggtgagcctagatcgcgccattgcactccagcctgggcaaca

SEQ ID NO: 587581 - DNA, 4001 bp, Homo sapiens
gccaccgcgccaggattaaatactaaattttttttaaatattcataacacagtttgatgtgacatctcatcttccagtcataccgaataaggtagccaattagaggttaaataaattgcttaaaagtgttctcaaaacttgcagtttcttcaatcttatgaaattggcaactaggaagatttatatatacacttcatcatttgtatataagctgtttcttaaatgacacatcaacaaggcaagaattcatacagtaattgagtgatgcaacatttggaagacaaagcttagataagtctgggttctactcccaaagcctctaggctaggcatggagcagcccaattatctagcaaaactctctagagacaagatgctgattctgtgattacaaagaaattagagtagaaggagggaccacttctctaacctgggagttaccagaaaatccaatatatcaaaaagtaatagacaaatggctcaagcaatgcctaatggtctctaattacagcaacactccttcctaatataaagatattaggccaagagaaagaaacatactgactcataacaaccagaaaatcctgctgaaatcaaaagtgcagttcacctgaggcaccttcatcagtttaatgcagtatttccctaggtctggagaagtaaattacaaagctattttcttaagagacccccgcattattgacactgaagaaacagggaagaacagggaaacgggcaacatcctaaaaaccacagcaattcacaataactgcctttcacataagggtttagagtctatcatagttcaaaaggagattacaaagtatcccagttgcttaaatgacaaggttttatatgggaaatgaaatgttttcagacattgaaaataaacaagaaacagtaagactgtgaccctgaaaaaaaactcgattaagttttccttagagaagaaaaaatacaaagaaaaccactgctcccaaagttacctgcttcctgcctgactgcccttctacagagcggcaggtcaagaaatcaatgtaattagttaagcagtagctgaaaactttgcttctcatcacactgacaacaaaactacctaacaggtggaacaaatgcaacattcctttttttaaaagaaaatacatgaataagccagtagtttttcattaagttgtaccagtattttatcttcttaaaaaaaaaaaaggaaaaaaagaaaaattttgaaatttgaaaaagcctcagggtgcaactgcggagagggaagagagccaggagcactttggggtcgcctacaggatcaactctagggtccagacaccgcagatgaaaatgcacccgtttcgggagcctgtaaagcctcgggcgcgggcggccggggtggacgtggggtcgaggtttcgggcagacccgtgcagcgcccgcagaccgcacttgtgcctttcggtgggaaatgactggttttccatagctggcatctctagcagcctcagccttctcaatcccacgctctgcctgcctctctctcggatgcaaactcctgcaaaacgtgtgtggccgtccaagtcgcgacgggactcctcactgaccgccaaccacttcatattttgtccggggggcgatgggtgggagagaggctgccgaaatcggcagaaagtgggggctgcggggcgaagccggggtcgcaaccgtccgttgcccgagggcgccgcgcccacctccgggccaagcgcagggccggggcgggggtcgcttccccggcgcagggaccccacgcgcgcgcgcgagcccggaggggaagtgcgggggccgcgtgggacccccggcccatcttcccccgccggccccagccctcccgcgtcctgcaacccaggcccacctttgatgcctgccatggcggtgacgtcgctcctggctccacgacccgaggcggcggcggcagcagcggcagccgggagacccaagacgcgctacggcggccagacaacacccggaagtgcgcgacgcagcacttccgccggcgactcgggctcgcgcgggggcgcgggggacgcgccgggctgggctgtggggtcgaccccctgcctctcttctccgcgggtgtgcagatcgccgccggccgaggcttgccgccgccgccccgactgggggaatgagcaggcgccaggtcttgaattcctgtcagggccggtctgggggctccctgctgaagcccctgtccctgatcccgcaacctcccgcgtgcgttgggaaggggtcgcgggtagcggccgtcctttggatgcacgtgtgatggcttttggcttaatttcacattgttttgtttgttttttgagacagggtctctttcgcccaggctggagtgtgatcacggctactgcagcctcgatctccagggctcaagtgattctctcacgtcggcctcgcagtaactgggaccacagacatgagccaccatgcctggcttttttttgttttgttttgttttgttttttgtagagacagggcggggtgtgagactctcatcttgttgcccaagctggtctcctgagctcaaggatctgccctcctcggcctcccaaagcgctgggattacagcttgataccctaccttgttttaacctgattgactcgctcttagctgagagagcgggacagactccattttggtttcttcgcttgcagcaccttgtccccctcccttaaggacataactggtgcagactgacaccaagcacatccaggaatgtgcttactgataagatactgaggcaagctgtaccagcagctcctgggaacgcgctcggttgatggtacccaaagcccctgcgtttatctctttgtgataatttaagccccatgcacctggaactgtttattttcctgtaactgtttctataaccatttatcttttaactctttgcctgttctgcttctgtaaaaattgcttcagctagactaccccttccctatttagaccaaggtataaaaagaaatctagccccttcttcagggccgagagaattttgagctgtagtcgtctctcggtcgccggcaataaaggactcctgaattagtctcaaagtgtggtgtttctctataactcgctcggttacgacaacaggtgtgagccactgcgcacattattttactgcgccttttcctctctccctccatccctccatccccagtcctataattaaggttagttgggtggtctgcacttggctccttggtttcctatacaggactagggttctggtgaggacccacctccagagataggagcagcagggctcagtaaagggtggatttaatagaaatccagtcccttgggtggctgtctttttggtagtaacaaggcaaggaaaaaaaagtgaaagcccaggttcaacacctttatttacacatcctacaattatttatagaacatttactatgtgttaggcacagggttagacgctgagatgtgcaaaaccaggtactgtttgcagactggtgaggaagacagacacacaaaaaatgtaaaattgcaataatgataattgctagtaaaggggatcagaatatgtcactctaaaatatgccactttgaagtctggtgtggtgactcaggcatgtgatcccagcacattgggaggctaagacaggaggatcgctttggcccaggagttgaagaccagccctggcaacatagtgagactccatctctacaaaaacgaaaaaaaaattagccaggcttggtgtgtgcctgtagttccagctacttgggaggctgaagtaggaggattgcttgagcctaggaggtcgaggctgcagtgagctctgattgtgccactgcctgggcaacaaagcaagactctgtctccaaacaaacaaataaatgtcaggcctctgagcccaagctaagccatcatatcccctgtgacctgcacgtacacatccagatggccggttcctgccttaactgatgacattaccttgtgaaattccttctcctgg

SEQ ID NO: 587582 - DNA, 4001 bp, Homo sapiens
cctccaagaaacttttaattgtgtactaagccaatcctttccatctagaaggatgaaattcaggccaggcgaggtgactcacgcctgtaatcccagcactttgggagcccaaggcaggcggatcacctaaggtcaggagttccagagcagcctggccaacatggtgaaacctcgtctctactgaaaatacaaagattagccggaggtggtggcaaacacctgtaatcccagttacttggaggctgagggaggagagtagcttgaacccgggaggcagaggttgcagtgagccgagattgcaccattgaactccagcctgggcgacagagtgcgactccatctcagaaaaaaaaaaaaaaaagaagaagaagaagaattacgttcatattggggggtaactccaatgcttaccttgttcgagcaatagccagaactgaattataactgtagaaggccatatttatttttgtctcaagtagttaacatagggacctaggcaaaaggagtaagtaaacaatttagtagtttaaaaatacatcaattaaaagacatcaggattttagtgtttttaactattgcaaaggtagaacatttgcatagttaaggtacaaaacctccttcaagctcatttccaacaatcagatattttcgtagctctggacttgagaatggtactttgagattccaacaaacggtaatgatctctaagatgatgatgctcatgaagatggtacaatcttcagagacattttgatttctggtcaatagtatctagtaatgcaacttcaatgattgccaagtacttaaaagtagagcaatacatatctatctgtagccttaaaatataggtagaaagtgaatattctgaatttcttttcagttagcattgttctatatttaggcaagttgtcccaaaccctgaatattggacgtacccactaatctaatttatgtagcagtggatgaaggtagacatgcaacctactaatcgctcaagtggaggtaaaactgtttcccttgctactgattctccagagcccaaactgagctttgaacctgtaaataaccttcaccaaaacccatctccatccaggggcgcttttctgctaagggccgcgaggaacggcagaagagctgacattcccaatggcagctttgctctcttgtggttgggaaaagagttccaggagctctcctgaatagaaaccttagccacagagctgacattttcaacaggggctcgaaacctgtggacccacactaacggtgggtggtgtttcgcgggcaggagacgacacctgaggcggcggttaatccgctcgggcccgggcgctcccgggcggcggacaccactcgcactcgcattggcgccgccccacgcccgctgctcccgggctccctcggctttgcccatcaccacacgggagcaaaacgcgccctcggcttcctcgcccggcggcttcggcgcgcctgatgtgtgcgcggcctgcatgcggcggggtctgggggatatgctttggttttctggtgcggaggtgggacaggcacgggaacgacgaccctcgtggatgatcggggttgttggaaatgaagccgaggagaaagaagcagggcctgggacggaaaaaaggacggagcgcgctgtgcggggaagggggaggagaggccgagcttcagagttcgcgctgtgctggggaactggcggggatgaggtcgtgggtggaggagagcgcggtgggaactggaagctgtcagaagcctggatcatgctctgatgagaggagcaggatgcggaccgagcgggatccggaggaaaaaaaggcagcgcggcccaccaggtcgcggcctgagggctgggcctgcccacccctacctcctcggccgggctccgcggaacggccgcctaggtcctcccagctccttcccgggacccccaagctagaagggcccgaagccaagtctctacggttccgcctctttcctcgcccctgacgtcactctgagtgacgacatcgccaaccaataagctctcaagttctggggagggcgggcgtccttcaccttagcagcccaggaagccgcaaagtcgcgtttacatcgccgaagtgacttctttgtggggcttggtttaaggcgcgttggtgctggggggcccgaaggtgacgtttttctgccagtccacactccgcaggcagtggctaacgcccgaggaaacccgtgattgaagactggattaaacaggctctttccctgacagcttaatatgtctgatagtcgccatggtaaccatttcggagtcatgaatgacatcactttgatgtattctccctcggaccctgcaaatccggaactgccagaggggcgctgagaggatttgatggtgtcgcagaaagggcgggaatcggaaggagcgcattcctctcccttcctctccagaggctggaatactgtgaaatcttcatatggaaatctgtattctactaaaaatatttgctttctcaatggtcccttaacaagtgttgtttgtgattaataatttgtatagaaatctcagcatataaaatgtatgttatagtagctgtgaaatgacagacactgcaggtttgagggcacttcagttcctaggatggccaactgagccatcttgggaaaatgaaacatctagaaatattctcattccccagttatcttttcccatccattttatctggctccagaagaaagagttaaaaattttttttatttaggctgggcgcggtggctcacgcctgtgatcccagcactttgggaggccgaggcgggcggatcacaaggtcaggagacagaaaacatcttggccaacatggtgaaaccctgtctctactaaaaaaaaatacaaaaattagccgggcatggtggcgtgcgcctgtagttccggctactctggaggctgaggcaggagaatcgcttgaacccgggaggcaggggttgcagtgagtcgagatcgcgccactgcactccagcctgggcgacaagagcgagattccacctcaaaaaaaaattttttttttcttagtggctctactcgaccaccatacagcaaggaatcgctttctcacggagaatacgtctcctgacatgtgagctgaccacagactttactcatctgggctacacatttttaagaatggaagatggcggtattaaacgtcagtaaaaaatgcagactgcttttaatccacaaaggatttttcagctaataaccaaatagatccactgttaaataggcaaaacttttcagtttggccactagaggtctctttgtgcatgtctgatgttcaactttgcacataaaggtttcacttcacgttctgtttaccagtattaaaatctacaaagctttggactctttacttttccctcactgaaaattcctggtggtcaaattttgagctctagaaggtagatgtagttttcacactaatttcataaattaatcattgcactaccatgtactggtacttttctggaaaagatcttaaaggatgcaaaaatattttcagttccctgggagacattttatacggggaaatattcttattcatgcattgtattcacttacaaccaggcacagtgaatatcattaagtattcataaaccagatgaacgattccatgcccagtatttgaaagatgagctaggttttctaccatggccatatgtcagcaatcctatcctaaaaagggaagggctaagaactcttcttattgagatatctgttcaaagtaatgtccgtcttccctagttatgagacttggcaatttctttgactttcaggataagagatttatcatgtaagattctgtatgtaatcttcagaagagaaatttttaaaaaaatattttttcctccatgactctggccctgagaattgtgttagattgctgtcttaatgagctccttgttcattttctatggcgaacagtaagcatcgtctaaacctcagaagatgttagatactg

SEQ ID NO: 587583 - DNA, 4001 bp, Homo sapiens
catctaaggacctcacgtgatgttcatcaattacagagatgtcactctaaaaccagtacatcttctggctgggcacagtggctcacgcctttaatcccagcactttgggaagcccaggctggcggattacctgaggtcaggagttcaagaccagcctggccaacatggcgaaaccccatctgtactaaaaatacaaaaattagtgggacatggcggcgcatgcctgtaatcccagctacttgtgaggctgaggcaggaaaatctcttgaacctgggagttggaggttgcagtgagccaagatatcatgccactgcactccagcctgggcaacagagtgataatccgtcccaaaaaagaaaacaaaaacaaacaaacaaaaaaaactacatcttcttttcttttttttttttgagatggatttttactcttgttgcccaagctggagtgcagtggcccagtcttggcccactgcaacctccgcctcccaggttcaagcgattctcctgtctcagcctcacaagtgctgggattataggtacctgccaccatgccggctaatttttgcagttttagtagagacggggtttcaccatgttggtcaggctggtcttgaactcctgacctcaggcaatccgctcgccttggcctcccaaagtgctgggattacaggtgtgagccactgcacccagcctccaagaaacttttaattgtgtactaagccaatcctttccatctagaaggatgaaattcaggccaggcgaggtgactcacgcctgtaatcccagcactttgggagcccaaggcaggcggatcacctaaggtcaggagttccagagcagcctggccaacatggtgaaacctcgtctctactgaaaatacaaagattagccggaggtggtggcaaacacctgtaatcccagttacttggaggctgagggaggagagtagcttgaacccgggaggcagaggttgcagtgagccgagattgcaccattgaactccagcctgggcgacagagtgcgactccatctcagaaaaaaaaaaaaaaaagaagaagaagaagaattacgttcatattggggggtaactccaatgcttaccttgttcgagcaatagccagaactgaattataactgtagaaggccatatttatttttgtctcaagtagttaacatagggacctaggcaaaaggagtaagtaaacaatttagtagtttaaaaatacatcaattaaaagacatcaggattttagtgtttttaactattgcaaaggtagaacatttgcatagttaaggtacaaaacctccttcaagctcatttccaacaatcagatattttcgtagctctggacttgagaatggtactttgagattccaacaaacggtaatgatctctaagatgatgatgctcatgaagatggtacaatcttcagagacattttgatttctggtcaatagtatctagtaatgcaacttcaatgattgccaagtacttaaaagtagagcaatacatatctatctgtagccttaaaatataggtagaaagtgaatattctgaatttcttttcagttagcattgttctatatttaggcaagttgtcccaaaccctgaatattggacgtacccactaatctaatttatgtagcagtggatgaaggtagacatgcaacctactaatcgctcaagtggaggtaaaactgtttcccttgctactgattctccagagcccaaactgagctttgaacctgtaaataaccttcaccaaaacccatctccatccaggggcgcttttctgctaagggccgcgaggaacggcagaagagctgacattcccaatggcagctttgctctcttgtggttgggaaaagagttccaggagctctcctgaatagaaaccttagccacagagctgacattttcaacaggggctcgaaacctgtggacccacactaacggtgggtggtgtttcgcgggcaggagacgacacctgaggcggcggttaatccgctcgggcccgggcgctcccgggcggcggacaccactcgcactcgcattggcgccgccccacgcccgctgctcccgggctccctcggctttgcccatcaccacacgggagcaaaacgcgccctcggcttcctcgcccggcggcttcggcgcgcctgatgtgtgcgcggcctgcatgcggcggggtctgggggatatgctttggttttctggtgcggaggtgggacaggcacgggaacgacgaccctcgtggatgatcggggttgttggaaatgaagccgaggagaaagaagcagggcctgggacggaaaaaaggacggagcgcgctgtgcggggaagggggaggagaggccgagcttcagagttcgcgctgtgctggggaactggcggggatgaggtcgtgggtggaggagagcgcggtgggaactggaagctgtcagaagcctggatcatgctctgatgagaggagcaggatgcggaccgagcgggatccggaggaaaaaaaggcagcgcggcccaccaggtcgcggcctgagggctgggcctgcccacccctacctcctcggccgggctccgcggaacggccgcctaggtcctcccagctccttcccgggacccccaagctagaagggcccgaagccaagtctctacggttccgcctctttcctcgcccctgacgtcactctgagtgacgacatcgccaaccaataagctctcaagttctggggagggcgggcgtccttcaccttagcagcccaggaagccgcaaagtcgcgtttacatcgccgaagtgacttctttgtggggcttggtttaaggcgcgttggtgctggggggcccgaaggtgacgtttttctgccagtccacactccgcaggcagtggctaacgcccgaggaaacccgtgattgaagactggattaaacaggctctttccctgacagcttaatatgtctgatagtcgccatggtaaccatttcggagtcatgaatgacatcactttgatgtattctccctcggaccctgcaaatccggaactgccagaggggcgctgagaggatttgatggtgtcgcagaaagggcgggaatcggaaggagcgcattcctctcccttcctctccagaggctggaatactgtgaaatcttcatatggaaatctgtattctactaaaaatatttgctttctcaatggtcccttaacaagtgttgtttgtgattaataatttgtatagaaatctcagcatataaaatgtatgttatagtagctgtgaaatgacagacactgcaggtttgagggcacttcagttcctaggatggccaactgagccatcttgggaaaatgaaacatctagaaatattctcattccccagttatcttttcccatccattttatctggctccagaagaaagagttaaaaattttttttatttaggctgggcgcggtggctcacgcctgtgatcccagcactttgggaggccgaggcgggcggatcacaaggtcaggagacagaaaacatcttggccaacatggtgaaaccctgtctctactaaaaaaaaatacaaaaattagccgggcatggtggcgtgcgcctgtagttccggctactctggaggctgaggcaggagaatcgcttgaacccgggaggcaggggttgcagtgagtcgagatcgcgccactgcactccagcctgggcgacaagagcgagattccacctcaaaaaaaaattttttttttcttagtggctctactcgaccaccatacagcaaggaatcgctttctcacggagaatacgtctcctgacatgtgagctgaccacagactttactcatctgggctacacatttttaagaatggaagatggcggtattaaacgtcagtaaaaaatgcagactgcttttaatccacaaaggatttttcagctaataaccaaatagatccactgttaaataggcaaaacttttcagtttggccactagaggtctctttgtgcatgtc

SEQ ID NO: 587584 - DNA, 4001 bp, Homo sapiens
tgttggatcctaaacatgggccaaggcagagctctcttgtcaagccagctcctggtcctcccgggtggcatctcctctccctctcccccaccctcattctgtcccattccagcccctcatggacaactgtccctcatggacggcatcttgtagggttggagacactcctgccatccctttctttcagcccccagctctttctgggaactctgattcctgggatcacctgtctctaagatggccccacagtgcccaccttgggcactagcccaggctatcgcacccaattctctggggtttccagagcagccaagcccatccccgcatcccacttgcttggcttctctgtgccatccctagctgtcctcctgctgccccgactcccctgactcaaggctgccccgtcttttgggtacatcctatcagaacaaaagcaagggacacctgcatcttcgtctgcagaggctgcctctgtccactctccctctccccagcccaggatttgtcccctgctaccaccccatagttcccccaacccttccacaaggccctatccatacaagaactgcagcagcgggaggtgggagaacgctccatcctggatctctgagaaggcggcattcaccagggtcctgcggggacacccgagtcagtactgtggggtctgcaagggctgtgctgaggcagggagaggtgaacacggagggcagtagcttttgtactcacttgccctggaaatgccccatttcacctaatttagcccccatctgtgtgtctttcccttctcctcccaaattcactgcctgccttcaccagggtcctcccctattgcctcttggggcacccatggccccaggctcagcttccctctcaggcaagaaaaggttccatcacccacaccgttgtcatcatcatccaaacacccacaatgggctgggtgctgttgagagatggggcatgggggtgggggctggcatcctggtccccaaggacctcacaacctctctggtcccacagacaagggggagcccctgaggctggctgttgtgagtgacaggctggccgagctgagtgccaagtggctggtcagtggcgggcatgtgccccatgccagggtgctgggagggcatagctcattctcatcctgctctggccgccactctcctgcccttggtgtgacatcacaggcaggggcccacatgctcgtgtaagcaacccccccaagtctggagcacagcacacagtaggtctcactgtcgctcgtggtgatgatgattcattcttggtggtgaactcctgctttccccacccatggccgctgagcctgcaaaactgcagaactccctgcccgactggtgcctggaatctccagccctgaggacccctgcagtccccctggtccccgcactctgaagagggggagcgggggttctcctgtcctctcccagagctgtcctcggcctcctctccctccccaacccccaaggccagggctggacactcacagggagatgacctccgagggcaggttcctgggcaccgcctttgagtccacgcagaaggcggtgtccctggtgcaagagcagctgggcgggcaggggggcgtcttggggggcctcttagcgctgacttgcagcatgaggcagaagccgagcgcggagagcgccagcagccccggccccgggccccccctggcccgcagccccgccatgctgcccgcgatctctccctggggccggcggccgcggcccccgccccaccgctcccgcggctgggccaccccgcgcgggctggcacctccctgccaccggcagctgctaccgcagccaggggcccgcctgcggactcctcctgccctcgggcgccggctgcggtcccctcccctgctcgctcccgcgatccggctcgggagagaagagcggagcgcggagctggagccgcagccggggctgaccgcgccgggtggctgcggactgcggcgcgggcggcgggggcgcgcgcggggcggcgcggggcctgggagtcacggaaggggaggcgtggccgctgtgtgctctaccgggcggtctctggggccatccgcgtgtggggctgcgcgtgagtgcatgcgtgtgagcttgtgcttgtgcctctgctgggcacgactgtgcgcgccggtgctcacctgtctctgcacgggcacatgcactcactgccttgtggaggcgcttcggcgttagggatccctgtgcttctgtctacctgggtttctttgcatggggggacacatcccctaggcagcatcatgggcatgtcgtgagtgacagacgcatatctaagttagcatgcaagattagaagcacaagggcgtcctggaggagtctgaagtgcgcttctaaccggattcacatgtttttccacgcgccgctgaacagaatgtacctttgtgtcagcatgagctgaaaagggaaacgcagcctctggagctggagtgggactgtgtggaattctggaacatttctcacgctcaaccacagcctgttaaagctgggaagcgctttggatatttttcagtccagccctttgtctaacaaatgaggaaactgaggccccctaagcttgctatcgcaagtgctctgtactttccctacttaatcctctcaatcgtttgaggcaggtgatagtaattcccttttacagacaagaaaagtgaggcctgtcgcaccagaagaaaaaggtatcagcagggatttccgcccactctgcccagcttcaaggttcacggtcgtccttccatgcacggctcttccaagtgtagccctgggagcccgggggtccttgagaacctttcaggaagtctctgaggtaaaaacaattttcctaatattgttaagacatgatttgcccttttcacttctatgaagctccaaatttaaaagatttccaaaactgtaaagaaatgacactttctctctaattttattttgctttgtaaaataattttgctttgtaaaatcgtttttccattaaaaatgtgatttatgtcataacctatattgggtttattactgatattttaaattcacatgtaaataaaaatgtaatttctcagtaaatatcaacagacatatcccacataaacaaaagctcttgggggtcctcaatactttttgagagtgttaaggggtcctgaaaacaaaaagcttgaagactgctgctctctaccacgttagctcccctgtggcggaggatgactgtcctaagagctcataggcacggggcaaggggagcctggctgtcagctgcctgggcttctagtcttgtgctttttgcacaccagtccagggaacgaagaccactggctttaagatgcttccccagctgtccccagactctgccagcaggggattctctggtctgagcttaagttgtgttctcccagccagggatgcccctgccctttgatgtctccttgctgccacacatttagccgccctccccatgccagcttggggggagggaagcagtgagggtagggaggtggctggggcagctgggcaactgtccccacccgtccctggcacggctctgcccagtacacaaagagcaaagtgaatcttgtccccacccctgcagctgaggggctggaggaggaaacggggaggcccacacagaaggggtggccaccgtggggctgtccatcactcagggctctcagagggagtcaacccagaaacagacaaagagggtgagtctgggctgtgttcttagctagtgagaggtcccctagaggatgaagtagatgatgctaatgaggatgactggatgtcacacccatgatgctattaggtcctcataatagcatagtgaggtggacagctagtacctgacccatctcacagatgaacatactaatgcctaacaaagcagaacgactcacgctgggtcccagagctggccagtggaagcactgagacctccacatactgaaggcatggactattgaccgctgttggtattgg

SEQ ID NO: 587585 - DNA, 4001 bp, Homo sapiens; identical to SEQ ID NO: 587392

SEQ ID NO: 587586 - DNA, 4001 bp, Homo sapiens; identical to SEQ ID NO: 587393

SEQ ID NO: 587587 - DNA, 4001 bp, Homo sapiens
gataattctttgttgtgggaatcctgctgtgcctagtaggatgtctgagcagcaccccagcctctcccactagatgtcggtaccagcaccacccccacaagaggtggcaaccaaaaatctctccagatattgttctaaataatgccccctgagagaggggagataaaatccccctggtagagaactactgatttatatagaacaactcttccttttacgtaagagaagcttgaaactgccccctttcagcgcctaaaaccaccttaagaagaaagtgctaacctaggttaggaggccgaggctgcttcttggagactaagaaatgcactcaagacctataaggcctttccccacagcctgatcctaagtggaaaggccaggagaagcgtggcagagaactatggatcaggcagcccctctcatctttaccataagctaggtgcactgcaaagtacataggaaataagcaggatctgaaacaggccagctgaaactttcaagaggaaccagttcaggcatttccaggtagcaagggaccaccctgggcagctccgccccaagccccaagcccggcggcctgcagggcctcccggggccgggcgcccgcgcggagctcccgccacgcccaccggacgtcacccgttacacaacgccccccgcccccagcttatgcaattctgccctcccgcggttcccaattgtcccggtgacttttgtgggtgaggaagggagacgccgcctgcccggcctagttgccctcgcgggggattctctccccgccccggcagtcgtttccccgcggcgggcccggcccgagagccaattcccggaaagcgcgcggcaggaagcgagcggccgctcgggatagcccagctaccacccatcccgcgccggggcggcctcggtccaggtcacccactccgcgccgggagcgcgcgcccgacagccaggccgcggccgagggaaccccgcgccgagcgcccctccccgcgccgcgtcacagtcggctcccagggcgatccccattatgaccgaagcaccccggggcgccgccccctcccacaccccccagcaccccgagacccgacacgccagcggcccagcggccccggggaagcagaggagactctcggggcgcagacaagctccgggtccccggccctcggggccaggagggtgcggtcggcccggccccgccgcatccccgcgcggtcacctgctcgcagcgcctcgcaggcggcggccagggcctcccggtagcgcccctggtgcagtagctccccgagcctgccggccgcccgggcccgctcgcgctggcccggaaaccacttctcggccaggtggttgaggacgacgctggttctgaagtctgaagcggcgatggcggcggccagaggcggcggccgcggggcggtcccttcagcatcagtggcactggcggtggcgggcggcagccggtcccggcagaggcggcagcgggcgcggagttccctccgcaggcagcggcggcagtagctgtggccacagggcacggtcaccggctcgctcaggaagccccggcagcccaggcatctgaggagcccgccggcgccgccgtcagcgcctgcaaccggggccgcgctccagcccagcccgtggcggagccggtagttgaacaccaggcagtccaccagggcgcccaggcactcgggcctggccggggccccgcggcgcagcgccgccgcgaacgcctccagcgcgcccttcaggtggccgcccagcgccagcagctccccgcggcggagcagcagctcccagcgctccgactccgcggccgcgcgctccagccgatggccgctgccgccgcccacttcccagaaccggcctcggccctgcggcgctggggccatctcccgactccctcctggggaggtcctcgccaccgccggagaggacatggcccgcggagggctgcgccgccgccgcccgccgccacggtcccggagcctcccgggcgcgcggctccgcacgcggcccgcgagcaggggggcgtggcgcgcggacacggcggggctgcgcgcgcccgggaagccccgagggcggggcctggcgagggcggggccgggctcggcgacggcgcccgggactcccccacgccgcccgcggccgcgctcccgaggagccaagcgctgggccccgccccttccgagccccctccgggtgggggacgcaggtcggatgattcctccgtcggagatctaattggcttctccggaaaggagggctcggctcgtgacggaacaaagccggaaggaccccggagcttcagtccccgcttgcctgtctgccaacgccgccacctgcggtggccctcgcccctgccgggggttgggggacgctcccctgccgcgcgggactccgggtcaccacccctcccccgacgcccccgcccaggccggacctgccccaactcctggcgggcgggggtctccccgcgtggcctcgcgcttgtgcgggtctgcattttcatagctctacgcccatgttccaggtgggcgcgcccaagcagggggcctgggagcgcaccttcggcagatgactgggactcttcggttctagaggactcaactttaaatatgaacaaaaaacccacgttcctggggcgactccctccagagggcaaggagtttttcctggtgccaggtgactgcttgcccgtcttgcttaaaactcatcgtgggcccacctcgagggagaaagcccacagcttcctcaggtgtctccacacctcaagcactgccttacagctggttaaggtctatatttggcagttttaaaagaaaacaccaagaaacatgtttcacatggcggtcaccgtattactacaacccaagctggctctgcagttttgctgacagaagaaaatgatcgggttgatatataatgggtgctatttcccttaaacttcacagcagcaagtttaaagctctcagctgaaaatacagatttgatgatagggtattagatcgctaatgttggaagtcacttaggacttttagtcctttttcaaatgattggaaacacagggaaagttatttgtcaaaaatcacacagctaatacagattttaagatcacgtctattccactactactacgttagactaatatgtaatatttaataaaatatgtaatatttcatagaaatatatgagattttcaaagtaaaagaagttgctaattggaaagttcacctgagcatgctatgtatgaaattggtaaacgtttaatatttctctttataaggaacaggcaattaaggctaaaaaatgttttgagttcatgtgttttcactacacaatcaacaagtcgtgtaacgtcagaaaagacagagttatattaccctaaagggaatgaataaaaaagaggtgcctgagaaaaagccaagcctcctgttccaacaggatgcagacagaaacaagttcatttatcactcacattgcacctgaagcaaattgcagctagatccaaggagcacctcctaagcatttggcatgggaagcattgggattaagtcatgagcataaccttaaatccaatcctaacccctaaattactaccttaacaagcagaacagtgactttcagctgatgtccacatactcccttgagacttgaaatcacaaacaaatatccatgtgtacacgcacattcatttttgtaacgcatccttgttcttaatggcatgttgcaaaatttacaacagtaaatatgtaatcaatgtgttcatgtttattacaaggagcatagtaaattaataaacactcataaacttcttttcaaatataaagtcaggttctattatgggatttctgccaaaagtacaatatgtggttcagaaaataatgtgaagtattatttgtcctttggagttccttttcctaataaatatgacaaccacatctgattctgatgtgaaataaaatggcacaattatgataatgtgcgggagaaaaaaatgggac

SEQ ID NO: 587588 - DNA, 4001 bp, Homo sapiens
cgcatataaacacacaccggtgcacacacatacacaaacacactcgtgtggagacacacacatgcacacatacatgtgcccacacatacacgtgcacacatgcatacacaaacgtgcgcgcgtgcacacacagattagtgagactcaatttccttggggagagccttggtagccactggggcccatggggagcacgcatcttgtcatggctctggtggccattccagggcagatactagggaccaggaagaggaacgggacaaaggtgaggagaaagattaaaaatttagtcaagttaggatccagtgagtcagtcacttatctgggaactgaccagggaaatgaactcttcctcttccaccctaaaccccaaccctgaccattaagtacatgatacaccatcaataactaattcattccaccaaagatgacaaatgttgttttggggttccaggacggacaggctagcagtggtgtaggggaggggcctggagtaagaggtatgggtttcagtccccacattgactaactcagtgaccgtgagcctcagcgtttttcttcctctgggagaaaaaaaaaaaaagtattgtttttgagatctctgcagtttcaagatcttagggacgaaactaatttggagcatgtttctgtcatgcacatctctcccctcatcaggacttggggtttcctaaccatattgagtagttcagccccctccctcgccgtgttctgcggtgttctcttcctcacaccctcgccccgctccgccccgcactccggctgttttttgatggtcttagctcgggcacggagaggagggaacctcgcttgttctcccaatcatctctattccagcgctgattcctgggacacctcgagcaggcagccacacccagagggcttccaaatttgggctggtgagaaggggcgcggtgggcaaagcgcctgcgtaaaagttgtaggcacttcagaccaccggaccaacggctcaagattgggatcagctgtagccgtgggttcgctcgtgcccgttctttccaactccagggcttctaggtgatgaaggcgggagagggtccctggtccccggagaggcagggcgacttgggagtgcatacctggcgtgccgagagcgcctctgctcccgcaggactcacggcgctcccgcgctcccaacagcctttcgagcaggctgggggttgaaccgggttcaagcagtggacgctacagctcccgggcgcagcccccggggtccccgcccccactccgtcccagcccagcacgctctacatccccaaaaccacagccccgagggcagtcactgtctcccgacccgtcccccgcgtgccccactcctcaaagccagaattccggagacgctgtccctggagccacgctgcactctccaagacgcccagcacacaccgagacttgacgggctctgtcccgcctgattacgggcgctcgggacgatccagggacccagcgcctcgctccccgggcgcgccagcagccgcgccgcgcccggcccgtacgaggtggggttgggcggggccgcccggggcggcaggaggacccgttagcctgcacgtcctcgcatcgctccccgcaagaagtctttgggaacccccaggcactgtcgagaggcagccccgcgcaggacgaagcctggagaccccatagggacgctcccgctttctcgcgaaccgcttcggggagggggtggcgcgggaagcgctcttacttggtttcagggatccgcagtggccgggctgggaccgcgctctccacggtggtccccctccgcttccgccgccgctgagcccctttctcgagcagagggggcggctctggtctccgatggctggagaaagcaagcaccaagcgtaggtagccgcgcgctggagtcgcgcgtttactcttttcccccttacttttaactagaggaggatggcaaacccctccccggacccacccccttccccgaaggcggccgccgcagcaggcccggcctccggcctcttttgttgtaattcgagagcggccactcccagggccagagggagctccgcgggggaggccaaggcctgcggggcagcccttcccaggctcctcgcgcccgggtttccggagcctgagatgccgggaagggggcctttcctcgggagattcctctaccctttcctccctgcagccgtcccagaatttaacccttcgatgtccttatccaccagccttagggcccgtgccttgtccacctcctatcccgaaaaccctggccctccttggcacataatacacgctcaattaaagctgccgaatgaaagtgttcagaaacttgcacccatctcgcctgggtttcacctcccttttcctgtagggggaaaaccgatcctgaaccagtaaataaacagccccctttcggccagcagatcacgtctatggccttggccaagcctcttctccgaggactagttttcttctttgtaaattcaacgctttggattccgtgacctctggggtccttcctggaatggtagggctgggattaacaagccctgtgcttggggactgaacaggacacagctaatgcgtggccattgtgcagaaggacctcctgtgcctggctctgaggctccgggtgggggatgggcatgctgggagagccctctgcacagagagggctccttaagcaagagcagggctttgccagtcccaaggaggcagcgagctgcaaaacaagggacccctgtgcagaagtagactgtcacctgaaaggcggctccttcctcagtcctctcttactccactccctgaggagacaaacccctcccaaatctcacctccagcccaggcttctctcctaagccatggatatttaaatccattggccccgaaagactttcacctggacattcccatggccgtagctaacctggcaagccccaaacttggcactgcaactcacggtccaccttgactcctgtgagctctcccaggcagatatggggtcttctccgttgcctcctccttaccctccccactgatcagtccctgactctggtgggcagtagagggcaagggtcagaggaagggggtgtagttatcaaaggcaggaggagggatctttgtggtggtggaactattcagtgtcttgagatacagaaaaccacacaggtgataaaattgtatagaacgtaatacacccaataaaatttcaattaaaaatttaaaaaaatcctccgtggctccaaggtcctcaaaatgtaatctgaatcctggctgggtgcggtggctcatgcctgtaatcccagcactttgggaggccgaggcaggcggatcacaaggtcaggagatcgagaccatcctggctaacatggtgaaaccccgtctctactaaaaatacaaaaaattagccgggcgtggtggcgggcgcctgtagtcccagctactcgggaagctgaggcaggagaatggggtgaacccgggaggcggagcttgcagtgagccgagatcccgccactgcactccagcctcggggacagagcgagactccgtctcagaaaaagaaaaatgtaatctgaatcccttgattaagctgacagggcctctggggcatttccagcctgcccaactgccaaccacatctcacctctccccctgggccttactttctgtgctcctataagccttctatttcacaccccaggacctttgaacgtgacattcccttggcttctctgcacagtaatgcctggttattgagctttcactcagctgtcacaccctacacagtgcctggacgtaccagatgctcaataaatgctggtgaaactgagctctcccctttccccatctcccatccttccacttctagtcctaccctctcttgctaaagcattcactaataaggtagaaaatgaaaggagaccaactttgtaaataatcttttgtctgttataaagaaaagcaaacttcttgtgaaatattcagaaaatatg

SEQ ID NO: 587589 - DNA, 4001 bp, Homo sapiens
cacccaggatgaagtgcagtggggcaatcacagctcactgcagtctactgaaactccctggctcaagtgatctctcagcctgctgactatctgggaccacaggcacaggccaccacgcccggctaatttttgtattttttttttatagagacggtgtctccctatgttgcccaggctgatttcgaacttctgggctcaagctgtcttccggcctcggcctcccgaagtgctgggactacatgggtgagccactgctccctgccaactttttgttttttaacctaacaaaaatgtttcacaaattaatgccaaaataaaacaaacgtttagcggccatcaaagctatggagagactctattataacttgaaccgctggggacgtgccgcctgagagcacatccaagcgacaccgccctaattgcaattccagcatggaagaaaaaaggaaatgttgtcccgtgttatgaatggcttcagctgctctctatgctgctgttgcatgtttactgaatcgaggttcgaattaagcaggctgcctccattgcggacaggtctgagacattctcatttggccccgaacgcctggaccccagcgagcgggcggttccctggcggcggtgaccaccgttgtgctcgctgcctccacgcggcgcccgtcaaccccacgtgctcgcagccgcgcggcggggccgggcgcccggagctgacctcagcccccaggacagaaagggtggccaaacgcagacctggcaaccccccgagtcggcgaccacagattgctggtggctgcgccacggtttcgggagggtcagcccctcgctgggttctcagggcactaagaaaagaggggcatgcgagcctggaagctggagagagtccggggctccccagagcgggtgggacgccgcgtccccaggactccgcgccacgcgtactttctccaccccgacacccactgccactcccacagcggagcgaggggccccgccgagggcgagcgtaccccgtgcggctgagatgcccggaacgcctccccgcgccccggcttccccagaaggggccacagtcggcccgcgagtccccgggcgggggctgagccgcagtgccaaccaaggcgaggtcaccttggcccgcgcgcctttcattccagggcccctccggcagagaggtgactgcaggtcaccgccagccgggcccttactccccgcctccgccgtcccggcccccacaccccggaacctccccggcggagcctgcgagcccgggaacgcggtcccagccagagtggaagggatagcgcgggaacccggcagagagaaaaagcgggaactgggcgccgccgcttcacgatcgggaggagattccctcccggcccctcctggatcccactccggggaccgtttcggggctagagcccaggctgggagagtccctgggcgcatccaccgccccttccaacttccttcttctcatcctcagttcgggtggcagtggccacccgccgggtctgcaggtggaggggagtttgcgcgcaaaacttacggtcggcggcggccacccctccgcgggaggcggtcagactctggagccacacggccagagtcagcacgagcagggctttgctctccatctcggggcgcgtccctctggaggagctgcaaggcgcggaccgactgatgagccggctgagccggaggctggagagggctggagccgcggtttggcgctgagcaagtcgccctttaaaggggatggcagggcagctagaagtgggcagctttcccttgaggaggaggaagagggggaatcgagtctgacactgttttcacgccaaggctgcttatgtgactggaaatatgcaaataaacctcatcacctattggctataaaatcataagttggggggagggacctaaattcacttctaaacgtttgagcaaacagtaatgaggatcaaccctgccaacgagaagagggggaaagggcagacggaaaaatttgctttgttaggctcctgttcgcttagcttaaggggttccactctacccgggggccccctgtctaagcaccaaacacaggtttacatcgattcacgttaaatactcaacaatcacctgttttccaaggagggaaagtttagctgttaaattacatttgatcggcactttaatacacctctcttttgacgaatcctgtttgtcacttgcagtcctccctcactcaccccgcaccccatccccacccccgcaaagtcaatgtagggatagagggacacacattgcgtcccagcttgtgcttgtacaatctggtgttttaacattggcaagatggatcagcttatgtgatggagaaaagcctacttgctctaactagtttctaatttttgtctcatgcaaattattctcaatcctcaaactcatcaaggaatgcaaggataatattttatgttcagaggcagaacatcgaggtcaaataatctaaagccgtattgagttatgataagtgaaagaagatagtcgcaaaagacacatattgtatgattccatttaaagtgtccacaaatagacaaatccatagagaccaaaagtagatcagtgcttgcctggggctgggtaattaataggggaagggaagaatagagatttgggggtagttgatgacaatgttctagattacattatgctgatgctgcacaactctgtaaatatactaaaagcaacagaattatgcactttcaatgggagaattatatagtgtgtaaattataggtcagtaaagctatttttaaatggataagaggcatgcacataaaataagaaaaaaataacattagatactatgcttttctgccaaaatgcttggaatacttttaaatatctttttaaatataagggatttacattagccaggaaggacaatgaagtgtatccccaaccccctctcagtttatggctgagaaactggctcatcaaatcagaacctccaatctactatatttatggtctgaatatttttaatgtccccttttattcatcccaccctccgtcacacacacacaaacatacaatgcacaattgtaggttagaacaatgaaatgctttttaaaaaactgggctcactttttaagtttttctcaaaaaatgaaataaaagttgataatacccaaatatttcaaaggtctctattctgcataacaattctatctttaagttgatgcattccgtgccacaacacaacacaccgtcttgtattgcaattattacacaatatactgtgcacgttcactctaacctacaaagtatgtagagaatcttgaaacctgccaaaaattaaacttcgcagaactttagaagtggcagaacagaccatgcaagggatgaataactatgatatggccgtcctccaaaaatcatgtagtaaactctaattttaaaaaatgacagaagatgaatacaattgcattggatgtgttcatggtgtgaatggcatataaacagacgtgcagaactgcctgctatcttatatagaatactcctgcagcctattttcatgcataaatgtcctttgataagacaaccaaatcaaactgcacttctgtgcctttcagaaaactgcaaggagattttatataattgctaagggaaagtctgatacttatagcgtatttttaaaatgatttcccaggctaaccagataacaaaattaaagcactcaagagttggaggatatgtaatatttaaatatgaatccagtttggagtgaactgtgccattagcacgtccaatagagttgctgagatttccaggaagacttaatttacagcagcttagcctggttaaaaaaaaaaaaaaagcaagacaggttggctcctctcccagggccagcgcggagcaggtgggtgtggcggcaacgttctctcctgattggctgcactgggagccatcaggtgcccgccttctaacgcagaaactcacatgatctctaggtcaggattgcatgt

SEQ ID NO: 587590 - DNA, 4001 bp, Homo sapiens
aaagtcactttgtgtacaagtactaaagaatgcaccaaaacaaattgaggggttcacagcctcttatccctcgaggcaaaagacttctagttcaaacactgatgacacaggttttaatgaaagaagagcccatttatttatctattctgatcggacatcacagaaattcaatgcttattatagtagaggacaaagctggacaatcctaatcaccctaaattaaagatacctctcaatttcttctctctcctgggccattacaccaaacctagagcagaactatacccaccttcagggcagaagaaacaacgtaatagcttattgatctctggtgtagacccaaacccacaagtcatcaggcaagcagggattacagccacttgatgcagctaacaatcaaaagtcgtgtactgggtttttggtcccacacaagcacacctctggcaattacccctacataaaaaatggaccaaactactctcctcaccaaaacaaacaaaaatactactaatcaggtacgggagcaacacatccttaattgtaccaaaaagaatttcttggctgtcagtaaatgcccaattacgttcattaattcttcatttagcgtcacttgccaggtttcaaaagccaccatcacattcaattccgtagataaatgccttcaaaagagataacacttgctgacaaattggctgttgactaaacctcaccaccaccaccattatactagtcaaatcaatgtttgtggcaaatgaattagactttttataagtaaaatttaccaaagtaatgatatcttctaattctttttctggagaaatcagagcaacactccaaaaaggaaaggttaaaactgagctctctgaaatacctattcagtgtgtttaactgatgaactaagaacggtgaagtcagaagtgtaacttaattatcttaagagatagatgttctttgcaattaattccattcagctcttgctcagaccccaacgcaatataaagctgtccgcacagtcttcagccttctcttaacccgaaaggagttatctctaacccgatccatcgactggaataaagtaacagtgaccacagcggcggacgaggatggatgaaattacaattgaactaggagtcaggacagatgtgtacaccctaacaggagagactgaggtggggctggaaactattttctggccttctcccgcgtgctgctcccggggaaccaacaggaccctgcacgcccggattcggcagagcccttgcccccgaggtggagtggggagaagtcagcgggaagccttttcagggaatcgagtaggacaagggctggcgcggtgggaatctcgccggtgagagaacttcctaaccccgggttgagggggcggggggaaggaccgtcccggcagcggcgggggcgagctcctctgctttctcacagtcaagcatctttgtgtgtggattgtgccaggctacgggtcctggagcaactggccgcgggggccctcgaacccaggtcgggaagtccgcccgccaccccctcgctccgccggggccctcccggccgggccccccagcccctctccaccacccgagggtctggaggtggacgagtggagaaaagcatctccgtgtggggacacccgttccgccacatccaccccctcaccggtctttgtcccgccggtagccagggtctccgcgggagtctccaggggaacccccgtcctggaggcctcggggcccgggtcgcctcagctttgttcggtcagcggggcgcggggacgcggacacttaccgtacaccccagcgaggaaaagcaagagcaacgcagacctccaccgcggagactcttttgtgctccagcgacaggccataaccacagcagatggagagagagaggaggagacggaggaggagggaggagaagctggaggtagacgacgccgacgccgccgccgccgccgccgccgccgccgagccaccggctgctccctgcgctctccgcggctgcgggagggggaagggaggggccgccgccgcccgcgcgcgctccctcctccctcctccctccggctcgcctgctcccaccccgggcggtgcgagagccccacgcggggcggccctcctgggggcaagggcaaggagctcgcgcgccagcgcgagacgagagggtggcggacgccggactccggcctcgcgccgctcgggctagccggcgccgccactcgccagactgagcgcgcgcccatccgtgcgatcggcaatcccctggcccgcctgcctcggttccctccccgcgctccgctggactttccaagtttcgggccgatttccacgcgacgggagcccaaggagcaaggcagcgccaatcgatgacagagcgtgcgaacgccggctgctggatgcccaggggctggagcgcggggtgtgtggaggagcacggtcgctgtccgagggctgggctctggcccagcgggtggggggagggggggtgggataccagctgggaggctgaaggtggttccgtgttgggggaggcgtggatggtctgaagctgacaacttgggagttccttcctctatccggtacccccaagtctccacttgctgtcggcgcggagcttcgagtgggggtgggctcaagttagtgcggccaacctggcagctggtcggtcaaggggcagtgtggactcccacgctcaaggtgcccggaatgagtcgggcaaggcttgtgcagagcccctccagtctggcgtggaagcgccaagaggtcatttgacatctcacgctgggtcgggtgcagctgggccaggatgttcggcagggctggagccgactttcagggtagatatattgaaaggaggattcgcccatcacgctgcagtttccctaaagctcttttctcactcccagcaaatgggagtcctcctttacttagatccccagaacacttttctaagtacgtctgtagtgacgctggcacatcagaccttaccccctgtgtttttaaagcgtttgtctacaacgtcttatttatattagattttatcgttgccctttgcaagcactctccatgctattcattgaagacctacactgcatcatgctgtcctattgacataggttgtcactttttaatcccaaacatccttgtgagataaatattacccatgttttatagaaaagagagaaattaaattactcatggcaagtaagttgtttgaaacagtttttctcattccaaagtaaagattgttgcccctataccacagcaaactctctagcacaatgcttagcgcctagtaatgtgtcggagttggtgcctgccagggggttcgtggtctccctgacttcaagaatgaagctgcagaccttcccggtgactgttaacagctcttaaagatggcacggactcaaagagtgagcggtagcaaggtttattgcgaagagcaaaaggacagcttccacagcatggaagagaaccccaggtgctggctggtggtggccagcttttattcccttgtggtcccctcccatgttccatttctgtcctatcggagtgcccctctttcaatcctccctgcgattggctacttttggaatcctgctgattggtgcgttttacagagtgctgattggtgcattttacagagcgctgattggtgcattttacaatcctcttgtaagacaggaaagttcctcaagtccccactggacccaggaagttcagctggcctcacctctcagtaagtaaatgttaaaatttaaaacatactttctggggaatacatttaggcttttcctcagtctcctgccgatttgcccccttttaagtttttttttttaaaaccaggaaatgctattccaaaagataagagaaaaatgtattaataagtattacaaaaatctaataattaacaaatcttatatcatctggtaaaaaaagcaaccagcactccaaaaatgttttccattcttgttggaaagaagcaacttcagtgtt

SEQ ID NO: 587591 - DNA, 4001 bp, Homo sapiens
aggccgctcctgcaggagggcacggctgcagtgggcacactcctgtagcagctgctggaaactgagcagcgggaagggccacgtgtgtaccaactcgcgcagtaccactgtcttcttgtccatgaaggccaccttgaacagcagggggaagagttcgcgtggcagcaagggcagggcctggcaggcagctggctggcactgcagcacctgccgtgtgctcaagaacacaagcgtgtgcatggtgctgggccgggcagacggccacctgcaggagagggacttcagcagggaggagagaccctaggccactaccaagccacacacaagtggtaggaaggcccagcatagtgcctgaaacaaagtcagcagttagcagtggccatggcacagagaagcacctattagatgcctagcgctgggctgggtgcagtgaactggcagacaaactcacaactcagccccagccctccagatgcacaggatctctttagagaaactaagcgtcaagcagtgtggcatcgtcaacaactcgcttgcttgggtatgcttttgacagatgcctgttgccttgcagggccccccatgggtacttcaggcctctcaaattacaaagctgcttcacaaaaccttcttcgaaacctgaataaagcccaggactctccccaccaaccttcatcagcattagtattgacgggacactctaaggagtcaagcagccaaatcacctttccctcccctctcctcacagatgctctccagggctacacttggactccacaaaacaccaaagagctggaagcacagaagcagcttcataagcaacaaggcaggttgaaaagaccgagacccagggaacaccgagtccagatgatgtagcctataaaatacaagcccccgcaaaagctactattctccagagcgtcaccaagcacggagaccccgaaagaaagcaaccctcacctttgttggcccttaccactggcctaaacctctccctcttccctggagagccactgtggaaagaccaagtcttaagtatgtgggattcagaaggtgcaaagctacagactgctcagacaaggcaaagaaagctgcctcagcagcacccaagctgcagagatgcacaaacactcccaaggccacaaggtacctgtgacacagggtgccagccctgctgctgcctgtagcatcctcaaaactaaatcgcagccatctccctgtgacagattagaaaatgaaggcctcggcctggcccaaggtcacagcctgagtgacaagccagggaagggggccggggaagacactctggccccaaggcccttctttttgtcgacttttccacatacaagtaagtccttaaggcaccggttcctgaaaagtcccagacaccaaccctcggcctagttctgccggtggacagatctcaacgatcatactcgctctgacaggacagaccaaccgagcacttgtcacgggagaacaccaaagcagacggcctgcccaccaagggaggcaggcacctccgtgcgacgccccctcccctcccgccggccgcagggaacgcgacggtcctcggtcgcctgcgtttcgcgaagacgcccccgcccggctcctccgggcctcgagccgcgggaggcgctggaccctccgctctttcgcctcccgagcggggcctgctcctccaggtcggatgcgtctcccaccagggcctgacgccgctccgaccggcccggggactcccagtccttcccggcccgcggtggcacctcccaggctcccggcctcggccccgggctcccaaatgcagccactgcctccctcggccaggccgccccgagcgaccggtgccccgccccttgaggccaggcagggccaggggcgtgcgccgccccgctcagacacccccccggccgcccgcgctcaccggtcccgcaaccgcagccaccgcctccagccccgcctagaccgtccgccgctccccgcccggcgccgcggcgccccgcgatgacgttgacgcctcccattggctgcttgtccgaggcccgacggactggctgcccaggggcggtggccccgcccccggcccgccgcgcatccgcattggctgtcggcccccgcgacggctgcgcgggagattcgctggacgatcgcaagcgcggaggccgggcgggcgcgcgcgccatggagcggctgcgggacgtgcgggagcggctgcaggcgtgggagcgcgcgttccgacggcagcgcgggcggcgaccgagccaggtgcgggctgcccaggggccgaggggctgagggcgcggcccgcggctgacgcgttccctttacaggacgacgtggaggcggcgccggaggagacccgcggtgagcgcgcggcggggcggcgggggcgagaagacaccgggtcggcaggggcccaggccccaccctgaccccgcctcccgctcgcccacgcagcgctctaccgggaataccgcactctgaagcgtaccacgggccaggccggcggcgggctccgcagctccgagtcgctccccgcggcggccgaagaggtacccaggccccgccgccccagcctcctcccacttccctgtttggcggagtggcgggagccacggagtcgcggccaggccgccgtggggcacagaacttgggagggggactgggcaaagtgaagaagggccgggcctcgctccaggtgcgggaggggtggctgggagcgcttctgccgccacaacagccttttctggcctgtgcccctgttgtctcctgcaggcgccagagccccgctgctgggggccccatctgaatcgggctgcgaccaagagtccacagtctacgccagggcggagccgccagggctcggtgccggactacgggcagcggctcaaggccaatctgaaaggcaccctgcaggtgaggagtgggcaggcagtgagtccacgctaggtccacagctgcttccggtccgggtcgccctcttgtcattttttccacacagacaggcacgggcccctgtgccaaccagggcacgagtcttcagggagcttctcggggccttcgcccttgactccctttctagtccagccttgtgctaattagcctgctctacaattgagcgtggggactcaggtaggttttagagtctacagtagctcaggggcctgagttcctcctgctgttctgttgttcccctcccaggccggaccagccctgggccgcagaccgtggcctctaggaagagcctcatctaaggcatccaccccaaagcccccaggtacagggcctgtcccctcctttgcagaaaaagtcagtgatgagcctccacagctccctgagccccagccaaggccaggccggctccagcatctgcaggcatccctgagccagcggctgggctccctagatcctggctggttacagcgatgtcacagtgaggtcccagattttctgggggcccccaaagcctgcaggcctgatctaggctcagaggaatcacaacttctgatccctggtgagtcggctgtccttggtcctggtgctggctcccagggcccagaggcttcagccttccaagaagtcagcatccgtgtggggagcccccagcccagcagcagtggaggcgagaagcggagatggaacgaggagccctgggagagccccgcacaggtccagcaggagagcagccaagctggacccccatcggagggggctggggctgtagcagttgaggaagaccctccaggggaacctgtacaggcacagccacctcagccctgcagcagcccatcgaaccccaggtaccacggactcagcccctccagtcaagctagggctgggaaggctgagggcacagcccccctgcacatcttccctcggctggcccgccatgacaggggcaattacgtacggctcaacatgaagcagaaacactacgtgcggggccgggcactccgtagcaggctcctccgcaagcaggtaagacagcgacgggccaggac

SEQ ID NO: 587592 - DNA, 4001 bp, Homo sapiens
cctgaaacacaggttggcaggccagtctcggcagtcgagagccagccaatagatggaatggaggcctgcacctgcgtctaacttttgacgctataaataggttcaagaaactaataaaacgttctggttttctcctttgacaaaaacattttcttaaagctctggggcatcaggttcaaatttagaattcctggtgtcctcagtgtcttcacaggatgtgaccatgtagggagagccacccaaccctgtcaccttctccttctccacccatgcccagcaggtcaggagcttcctgctcaggacgtggatgtgtgtcgcttgctgcccccgactctacccccaggcaagtggctgctgcttggttctagggtgcaagaagctggaagtacagggtatggcttgagaactttgcttaggtgacaaagcccggggtcccattacccaagcatggctaggagggggagagcaggccctgggcagacacgcctccttgttatcctgtgggggcctgggcagagctggcctcagaggagctacgagccccagggaagtcaaggcacagctttgtccagcacctgctcctgctggcctaggggtgggaccagcttaactagaattgggcctttttctcaggtaacctgtcagagaattgggggatgagaaaaataataggaaattcggttcaggagccatgggtctgtgcttcccatgccggtccccagaaaggtgtcctgtctttggggatagatggggccctgggaaagctggggtgggacaggggacgccttgggccaccaactgggtttctggtgtggcttcccaagtgggctctgggagcagtgtgacctctgagatcagcaaggagcagggagtttgctgggggaccatatacatgtacttgtcgtaaagaaatgggaaggctggggtctggtttcaggaacaaggagcccagttttaaaagtagggatctgggctaagccagccagcccacccgaagccagggaaaacagggctgcaggtgtcctgtctcccagcctcatctggccggcctccccaaacatttgcctgtccatcagctcttcctcctttcgagtcatgtggaaagggacaggaccaagtggccttggtgtttaaatcttgccctaaattgtaactcacatgattatttaaagtcactagaaataagtaagcacagcaataaagttttaatggaatagctttggcccaggcagaggcagttcccagatgtctcaggacgcgtgtgaaccccaagaagttgggggcgttatctgggcccttgggatccattcccctgggtataaagtgttggtacgtggctccaggcctggcccactcagcctcccccaggaaggcttctcaagtggagaaggttcttggcctcagaactcacggcgctgctgctcacgctgaccccccactagatgcagatcggtgtagaaaggcctgccagggcagggatgagggccccaagctggaagcagcccagaaatccttttaccagaggacaactccctaatccgctgggcaggggcggggtgtcacacgcaggattccgcgacgactgtcactgcctcctgggcgcccctctgtgcgggagcggggagggaagaggatggaacgccctgtgtctgcctcgggcgcagtgcgaggcccaagctggtctttgggcggcccttgcgcacctctgcagcgctgcgacctggtgcctgtatcccccacggcctcctctgctacccacgagagccggttgattttcggccgggctcagggagggcgtggcctccgcgttccccatccccctccaggacccacgcccttctcggagcgcaccagggtcagagccgggatggtccccgatcccccagcgcccccacgcctggtgaccttgggtcgggcgtcccctcacctgacgctcccgcggcgagcggctcccccgccgtgcaggtggcggccgggcccgagcagtcgccgggctgggagggggcgggggacgctcgcgcacgcgcaccagagccccgcgcccgccgccagtgcctgacgtctcgagcgcaggccaatccggagggcgccggagtcgggtgcgcggggggcgcgcgccgtggggagcggggtgtccgggagggccgggccgcggcagcaccaaggacagcgccgggtgggggcggggccgagcgcgcaggcgcactaggctgccgcgagcgcgggtggcgcgggctttccggggcgtggagtcccgggggagcggggcgagaggcgcccgcggcctcccgcctttcccttggccccgctcagggcgaccgagccgcgagcagcagcggggccaggtccatggtgagggcgaggcggcggccctgccagcgcacgtgcgagggcagcgcaggcgcgccgggcccgtactcgaagcaggcgctgagctcgaaggccagggcggagcgcaccaggcccacgccgcccgcacgctccggcgccgggtggtacaggcgcccgttggcggccaggggcagcaggcgcgccggctcgaagggcacggccagggcctcgccaccgccgcagtaggagaggcgcggaggcccgtggtccgcggtcagcaggtgcgtgaagaccaccggccggtcctcgcagcgcaggaagttgcgctctctgccgcagggcgagaggaaggggaaagcggcctcgtagcgcccgctgcggttgggtctcaggcgggagaagaaggtgaccaggaactgcgggtctgggggatgaagggtgcgtgtactcagcgcgctgggctcccaaggcctccgggcccaggaccataccgagggcaggcgccgacggtaagaggttcgcctggcctcactcagcggggctcctgagcgcaggacgcccactccttggtgcgctgggcccgtcggcagagtcggggagcccatcaggggctgcccggaagggagaaagaaggggctggagagggaggcacagcattacctttgaagcaggtgatgaaattcttcattttggaatcatccaggaaaagctgcagatagagggccaggccgtgataagtcccagcgtgcaggtgggggcggggaagctcaggaggtcctgaagctcgggaggtcctgaaccggcccgagcccacttttcctgcttgtctgtgcacaccgcatgcagggaggcgcgtgaaaggtaaacctgggggccccgccgacttatccgcgtctatgcgcacctctgctccctggtcagccaattctttcccgcaccttttccctcttttcaagtttgtaatcagttgtaccacctcctccgcggagactacctggcctgctgcctcccggacatgcagctgccttttgacagggcttccaaaaaaaggcagggcggcccgggtgtctccctggcagcggcgagaagtcagcgccggggctggggacttgtaggacagagtccgaagctgcacaacgcagcagggacgcggcccatgtaggagcctcggcccggaccgacccaactccccgtctttccagcgcgctctcctccagctctgaggagtcgaggttgcccaccgcgcaggccccgcccacccacccaccccctggaacgtccctccggccccgcccctcgagcaatggtcccgcccacagagccacgcccccccccccgccccgcccagagacctctcccggccccgcctctcgagcaacggccctgcccccgcccacctggccctggtggtccacgtagtagaaatactcgcgggtccgcggctccggactctggccctgcgtgtaggaaacgcccccatccccgctgcaggcccgggctccccgcgaccgcgccaaggccagggtccggagcgtcccgcaaggcggccacattctcctcccgcgccggaagcgaccagcaggtcacgccgggggcggtgctgcgcgaactcgcgcctgcccgcagtagccccgcgcttcgcgttccggcggcgcccgcctccgcgaccc

SEQ ID NO: 587593 - DNA, 4001 bp, Homo sapiens
gtcagtgacaattagccaccaagaagccctgctctttctcacctctgggcaattcactgagctttcctgtttcctttccagacagcactgcttcctcagagaagcctccacccaccttggggttaggtcccctacccacaccctcagggcacaggcacccctctctctcctggctgtaaccactatacttctgtttgtcttctccctccctaggagggtaggcccacatctgcctccttcctcactgtatcctgcattcaatacctgattcaaggtagacactccgatgcaagtctgacaagttaatgatttaacaaatcaaagtgggcacgactcagagaaagagggcaaaggaaaattcccgacataaaaaagcgaagaagaaggagaaggagaaggaggagaaggagcaggaggagcaggagcagaaggagcaggaggaggaggagcaggaggaggaggagcaggaggaggaggagcaggaggaggaggagcaggaggaggaggaggaggaggagaaggaggaggaagaggaggaggagaaggagaaggaggaggaggagaaggaggaggaggagaaggaggaggagaaggaggaggaggagaaggagaagaagaaaaaaaccaactagggtgagaccaggggatggggagacagccctgagaagagaggaagaaatatcagtagctgatttaggaaaggagtttcaacatttacaaatcactcccccccgacccccacctctcccacttgcaggctgtcaggtcttccagggcagaaagcccatcatctggagcagtctcttgatttaaaaaaagttaattatgacatttttacaatgataagtgatcaattaggtagagctgtacaaaactgccatatggggagctcaaaaacgttgtcgatatcaaaatggttcatacaatataaataacttacccgcatcaccttgcagtttgttagtatattcttaaagaaacacgtttactaccgggcgcagtggctcacgcctgtaatcgcagcactttgagaggccgaggcgggcggatcacctgaggtcaggagttcgagaccagcctggccaacatggcaaaaccccgtctctactaagaatacaaaaattagcctggcgtggtggtgcacgctgtaatcccagctactcaggtggctgaggcaggagaattgcttgaacccgggaggcggaggctgcagtgggccgagatcgcgccgctgcactccagcctgggcgacagagcaaaactcttgtctcaaacaaacaaacaaaaacacgtttataacacttactgtgtctaaaacagtagtatgattgccattattttggagatgaagaagctgaggcccaaggggtgaagtcactcgctcaaagtcacaggaagagggaggacttcaaccctggctccagagtcggaaccctccaccattaggctacactgccttccggaatgagtccgaagattgcggcttggagacagtgactggcccacgttcacagccagtaaggagccacttggccggaacgtggtgtgtctggcgccaaaacccctgcacgttccccgacccctttcctggagtccagtgcctttctgcctcttcctccccttcccacggccccgcccattttacagattaggaacctgagctggaaaaggccaggctgtccggccagtctgcagaggacctggtgcagccggggctgcggtgcggagggccgggtggggttagggtccgcccaggcgcgggggaaccgacagcgcagggcgggagcgggcggcgaggatcccacgagacccgggactacttccacaaggggaacgatcgaggacggaaggtggaggggggcttactccagcccatggcgcctctccagttcgctgaccccgcaagccggacccggacctcgaatgacgcttttcacccttcacccctgctcctcagcgcgtccccgtcggaattcaggagccatggcaacggggactctacggcggccgcgcgggaccaaaacaagccgcgtttcctgagctccgcggagcaagcagaggagaccgcagtgaaggggctcagcagacaggggttccccaacccaaacccagtcttcgtcctcgtcgcacttccgacttgccacagactgcttccctctccctgaatcaatggtttagagtgaacaaagtatgaggacgcttctcttttctgtgccttccaggcttgccttccagaccgcctttgactttttcctttttgtgtttgatttacagcttccagagccaacagatctggatttggcccccaactctaccagcggcgtgaccttacacttccttctcctcagtttgcacatctgtaagatgagaaataacctaagaggatcactgtgaagctttaattagataatttgagtgaatgaaagacactatgaaaacaacaggctcactataaagattcgttgtcgttgtcatattccagctttttaaagtcactctccaacactcgtttccggctaacaagctttccagaaacgccacccattaccccctccatcaatttccctattctccactctcttaattgtaaaatgtaggaagtatatctcctacagccccacactcccctcacgtttccccagacccttctccaaaagtgtgcaacgcgccttctcccattctaaactaggaagcacatcagcaagctcattcaccctcagatcttagtgttagcactttaatgcgttagcttcccaagaatctttaaaaggtaccattattatgaaagtaattattattctttactccatttgcagaaaaaggaggggggcaatatgtaaaaggtaaaaccttctcccatcccagtcgttttaaacagtatggagtgcgtgcttcttatcttgatgtgtgtattatgtttgcattttaaaagaagattcctagagcaatgctgagtgcaaagaaattaatttttctagcgaatagctgttaagcatttacagctggcaattattagagtttgccaggtagagacaaggtcatgaacttggacagagaggcaggaaagtctaacagagtgaggtgatggggggaagcagaaacatcagtttggcaataaagagagctagatagaagggatcttcgaacagtaagaatgagagattagatcgggggtaatgggggccttaaatgccaggccaaaggaactgaactggaagagtgggatttcaggcactatttccctgaatatttggatttccaaggaggcctcccaaaaggcactcaaactataaacttacctgacatccactattatttttctgaaagcaggttagtgtgaggtgaacagtattagctctggcattggaaacatagattaaatacacagatttattactgtgtggcatcagacagatgacttcacctttgaaagctgaaacttctctatttccacatgatgatgacaatatgggtaaacatctgtggtcgtgccactgacacgctgacactgacacgtgacactgagcactgatgtctgattactcacaaaggagatgaaatgctattagcagcaggcaagtttagcaaattcgcctgtgcttgaattgtgcattttaacaacaaggggttcatcaaggctaaaaaggatctagcttctagaaggaagctactactgggcagaaagattagtttctaagctgacaaaagcatgaggtcaggcctactataaaggatctcagcttgcagtgaactaggattgtgccattgctctctagcctaggtgacacaaagaaacgatgtctcttaataaaaattaaaaaaaaataataaaggatctcagcctctggatcaggagacaaagggagccactccagaaccgcagaaagttctcaagagcaattgcaacccaggtatttgacatgttggctctaagcttctatcctcactctcagacctactcactgttgacttaaaaaaagaaactgaggtaaaattaatat

SEQ ID NO: 587594 - DNA, 4001 bp, Homo sapiens
tggagggtcttagagggaagtctctcaaggaaaagtacatttgacagaaaaaaattatacagtttgaaataaaatgaggctaccataaaactaaggcacaagaacaaaggaaaggttattagaaactccaagggaacaaaaatggcatataagaaagaaaatataatcatagattaattgactccatgtgaatatttatttattagtaatatatatttttagaagtttagagttacccaagacacaaaacaaatatttaattatggttataactgaataggatataaaagctgtaagtgttataaaagtaaaaacttcagagtttgtgaggggggagaggaaaggacagctgaaggtggattacaaaggctgacactgtcatcttacgaagtggggagtcaaaagagactgcagttgatgaaggaagaaataaaggtgtagtaacattacatgtaaaagatacctgtagacctaatcccctgattccagatgtggatcaatacacaatagatacattaatataactgtatctagaagatgaagaaaaatgatgccaaaaatagacaaatcaataaaatagatgagttaaaagtggttatatatggagatcgggattgaggatgaggggaagtgggatagaagatagcttcttgctataagctttttgtaatatttaattctcggtaaccaatggttagtactactttaatggaaataaattcaaatagagggagagaataggttcatgactcagtcaagtcccaaattcttttgcaaagaaactcctctttcctattaaaaaattccaagtccttgttgtcttgtaactacaagtataccttctgcaattactaatgaagggggactttgtaaaagttaccctatttcttataaagatacaactacagattacaaactcaatttcttaaacgtaaaaggaaatgaggtagggtgaaagtaagaaaatacagatttattttttggaactgtaaattcaaaattaatgagctataacgccttagctgcttctaggttcttcctgtgctgatgacaattcagcagtgaacaaaaagaaaattacaaagttaatatcccttgccttctctcaacctcaagatttttggcagctagagtttcacattgttaggcagaaaggtttaacacaagcatatgggattcattcatgtcaactattcctctttaaaaaagaatattttttatttaaaatattaaacttcctttaaagactatttcaggagaaataaatgtcccctccttcctattccctgccaacactccatttcaaagtttcagcctgccctaggaaattgaaaaggaactcccttgctgcatcctaaatgtctcttcattctaaatgcaaaagcttcaggacagtccccagggtgaacagcatctcctggatcctcaaaactacttccagatgtaagcccccaagatagacgaccagatccaggtttccaacccctttccagatgacagcctctaaaaagatgagtgtggcagagacctagtcccctgactccagatgtgggccaaagagcacatgaataaattgaaacatctctccctaccacatggaattccctaagggagaaagccttctgatgcctctccagcaacactccacattaagtctccagatacctaagtctccatagatcgaagtgttattgttctgtctcttaccccttttttctctcttcctgttttccatcttcaataccaaaccacaacagcaaaacactgttcctcacctgggtcaagttgcataactctggacacactttggggattaggttattctgaaggactagagtcttcaggccaggcagttttcctaatgctgagggcatctttgtcatcttcttcccattcaaagtaatgatcttcgtatttttaccaccactcaatgcttttattaacaatctctcagtcatgatcttggaaaagaagtagaaaacaaggtaaccattagagttctttattatacagctttagaacctctaattacagaattggtgtgtcatagaaacaagaacattctgagatccaccatgttgaaggggggaagcattagattattttcctatgtgaaagatacgaaaggaaagtagatggtccaggtttggggcaggaaatgtataatgtaagcctaaaatagcttatgcctgcgatattaaagctatcagagattaatgaggacacagaagtgaacttctaggagctcccactagtctaagatggaaaatattaaggatcagaaagaaataatctagaatagactgaaacatatcaaaacacattaaaatctgagttcataatggcattttttaaaaagaaacattactcaccctgggaattactagcgcaccaactcagtctgaaaattgataaaggaaaaaatataagcatttattctgcttttccagtacaaactgcacttaaatataacttaatagttaataaagttcttattcacaagaattgaaactaataaatgagaaagacaaaataactagaataatcacaatttttgcaaattctaataaaataatggagctatgcaaaaatcataattggagactgaaagtattagatgaaaggttgatgaggaactttataatcaagtgatcaggttaataacccactaatcattttagcatcaataaaattgagacaatcacattataagccttatgaagtaatgaattaaaaagtacacagcagcaccacctatgaaatgttcctgtccaaaaattaaatctgaatctaatcatggcttcaagatctaactaccatttacaaaaaaacagaactagagaataagttaagttcattatagggaaacagtcaaatctataacatggaagattctacaggactggtccctggtccaatgtcacaaggtttcaccaacaaatgaaagacattaataaaaaggagggaaaactgttacgatgtaagtgaaacttagggcaaataacagctaaatgcaatgtctggactgtatttgaatcctcagttgaatacaaacatctcagggaaatttgttcatcggctattagatgagagaaattaattctgttacatgtgaaaatggtatggtggtagtatttattttaaatgtgcttaacattcagaaatgcatactgaaattttcaagtgaaataaaatgatatcttgagtttttttaaaaataatctaggggggaaagtgggtggaagaaactgatcaaacaagattgacaaaatgttgataattattaatgctgagtaatagacacataggggtttgtatttgtccattctcgcactgctataaatacctgagactaggtaatttataaagaaaagagggttaattggctcacagttctgcaggctatacaggaagcatggtgctggcatctgctcagcttctggggagccctaaggaagcctacaataatggtggaaggcaaagggagagccagcacttcacatggccagagctggaggaagataggaaggaggtgctacacacataaacaactagatctcaggataactcactcactcactagcaggaaaacagcactgagaggatgctaatgcattcatgagaactccacccccaggatctaatcacctcccaccaggcccagtctccaacactggggattataattgaacatgagattttggagggaacacaaatccaaaccatatcagcattcattatattagtcttgttatttttgcatatgtttaaaaatttccaaataaaagatttaaacggtgacaaaaaggagagggaggggagttgtggccagtaacatttgattattatcacaagcccactagcacccagataggatgagtcttagaggcattaggattacacatgtatgtgacacacttagatgtgggtttccaaaaacttgaacattataaaatacattctgcactgaaagtgatctgaacagaaatcaatccttcctt

SEQ ID NO: 587595 - DNA, 4001 bp, Homo sapiens
gcatatgtaaatccagatctcatgctggagattataactttattttcttctttgtgtgcaatagctatttaatccacagtctattgcattttcaaaaacaaaccatgttattgcaattcctattgaaaaagtccctgtcctcccttgttgaaagttaatggatctcccctaaacagaactcatctcttcactccaattactatttataactgaagcttctcctgaagatagtagttccaggaacacaaactacagcatacacagtttggagttgctagatgggagatacacccaggaacacacaatgtcacgggcatctgctgtaggttgagtagcagctatcttacagctgtaggaaacctaactctgacagcagggaagcatttgcaaatttcaaactagcaacctttaaatgtgactatctggggcatttcccacttatcctgctgtgtcatttacttgagttcttatttagtgccagaccttatgctgttaacacatgctcttaatgacagtcatttactttctgacacatttcagtttctcgacattaataatgtgcagataatgtgagatagaaaaagcatagtgaaattagacggaaaatgggtttgaatccgaacttaattcttcatgaagtgtataaagatgaacaaattgtcaatagattctgagtctcattcatcacttgtaaatgagaaaaattactaccttgtagaattgctgtgaggattactgataatgtatataacatgcacacaacagatagcattcagtaaatggcagctagtattaaatagaaatgtaaaatgtcccttgaacagcatcttcttgggatcatctggcaaagtttaaatcagaatccagaacaagatgcttaattatcagtagcagagttcgcgtagaggacacgctacaaaggaacagcatgtgcaaaggcacagagaagtctgctatggaattgcctgtagctcagtacaggtaaataaagtgtaagtggagaaatgttacgggtcgagactaaagagcctgaaatgcaggtggagacctgctttacagtattacagaaccaagtgcctcatatgctttgcacaagtcagggcttcaagagagagggaaacgatgaactaaatatagtaagtttagtactttcaaaaagtatatgaatatatgtattgcaatgttctgtaacggacaaatgatttcgaatgcagacaaggagaactgaggcaaaactaacaggcagcagcgactgcccgctcatagctgccagagatactatcctgcaggtttttttcagaggtaagaacaggaaagacgagagaacacgagaaaaccagcaattaaacggcaagcaaaggaataaccaccagtaagtaaggaaaaccagcagaaggaaagagtggtcagaagctggtggaggacaaggtcctggggcagtttctaggctaagcagagtcgtgtgaaacgctgggcaggagacacgggcgggaaggcatccacggctcattcaacctggcacttcggcaggtaagttttggaggagcggggaggccgaaagccagactgcgttcacttatggtcttggtaaagcagtgccgcgcctccactctggtgtcgccgccagccactcgtggccccggctctggggagtgcgcgggtcgctcctggctgcggagcgccctttacctctgcaagcctttgtccatgaagcatacatccccgcagctgctgtcgccgtcttcgttttccacttccgcctctgccgccaccaccgccgccgccgcctccatagcactggcgacggggagcggggtcttaaccggcacccagcgaggggtccgtgagcttgggacaagcctcccggaagcgcggaagggcggcccgagggggcggggcggggcgaggacccaccctccaaccgacagccgggaactttcccgccttgacggtgacgcaaaactggaatcctcgtcccaactgtgggcttctttcgtttttacagcatctgcggtgcgactcttgaacttgctgtaaagtaaaactgcttcccgggcgtgtaggagctggagaatgaatggatttgtcctgtgtgcttctgtatatttgcctagtagccgactgacttctgaaggcggttttcacagcggtttggctttacgtgcctttacatagccttacatacgtataaattgttcctctggccattgcacctcctgttgattcattgaacaatttgtgggatgccttactgtatgtcagtcacttccctgtatgaggaagaaaaagatgaagcctattcttgttcctggaaacattcgcagccccatagaggaaacagaattgccatacagtatgacgaatgctaagaataacacaagggcatcgaaaccaactctagagtgatatgggtagtgggtacgttttctaaaagaagtgattgatgactgaatagagtcttgctgggttagggggagttctggatgaatggcattacaggtgggaaagcaatacctgtgtgaggtcaaataaccctcctggctagattgcttcctaaggcatagtaatattttaaaacggagcaaatggtgcagtagtccatttgaagtggactatttccttttgaaataactcatatagacaaaaataaaaaagatgttttaaaaaatgagcaaaacccacatgacatgtaggacaccataaagtgaccaaatattcaaaattttggagtctcagaaggcaaagagaaaacaatagagttggaaaaatggttcaacaaaatactatatgaaaacttcccaagtctagcaagagatttagacacccaggcacaggaggccaaaggttcccaaacagatacaatgcaaaaaggttttcttttaaaaaaaatttcatctcactttttattttagattcgggggtacatgtgcaggtttgttacataagtatattgcacgatgctgaggttgtggcttctaatgatcctgtaacccaaatagtaaatatagcgcttgataggtagttattcaactcttgccttcccccttttggagtccccagtgtctattgttcccatctttgtgttcatgtgtatccagtgtttagctgccacttggaagtgagaacatatggtatttggttttctgtttctgtgttaattcacttaggataatgaccttcagctgcatccatattgctgcaaaggacatgattttgttcttttttatggctgcatgttggtgtatatgtgccacattttctttatccagtctatcattgatgggcatcagggctcattccatgcctttgctactgtgctgcaataaacatatgaatgcgggtgtctttttggtaaaacaatttatttttctttggctagatacctggtcatgggattcctggattgaacggtaattctatttttagttctttgtgaaatctccaaactgctttccacagtggctgcaatttgcattcccactgatggtgtgtaagcattactttttctctgcaacctcactaacatctcatattttctgactttttaataaaacccactctgactgctgtgagatgatatcttattatagttttgatttacatctctctgattattagtgatgttgagcatttaaaaatatgtttcttggctgcttgcatgtcttctttcgcaaaaaagaaaagaaaagaaaaagtctcctttatggcccattgtagtcaaactgataaaagtcaaagacaaagaattctaaaaacagcaagagaaaaacatctagtcatttataagggaaccctcaacaaactaacagtggatttctcaccaaaaactttacaagccggcagagaatggtatgataaattcaaagtgctgaaagaaaaaacagccagccaagtactcaacaaagttatccttcataaaccaaggaaaaataaagtctttccaagataagcaaaagcaaaagaattcatcaccagtcgactggacctataaaaatgctcat

SEQ ID NO: 587596 - DNA, 4001 bp, Homo sapiens
atgatctgtcggccggaggcggtggctcacgcctgtaatcccagtactctgggaggccgaggtgggtggatcacctgaggtcaggagttggagaccagactgcccagcatggcgaaacctcgtctctaccaaaaaatgcaaaaattagctgggcgtgctggcaggcgcctgtaatcccagttacttgggaggctgaggcacaagaattgtttaaacccgggaggtggaggttccagtgagtcgagatcgcgccactgcacactacagcctgggcgacagagcaagactctgtctcaaaaaaaaaaaaaaaaaaagaaaagaaaagaaaaaagatctgtcaaccataaaatgattttttttttttttttgagacggagtcttgctctgtcgctcaggctggagtgcaatggtgcgatctcggctcactgcaaccttctcctcccgggttcaagcgattctcccgcctcagcctcccgagtagctgggattacaggcaccgccatagtgcccagctaattgtaggaacggggtttcaccatgttggctaggctggtcttgaactcccgacctcaggcgatctgcccgcctcggccccccaaagtgctgggattacaggcgtgagccaccgcgccaggcccgtaaaatgaaattttaaccatagattctaaattgcgtattcacagagtaactgagacgattgcaacttatttaaaactatgtgtaaatcatcttgaaacaagttaatgagaaagatcacatgattaaaacaataaaaaatgttgcttgaggaataatgcacagacggaatttagaaaaaaggaaagccagaacaactgcagacggttcttttcgcttttgtataggactgagctcctcttccggacaaaaaccaggaataagggaggtcttcttagtaaaagcaaaagtaaattgtcttaaaaaaaaaaaaaaggttgcaagtgatttggtctttccagaaaagtcaataccatgtctaacagtggtctctactacaataacctgaaggtgctaatgaccctcacagtaaaataagctagcaaatggccacaccgtagagcgcctacatttactgccaattaagtccaactgccgctgtcttaatattttcgctttttaatgaatcctctctctaggtattccgatccatccaccggtaacacgctgatacttcgaaatactgcaggcaggagtggacgggggagaagccccccccctccccgggcttctttcgtgttcgggcctctgctgccgcgatccacggaagcaagaatgagttccatcgcttggggctcaccagctagagggctggcggaggctgcgaggggcagaagtagcagcaggctactgggtgggcaagcggtgtgtaccgcagctgtggaggacatcgacgcggaacgcccggattgagctcagaacacaccggccccgcccgggactcattctacaagcttcttcggaagaggcgcccgcccgggaggaagggtctaaccccgggctccaccgggaggagataaactactcactgtcaatgtcctcgatgaggctggcggtgccaggcatatagttcattttgaactgaaataatgctgcaatgcacagcggcgggaggccagcgcgtccaaaacctcttccctcctaccgcagtcgccgcctcggtgggaccaagcccggaatcccgaccgagaccagcacttctgccccggctttcagccgccgggggctgccggaagctcctccatattacccttacccacttcctgtaacacgtgtgggcccccaggaagaggcggggcagccgtaccgttgggggacaccctttccctgttcctgttaagtaggtaagaggaaactccattggataaatggcgaggaaacgtatactccctcttaaggaacacggtgtcttccttcgtctccgggttcccgagaccccagagtcactgacctccgtccctcagctttcggggttcggcagcagaaggggcgggcccgggcctgggattggctggcgtcgtccgacccccttcgctgctctccattcgcaatcgcccgcgggcgcctgcgcgatgggtcggccgtggggagcggggcgggaagcgcttcagggcagcggatcccatgtcggccctgaggcgctcgggctacggccccagtgacggtccgtcctacggccgctactacgggcctgggggtggagatgtgccggtacacccacctccacccttatatcctcttcgccctgaacctccccagcctcccatttcctggcgggtgcgcgggggcggcccggcggagaccacctggctgggagaaggcggaggaggcgatggctactatccctcgggaggcgcctggccagagcctggtcgagccggaggaagccaccaggtaagctttgcaccctctgtccttgcggggaggtgagggcccttggggctggggttcgtaaaggatcgggtttcatacttgttttccttatgtggaggagggtgtgttgcggggggtgttggagagaccgagactaagatcagaggttggggggacatgcttgtgttccctttgcccctccttttctgcttcgaccccaaaaaatatgtttattaccatttaaaaaagaaagatcctgcgcggacttactaagcttagcagcaggctgcagatctctctcctgggagcggtgctgggtaggggtggcacggatctactgctccagctctagcaatttatcctgcgtggctggcaggccggctctcccggggaagggaagtggctgcagcccccgatgccgctcagggaccctcccgaggggaaggaacctttgcgaggaggagggatctgggcatttagctgtttgcccctaatgccttgcctgagatcgaatcatgaataatcagtgttgtaaagtacctttacgcggattgactgatttaattttcacggcgactgcaaggtaaaatggcattacagcggcccttttttttgttttcgaataaggaaccggggctctgcgaggttaactcacttgcctaatacacttggacctgcaacattttattctccgttttcctgccggacatatacttctgctttgttaatacagtcttctgggtagtgggttgtcgttctgcggtggcagcatacctctctgttcgttcaagaattatcctcatttgttgaaaatgtaatagtgaaattctcgtacattgctggtggggatgtaaaatggtggaaaatagtttggtagttcctcaaaacattaagcattagaattagtctatgacccagcaagcccactcctggctatatacccaagaaaactgataacgtatgttcacataaagcttgtccgcccatgttcatagcatcattattcataatcgccaaaaagtagaaatgtcgttttttttgttttttttttttttgagttggagtctcgctctgttgcccaggctggagtgcagtggtgccatctcggctcactgcaacctccgcctcccggtttaagcgattctcctgcctcagcctctcgagtagctaggattacaggcgccggccatcacacccggctaatttttgtatttttagtacagacggggtttcgccatgttggccaggatggtcttgaactcctgacctcaagtgatccccctttcccctgcccctcggcctcccgaagtgttgggattacaggcgtgagccactgcgctcggccccaaatgtcattttattatttgagttataaagtgagtgaacctcttggagccctggttctttattcgaatacaggaatgttgtaaggacataacgactgatgcatcgataaacaaaatatggtgttaatatattcattcaatggagtattatttggccttagaaaggaatgaactgctgatgcatgctacaatatgaatgaaccttgaaaacatcacactacgtgagctaagtcagtcagaaagactgcatattgtgtgattccattt

SEQ ID NO: 587597 - DNA, 4001 bp, Homo sapiens
gaaaggctgaggggttccttctcccctaggtgctatgtgtgggaggggcctgcgagccctcttaccctgtgctcctactcaggcctcaccccaggagtgccctccacctctggggcggtgggaggcatctgagcagcctgccccttccagggtggggacggacggtgccacctcaggcatcaccccacgactggccccaggggacatgtgctggaggctcagggtacctatgtggcctgatatccgcccctcagctcctccgtcccagaatagcacagccacagccacactggtttaaatcatttatctccatgtagagatttgagtacaaaaataaacggcaacaaaacagaaggagtgtgaaatccggggatccacagggcttctgtcctccaccttccatgcagctgggggctgcatcctctgtggggtggcttcatcctctgtggggtctgtggggcctgctccaagtcatcagcattccatgcccacctggacctggtcccagactttcggggaagccctcagcctggggctcctggcacccccgttgcggctggggaagagaggtgtggaatccccagagaaagggaaggaaaggcatgaggggccttccctggggggaaggtcacaggctgggggctaagatgacggccaggaggctcagggccagccccaggctgagggcactgtgggcgagggcggtgcgggtgggtgcagcgttgtgcagcttctcattgcacaggtcctcctggcagcactgggtggagctggtgccgctgctgacctggccttgcagggtgtagctgggtgtgcacgactccgcacagtccttcttcaccagattccccctcagaggctccactgggcacaggtgagtgtggtcaggccaggcagccacctctgccccccacctccccacaaccttccagccaacacccacaacagccagggatgtcccccagccccagggacacctggacagatgctacccacctgtgttcgtggtcttgcagaagcgagagctggccgggcagaccacagaatgcttgcagttgctggagctggtgcacacgtggcagcgcagggtaagggctggcggggagggagtccggctcagcgggcccaacagaggcctcctggtgactcagcagggcctgctcccccacctgcagagacccctcctggacagaggccctgctgcccttgccctaggcccccaaacccgggctctgggtcctggcagggcatgtgccctgagtgcagcctcaggggacatgtattccagcctgggccggcttggaagaggtgtcctgccctgcccctgtctagggtgtgttgcaagcctttcctccaaggtctcagggagctctgcgactgccaagaggacactggctcttgtccccaccccaggggatgtccctggaggagatggctatgtttctgagggcctgacggagctaaggccccgggggcagccagcttggctgctctgagcctatgacaggaagggcttggtggcctttgggctgtcctgggctgtgctgggggagacctggggaccgggaggggctggtggcagggactagatggccgctctcccagtgagaagcatctcaagacaaccccctgctccactctctcagggtccgtgactccaggagtcagttctaagatcctcagattctgaaacattgtaaatctgacactcgttaagattcgggctccatgttgttttaaatttgaagagtctagcacccacagtgtcggggttctctgtgcctagatgtcgtcagctccaggctcctagtatttggtgaccacacaggccacagccgcccacccgcccgtccccttggcccagcccctcacctggccctgtagccacagccagggctgcaaggagcagcaatgctgtcctcatctctgatgtcgtctgggagcagtgcgggcccctgcattgccaaggccttataggcacgggctgggcgggggtgggcagtccgccagccagcggcattctgcagggctctgtgcaagcgtcagcccaggacgggcacctgccccaccctgcctggcccacgcccaccagcctggctgtcgctgggcgctgcccctgctgccccccgccaggcagaggtctgccctccgcaacggggcccagtggcctcctggccctgctgttcctgctgctgtgcctccatctctcccactttcacttctctgtctctgtgggtcttgttctctcgctgccgtccgttcctgggtcactttgtctctgacctgccacccgctaccccccgccccccaccccccaccatccatcaccatcctgtgtctttgtccctgcattccccccatagttccctcaatagagttgcagcctgtgcccggtgccctgtgggtgcccgtgggtgtccagggcaggggaggtaggaagggcaggtgctggtcctactctcctggctctgggctcagggttgctgccggggatgcagaaggtccttgagctgcaagggctcggggtggctgtgggctgatggggtgtgtgaggcagaggcagaggcagaggccactccgaggcagggagggcagctggggcagcagtgaggtgagcactggacagagtgaggactgtgaggacccggccctcgaagttgcctggggagccctgtgggcagaaggcccgggctgtggaggcagcaactccaccctgcgttgtgcagggagagactgagccctcctggtctccaccagccctgcctcccgccctccagggccccagaagccctccccgtgggattccttcccccactctccaggcccctcctgctacgttgggggcagcgccatcccggccactttgtaactattgctctaggtgtcccggctccagtctccccaaaatcgtgaactctttggggctgggccccagcacccagggcctcaaagcaggttcttggtctgctgcccgttgagtggaggccagtccccgccttcaccctctttatactcacaggagggactttctttccctggagacggggtctctgagcacccaccgcctcgcgcaggagcccacctcttggggcccccatccacctgctcagcccagcacgctctgccgctcgcctgtgctgggcagcacccacctgagtggtgtggaggggcccacagacttgctttgcccctgccctggctaggctgaaggtgagtgggagccggggcacagatggaggtcagccctgggcccagcctcctgccgccgctgccacgtggctgatgaacagacaacaacaggcccagggcagggcagggccggttccgaggagggtggtcctgggctgggctgaggcttttgggagcaccgtgggtactggggccagtcaggcctgggcttgagacagaccctctggcccttcctcccggcatctctcccttgctgagccccacgtctcagatgccggggatcccagcaaatgtctcctgagaatgctcctggccgggctctccctgacacagtgccggggcctggaggatccacctacaggaggggttgcctggtggtgcctttagaaaccagggtgcaggcgggagccccctggggcagccccacatttgcatctggtgcctggccctggctggagcttggtggggacgtgtgtagtctcacttgccaaggcaggtgacccaaaggtccatgcccccacccagagagaggaggtttcctccagctccaaggccctgtgtccatgggtcacagtgagaggcatgggcagcttgggggaaggtgcttccaggggccttgggaggcagagctcagggcttggtggcggggtgatgactcggtgggcatggcaggtggggagggtgactcactgtggccaggggcatgagagctgctggaaaaacaggtttggaattcctgctgggtctggtggagctggagggtccgggatgtcaggtggcctgagagtgggttctgagtgtggggccatggg

SEQ ID NO: 587598 - DNA, 4001 bp, Homo sapiens
aaggcaggaggatcatatgaggccaggggtttgagaccaccctgggcaacacagtgagacctcctgtttctacaaaaaatacaaaaattagccgggcgtggtacgtgcctgtggtcagctacttgggaggctgaggtgggaggatctcttgagccagggagttcaagactgaagtgaactatgatcatgccactgcactgcagcctgggcaacagagtgagaccctgtctcaaaaaaaagagaaatctatatacacatctatatgtgtatctgtcagtgtatattagctaatctgtatctagaattttccttgggatggctcagtgttttgagcccaggcagctcccctcacatggagacctggggccaggtggggcatggctgagggggaaagcactccccattcctgatgttactcagttccgaggaaagcaccccactcagtatctgctactccccattctgtggctgggaaatgggctccgagagacaaggctgcgtgccactggtcccaccagcaggaaagggccagatgggtcgctgtactgctcctcggcctctgcacaggaccctctgcactgctggagaaagaatctggaacacacccagctggggtcgtgattctctgttttgtgagtgcatggtgttggagggggaggctgctgccttctgtcagggacagccgtgggcagaggagtgggagggacatcccgggcctggggagctagtgctgggcactgggggtaaggaggatgcctcagagaacagatctggagaggggcccgcagaggccctaaggggagagcagcaggccaggacagtgagacctgggctgacatcctggggttgggagtgggagccccaggtggccaaaaacagtgccaagtccggctggggcctatccccgcctccagggagtagcccgaggaggaaggatctccaattccttttccccccacccccctaaagtgaggttctggtgtgggggggtccctgagctgtctctgaggaagtcctagcatacagggccacaaacaggtccagctggtgccgccacctgctcactgggtggcacccaacccgctgggccaccaggctgagctaaggcaccggtgggagccgaaggcaattaggaaggccgggtgggccatggagcccggagggagccagccggcaggccgtggggggcgcccctggggcccaggctgcaggctcatggctcatccccaggctcagggaagctggcccctgggagccaggtatctaggggctgcccagccagcaaggggcgggagcctctcctgtgtcccggaacggggaggggcccggcggtccactcagggaggctgggctccttggacctcaccgcaagcaccaccagtgccaaaacaagaagcgggggcgggttccagtgctccggggtgatatgccgggggcggtcaatcctccctttccggccaggagctctgcaaggtcccgtgccccctcccctagtcctcaaggctgtccctcccggcccacgtagaggagccaggagcgtctggagttgggtgatgggctccagtggctgcgcagccctggggcggccgggaggctcctggcggcagtctccgcccgctcccgccccagatctttggaaacattcggggaggcctgcgggggatgggaggagaagctcagctctctggggaccaacccaccggcagccccagcccctctcctgcgcctccccgtgcgcccctcttgctctctcccaccctctcccgccccggcccccgcagggcgccttccgccgcgcgtggctgagccggggccgcgtgcaccgcagccgaggccgccgggtctgagcgcgtgcgcgcaggtggcgggggcgtcccggccgggggcccgcggactcaccgccgggcggacgcaggtaccagcagcctggccgagctccccgaacctcgcgcgctctggaccgcggctggcccggagcctcccaggcagccgcgcggccccggggcgggggcaggggcgggacgcgggaggggcctccggcgggcggagtcggcgagcccgcggtgggggtccccgcgccgcccaggcctaccccggctccttgggatagatggggaagctgaggcccagaagggggctgagaccacctcccagtttccccagtgaggtggcgcctgagccacggccaggcccggcctccttccacccggccctgctgtgcgcgcggcgggtgctgacctggcgaggccggacaggggaccaggtcggggtgaccgtcactgacacctggacagtcctcgttgtgttcggggtgggaagcccacgggtgagcagacgtgtttgggtgtgagcacggaggaggggtgcctcggagagtgtcggggagcagtgttgggggtctcgcctgcggagtggagctcgggaggggaggacgcaggcacccccgcagcctgggattcctgaggtcatcttgtccctgcttcccgctccaggctgggctgttccttggccatccctcaggcgggggtggggagaccggcaagggttgggaggtgggaggttgtgggtgctggcttctgcgagggcactgaggctctgccatcggtgggtgcctctcctcccgccaggccctctccgaggggctgtgggcgctggggctctgccaccggcctgttctccagttgacagtgcgtttcctttctgggtgacagggcgagcaccagggaggggtcttctgaaccccacacgggagtagggggagggtgtgcggaaatgtgagggtgggcaggtggccatgtggtcaggagggggctggggctgacagacacctgtaacacccctgtctcaaatctaggggtgcagtcaatgtggctgtgtgtgtgttttgcatgagtgagtgtgtgtggtgcgtgtgtgtgtgtgtatggaggctgaggctggggctgtgtgtgtcacgagatgtcctggccgtggtatgatggcatcgtgggtggggcttccacagctttgggggcgatggcccagctgtctctggggacaggagcctccagtaggctgtggcccgggggagtccctgcctctgggtcttacgtggggcacaggcagggcatcttcccctctggaatgttggcggtgagggcagggggttctgtctctgcagccggcacctggggccatccctgccatggcaggggctcagtaagaactgtgggacgaaagcacgggtgggtttgcccccttcaagacaggaccctctgattcagaaaacaagctgcattaggaggagggctgtttggaaaaaactctcaaaccatttatcctgtctctcactcaacacagaagacatcaacacaggagactcccaagactgctggggccaaatgtggcaggtggacgtctccccgccaccgagcaagccatcagttctgcagcggacaccagccgagtgtcctccaacaccattccggtacctgcagatagcgtcagatccagacacctacacacacacacacacacacacacacacacacatatgcacacacatgagctgcgagggccagcctctggaacttcttaccgactggcccgacgttgaggttcccactgttagaggaacgcttgctcaccaggcctctggtttaatgaaacatgaccagagtgactccatcttgaagtgagtaggaggcactcacaaggcacctataaggttaatgcttatggtctaaaaatagccatgtctcaagctggacaccaattataattacagaatatttgtggccatatggggcatctcccagcaagcccgcagactgtccagataacccaagagtgcaggccactttactcagagataatttcaatgagcagcctgaggttggaggatgaacgggcactgatggcacccacagcccctatccttagtgggtgcatctgcccattccaggtgtaattgtagctccttacagtttcttgtaagcagaggcactaacagaggacaggcc

SEQ ID NO: 587599 - DNA, 4001 bp, Homo sapiens
tgaaaagggccaccaaggagccagggggggacagcaggacagtatcctgcctgccgccccacgctctcactctcgtcccaggccagaggggctccgaggacacctctgacctctctcaagagcctggcttttagcacattccccaccaccctaagtcccaacttactgctgctgggatcggtgattcggacactggcacacaccgtgtcggacggctggcactgctttggggtgcaatggctggagttggtggtcagggtgcagtcctggcaccacaggccatgagctgggcagggcatggggaggagggtgaccagaggcactggggtccaaaccaggcagccccctgcgccccccacccatccccctgctgcaggcactcctgggagagcccgaccccacgggagggagcaggcccccatgacccctggagggggagcagaggccctgggacaactgtgccccatcctggcagtttgaggggagcccctatggcccctccctggcccccatgcacgtgcgtgcacacacacacacaaacacacacacgggctatacagaccccacaccgacagtgcccccctcacactcccgccccgcctcacatatcccccccagaggtccgtgggttccaagctgtgaaggaccaaactggatttgaaaggaggcccgggaggctctcagaggtgacggatgaccaagggcttccgtgcggggccagccgcccaccagttccaggccctggaggaagagcgctggagagagcccagtgccggggcagaggggccgagggccgggctggggtcgcaggggtcccggagggggcgtgggctctatgcgaagtgcggtgggaaccgtcagagggtggcagccccacacccggctctcccgcggcgcctcgggctctcccaggcacctgacccagcccgcgggccccctactcaccgggcgccgagcacagcaggacggccagcagcgccaggccgaggcccttcatggctgcaggcagcatgctccgggtgggcctgggggcggcgcgggggcttggggcgcgggtcctctggggcgcaagcctggaggggagaagcatcggtcaggagaccccaaagaccctctcctttcccagcctcaggatgcaaccttctccccggaatccaaggccggggtccgcccggagctcgcagagccccacccccagccccttctccagagcgtccgccgtcacagcatccccgccgggagacgtctggcctctggggcgaggtgacagctcgagacgcctccgccccgcgccggcacctgtgtgggggagcggatggggggcgtcctcttctccccggggagctgcaggtgcgtccggacaggaatgagcggcaggggcgggagcgggtgggacctgccactggggggaggggcgcgtgccaggtccccacccccacccctgggctggggggccgggaaccccgggccgagtcccctcccttggccttccgcgcgcgcctcggcgctcaccgcggatggggcgtggagcgcgggcctcggggtcggggggctcactcacatcccgggggtgtccgcactccgggctcgggcggcgtgcgcggcgcggggagctgtgcccttcggtctccctgcggaccggaatccgggcgcagcctcgtctttcggggaacgcagccgcagacgcggaccccgcgcgaggggcggggcggagccggggcgggggccgcgcggggggcgggggcggctgggagacgcgcggggcggggggcgcccggggctcgcggcccccacgcaggtagctggcccgggccctccgcgcccccttgctggcgcgcgcgctccctcgggttcccgctccctccctcgcggcgccccctgctcctccccagcctccgcggccccctacccaggcgtgggcaggatcccttccccctctgcttggctgagatccccttggaatttctcggaagaacgtttactgcgaaaggaagcaaaatgcacaaagacgcagagagggggaggtacccggcgcggcgccacgcgcaggtccgggttcgcagacccctggggtcagactcccgccctggggccccgccctccccctcctccccgcccctccccaacctcatacccgtttccccgtttccccgtttccagtggctccaggccgttctcctcccctgagcatccatgaagacccccaccagaagccgcagccccaggggcttctgtcgccaaatactcccacactcggaggtaaaggtacaaatcctggccagagcatccgagccttggacccgtttctcggcttccttggccttcccgccctgccctccagctccctaaaagctgtgcctttgcacgtgtccctgtgcctgaaatccgcctccccggggcactggggaagccccgatctgccatcgtgcctttggtcctgctccctttcatttgacctgaaaatgtttactgcatgctccctgctgccctagccctgccctgagccctgggaaagggcatgaggagagagacctggtttctgccctcctgactctccccttggacaaatggtgatgcctactgcagcatatctttgcaggatgtgacagagctaacatttattgagcatgtactatggattccacctgttctagacacttcatatttattatctccttatagtctcaccacagccctgctgtgcagatagtatcatttccatctcacagatgaggagactcacacggaaaggcggcgctccctgctcggggtcacacagtgacgcaggtgacaggtgacccagctgaagtgggaacccaagcagcttgggctacagggactgcacacctccgctccattgtggctccagaggggtggaggcaaggacgagatggacaagagaccaccacaggagcgtgctttgcctcagggtcagggagagcttctcccaggacctgatactttagccgagaactgaatgaggagttgagattcataaggtgcagagggcaagagctagatcaaggttcaaacacaattcttttcaaaacatacagagctcgcaagaaagtaaaagaaatctgagtccataaagaaagaagtaaatagaataatggactcccaaagtctgcccactgagcaggaggcagatgtgaaactcacagtggtcctgggcagacctggacccccacggggtctgaggtcccggaagcagagcctgaggcagggattccagagcaagccctttggttggaggtggggatagcagccctggggagtggggaagtggtccagggtggggaaggaggctggcaagcatgtggtactcagcaaccccccgcagtggggaaatggagcctgaccccagagaggtactctgggaagtggtgtaaactgtgagcctcaggtgaactcacccaagggatgagggaacaggtatttcacagcgacacccaagagtcattgattgagggctgccccgagggatgctttctcctgcaccctccacttggcacccacacagagccctccggggagccagggtggtcccaggtcagtagcatccctgcttgcaaaagcaaaaccaacgatgaatactctggagaaagcaagccccaacttagggactgaggttcccacagatttaactgaatcaaatatgagttcaaaatgaaaaatcagcacatgtctaaagaaagcaagcctccaagtgagactcagctgacagtgacgagcaacagatttaaatcaccacaaactttctaaatggaaaatatcaaatataggatataaaattaacctatttgttatgcttaagatatattaaaataaggaacaaagcactatgaaaccaatcaccatgcttatcagaaaaaaatagaacctctagaaatgaaaaacttttcattgaaatgaaaaggtcagcagaaaccttgaaagaattacggtaactgaaagaagccagtcacaagaaaacacattgtgtggttttctttttatga

SEQ ID NO: 587600 - DNA, 4001 bp, Homo sapiens
cattgcacaaatccttctcgcagcagtccacgtcgacctttaagatcccagagttaataaaccccatcagatagtctgagaaaaagtgtcgcttaacgaagtcacaggaggaggcacacatcttgttcaccgagtgatccttcctgcctgggaagagaaagcgtggcctgggacgggggctcctcctgggccctctctgcctcatcccgaggacccagcccaggcccctccgggtcagctcggggccccagtaggcagggccgagtccctccaccctcccacgctggcctcaactagatgaaaagggccaccaaggagccagggggggacagcaggacagtatcctgcctgccgccccacgctctcactctcgtcccaggccagaggggctccgaggacacctctgacctctctcaagagcctggcttttagcacattccccaccaccctaagtcccaacttactgctgctgggatcggtgattcggacactggcacacaccgtgtcggacggctggcactgctttggggtgcaatggctggagttggtggtcagggtgcagtcctggcaccacaggccatgagctgggcagggcatggggaggagggtgaccagaggcactggggtccaaaccaggcagccccctgcgccccccacccatccccctgctgcaggcactcctgggagagcccgaccccacgggagggagcaggcccccatgacccctggagggggagcagaggccctgggacaactgtgccccatcctggcagtttgaggggagcccctatggcccctccctggcccccatgcacgtgcgtgcacacacacacacaaacacacacacgggctatacagaccccacaccgacagtgcccccctcacactcccgccccgcctcacatatcccccccagaggtccgtgggttccaagctgtgaaggaccaaactggatttgaaaggaggcccgggaggctctcagaggtgacggatgaccaagggcttccgtgcggggccagccgcccaccagttccaggccctggaggaagagcgctggagagagcccagtgccggggcagaggggccgagggccgggctggggtcgcaggggtcccggagggggcgtgggctctatgcgaagtgcggtgggaaccgtcagagggtggcagccccacacccggctctcccgcggcgcctcgggctctcccaggcacctgacccagcccgcgggccccctactcaccgggcgccgagcacagcaggacggccagcagcgccaggccgaggcccttcatggctgcaggcagcatgctccgggtgggcctgggggcggcgcgggggcttggggcgcgggtcctctggggcgcaagcctggaggggagaagcatcggtcaggagaccccaaagaccctctcctttcccagcctcaggatgcaaccttctccccggaatccaaggccggggtccgcccggagctcgcagagccccacccccagccccttctccagagcgtccgccgtcacagcatccccgccgggagacgtctggcctctggggcgaggtgacagctcgagacgcctccgccccgcgccggcacctgtgtgggggagcggatggggggcgtcctcttctccccggggagctgcaggtgcgtccggacaggaatgagcggcaggggcgggagcgggtgggacctgccactggggggaggggcgcgtgccaggtccccacccccacccctgggctggggggccgggaaccccgggccgagtcccctcccttggccttccgcgcgcgcctcggcgctcaccgcggatggggcgtggagcgcgggcctcggggtcggggggctcactcacatcccgggggtgtccgcactccgggctcgggcggcgtgcgcggcgcggggagctgtgcccttcggtctccctgcggaccggaatccgggcgcagcctcgtctttcggggaacgcagccgcagacgcggaccccgcgcgaggggcggggcggagccggggcgggggccgcgcggggggcgggggcggctgggagacgcgcggggcggggggcgcccggggctcgcggcccccacgcaggtagctggcccgggccctccgcgcccccttgctggcgcgcgcgctccctcgggttcccgctccctccctcgcggcgccccctgctcctccccagcctccgcggccccctacccaggcgtgggcaggatcccttccccctctgcttggctgagatccccttggaatttctcggaagaacgtttactgcgaaaggaagcaaaatgcacaaagacgcagagagggggaggtacccggcgcggcgccacgcgcaggtccgggttcgcagacccctggggtcagactcccgccctggggccccgccctccccctcctccccgcccctccccaacctcatacccgtttccccgtttccccgtttccagtggctccaggccgttctcctcccctgagcatccatgaagacccccaccagaagccgcagccccaggggcttctgtcgccaaatactcccacactcggaggtaaaggtacaaatcctggccagagcatccgagccttggacccgtttctcggcttccttggccttcccgccctgccctccagctccctaaaagctgtgcctttgcacgtgtccctgtgcctgaaatccgcctccccggggcactggggaagccccgatctgccatcgtgcctttggtcctgctccctttcatttgacctgaaaatgtttactgcatgctccctgctgccctagccctgccctgagccctgggaaagggcatgaggagagagacctggtttctgccctcctgactctccccttggacaaatggtgatgcctactgcagcatatctttgcaggatgtgacagagctaacatttattgagcatgtactatggattccacctgttctagacacttcatatttattatctccttatagtctcaccacagccctgctgtgcagatagtatcatttccatctcacagatgaggagactcacacggaaaggcggcgctccctgctcggggtcacacagtgacgcaggtgacaggtgacccagctgaagtgggaacccaagcagcttgggctacagggactgcacacctccgctccattgtggctccagaggggtggaggcaaggacgagatggacaagagaccaccacaggagcgtgctttgcctcagggtcagggagagcttctcccaggacctgatactttagccgagaactgaatgaggagttgagattcataaggtgcagagggcaagagctagatcaaggttcaaacacaattcttttcaaaacatacagagctcgcaagaaagtaaaagaaatctgagtccataaagaaagaagtaaatagaataatggactcccaaagtctgcccactgagcaggaggcagatgtgaaactcacagtggtcctgggcagacctggacccccacggggtctgaggtcccggaagcagagcctgaggcagggattccagagcaagccctttggttggaggtggggatagcagccctggggagtggggaagtggtccagggtggggaaggaggctggcaagcatgtggtactcagcaaccccccgcagtggggaaatggagcctgaccccagagaggtactctgggaagtggtgtaaactgtgagcctcaggtgaactcacccaagggatgagggaacaggtatttcacagcgacacccaagagtcattgattgagggctgccccgagggatgctttctcctgcaccctccacttggcacccacacagagccctccggggagccagggtggtcccaggtcagtagcatccctgcttgcaaaagcaaaaccaacgatgaatactctggagaaagcaagccccaacttagggactgaggttcccacagatttaactgaatcaaatatgagttcaaaatgaaaaatcagcacatgtctaaagaaagcaagc

SEQ ID NO: 587601 - DNA, 4001 bp, Homo sapiens
gcctggtttcctggagatgtccagctgcctgggactcagagctggcggagagacagggaggcttcacgtcgggggaggagtgagagccacaggccacagccacggagctgggccaaggctgcccccagccccagccacgccaggctggggagagggcagccacaggctcaggggagcaagctcagaagccccgtgggaaggaggagacatcagggcccagcccagaggagggcaggccccaggctgagcaggagccccccggccagggcccaggggctgtgccctgcccctgccgccccattgcacaaatccttctcgcagcagtccacgtcgacctttaagatcccagagttaataaaccccatcagatagtctgagaaaaagtgtcgcttaacgaagtcacaggaggaggcacacatcttgttcaccgagtgatccttcctgcctgggaagagaaagcgtggcctgggacgggggctcctcctgggccctctctgcctcatcccgaggacccagcccaggcccctccgggtcagctcggggccccagtaggcagggccgagtccctccaccctcccacgctggcctcaactagatgaaaagggccaccaaggagccagggggggacagcaggacagtatcctgcctgccgccccacgctctcactctcgtcccaggccagaggggctccgaggacacctctgacctctctcaagagcctggcttttagcacattccccaccaccctaagtcccaacttactgctgctgggatcggtgattcggacactggcacacaccgtgtcggacggctggcactgctttggggtgcaatggctggagttggtggtcagggtgcagtcctggcaccacaggccatgagctgggcagggcatggggaggagggtgaccagaggcactggggtccaaaccaggcagccccctgcgccccccacccatccccctgctgcaggcactcctgggagagcccgaccccacgggagggagcaggcccccatgacccctggagggggagcagaggccctgggacaactgtgccccatcctggcagtttgaggggagcccctatggcccctccctggcccccatgcacgtgcgtgcacacacacacacaaacacacacacgggctatacagaccccacaccgacagtgcccccctcacactcccgccccgcctcacatatcccccccagaggtccgtgggttccaagctgtgaaggaccaaactggatttgaaaggaggcccgggaggctctcagaggtgacggatgaccaagggcttccgtgcggggccagccgcccaccagttccaggccctggaggaagagcgctggagagagcccagtgccggggcagaggggccgagggccgggctggggtcgcaggggtcccggagggggcgtgggctctatgcgaagtgcggtgggaaccgtcagagggtggcagccccacacccggctctcccgcggcgcctcgggctctcccaggcacctgacccagcccgcgggccccctactcaccgggcgccgagcacagcaggacggccagcagcgccaggccgaggcccttcatggctgcaggcagcatgctccgggtgggcctgggggcggcgcgggggcttggggcgcgggtcctctggggcgcaagcctggaggggagaagcatcggtcaggagaccccaaagaccctctcctttcccagcctcaggatgcaaccttctccccggaatccaaggccggggtccgcccggagctcgcagagccccacccccagccccttctccagagcgtccgccgtcacagcatccccgccgggagacgtctggcctctggggcgaggtgacagctcgagacgcctccgccccgcgccggcacctgtgtgggggagcggatggggggcgtcctcttctccccggggagctgcaggtgcgtccggacaggaatgagcggcaggggcgggagcgggtgggacctgccactggggggaggggcgcgtgccaggtccccacccccacccctgggctggggggccgggaaccccgggccgagtcccctcccttggccttccgcgcgcgcctcggcgctcaccgcggatggggcgtggagcgcgggcctcggggtcggggggctcactcacatcccgggggtgtccgcactccgggctcgggcggcgtgcgcggcgcggggagctgtgcccttcggtctccctgcggaccggaatccgggcgcagcctcgtctttcggggaacgcagccgcagacgcggaccccgcgcgaggggcggggcggagccggggcgggggccgcgcggggggcgggggcggctgggagacgcgcggggcggggggcgcccggggctcgcggcccccacgcaggtagctggcccgggccctccgcgcccccttgctggcgcgcgcgctccctcgggttcccgctccctccctcgcggcgccccctgctcctccccagcctccgcggccccctacccaggcgtgggcaggatcccttccccctctgcttggctgagatccccttggaatttctcggaagaacgtttactgcgaaaggaagcaaaatgcacaaagacgcagagagggggaggtacccggcgcggcgccacgcgcaggtccgggttcgcagacccctggggtcagactcccgccctggggccccgccctccccctcctccccgcccctccccaacctcatacccgtttccccgtttccccgtttccagtggctccaggccgttctcctcccctgagcatccatgaagacccccaccagaagccgcagccccaggggcttctgtcgccaaatactcccacactcggaggtaaaggtacaaatcctggccagagcatccgagccttggacccgtttctcggcttccttggccttcccgccctgccctccagctccctaaaagctgtgcctttgcacgtgtccctgtgcctgaaatccgcctccccggggcactggggaagccccgatctgccatcgtgcctttggtcctgctccctttcatttgacctgaaaatgtttactgcatgctccctgctgccctagccctgccctgagccctgggaaagggcatgaggagagagacctggtttctgccctcctgactctccccttggacaaatggtgatgcctactgcagcatatctttgcaggatgtgacagagctaacatttattgagcatgtactatggattccacctgttctagacacttcatatttattatctccttatagtctcaccacagccctgctgtgcagatagtatcatttccatctcacagatgaggagactcacacggaaaggcggcgctccctgctcggggtcacacagtgacgcaggtgacaggtgacccagctgaagtgggaacccaagcagcttgggctacagggactgcacacctccgctccattgtggctccagaggggtggaggcaaggacgagatggacaagagaccaccacaggagcgtgctttgcctcagggtcagggagagcttctcccaggacctgatactttagccgagaactgaatgaggagttgagattcataaggtgcagagggcaagagctagatcaaggttcaaacacaattcttttcaaaacatacagagctcgcaagaaagtaaaagaaatctgagtccataaagaaagaagtaaatagaataatggactcccaaagtctgcccactgagcaggaggcagatgtgaaactcacagtggtcctgggcagacctggacccccacggggtctgaggtcccggaagcagagcctgaggcagggattccagagcaagccctttggttggaggtggggatagcagccctggggagtggggaagtggtccagggtggggaaggaggctggcaagcatgtggtactcagcaaccccccgcagtggggaaatggagcctgaccccagagaggtactctgggaagtggtgtaaactgtgagcctca

SEQ ID NO: 587602 - DNA, 4001 bp, Homo sapiens
aaaggcagggcgcggtggcttacgcttgtaatcccagcactttggggggccgagggcgggtgggtcacctgaggtcaggagttcgagaccagcctgaccaacatggtgaaaccccacctctactaaaaataaaaaattagccagtgtggtggcgcgcatccataataccagctactctggaggctgaggcaggagaatcgcttgaacccggaaggcgaggttgcagtgagccgagatcacaccactgcactccagcctgactccgtctcagaaaataaaaaaaaaaaaaggctactttctattagttattccccattgaggaaaactagacagccctgattcctgaaagccctctgttcacctgcctttgggtccccaacaagagcgaagatactcactcacggccgctataacgcagtatggctctgtccatttgcacctccttgggttctggcactcgaaagtgttttctctctcacaaacatgacaccacactctattgtcaccctcgtctgaaaggaggaataaaaaagaaagcagaatgttccagttctccgtgcctatctgatgaacacagccggcatccgaccagcacaaactcggcgggtccccatccttctccccctgagcagtggctggggccacatgactcgagtgagccgcatggggagaaagcaggaggggtctccggccacgtaagagctgcccgcttccccttcgccttcccccatgattgtaagtgccctgaggcctccccagaagccagcaccacgcttcctggacagcctgtggaactgtgagccaattccacctctcttctttataaattgcccagcccccggacttctttacattctgagtgatttttcttctctcctgggggctcccccgtcctcccacatccaagcacacaacatgagcgcacagcgcacccccactcggccgcagcaccctgaccccaggtcggccacgcggcacccacgggccctggcatctcccggccgacggctgtggaagtgaccctggggcttgggtctgctcccacgtgccctcccgcccacctcccaggtccacccacctcccaggtcctgccccccgactccctcaaaggagttctcccttgggtctgggttgggcctggcctagctctgcaggaggagccggccctcctcccgcagcttgaacggttctcagcccgtgaagcccccggaggccaggccggcgggagcctgcagcctgagggctcccggggaagcgcggccggagcggggcaagggctggggaagggccgggctcaggctgccccgccgccctggtggaagccgcacgaggcgaggctccccagaggcttccaggcgccacgggccgcctgaacgctccgttctcacggcctggtcggggcggtggccacgcggtgccaggcagacgccgcccggccctgtcctctcggcccgtggctgtggagggcgagccaggctcacccgttcgctgggagtcctctggatctcgttgtctcgcagtcaggttggcgtctgtccacacccgcggtagggccacgaccagcagcaaggcgagcagcgccatcgtccccagcggtgcccagggagggtcagcgcgcggcgccccctccccgcccttctggaaccttcgcagcctccgcgcgcctctccccgggtctggccggtagggggagccccgcccgccccggggcgcgcgcctcccacccgccggggcctgtcggggtctttggagcctcatctcagggcctcgcggccgctggcggccctgaacgccggttctgagtcccgccttgtgctgctgttggagcggccggcggccaggcaggaacgggcgcgggagccctgggaaaggcgcgtgtggaaacgcagcccctgagcccaagggccgtctccttgaggaccccacggcccacagaaagtggccggcggccaggtaggggatcttctccgctgaagagcacgggctcacctctgataactcgcccctgaatagcttttagctcattataataccaaaaaaaaaaaaaaaaacaaaaaccacatccctggggagagattccagatgctaatgacacactccagcgcactagtgtgtgaggtcacggtgcctgcgtgccctgaggacttcccaaaacgtgcttactagtaaggcccctgcctgggccgttcgtgagtaatcctgtaaaactctcatcaagagggtctccccagcgtgagtagcgactgactcattcttttgagcagttcctctttcaagctgtactgttttccttaactaaaagctcaaataagaattcctcctggcgcctgtagtcccagctactcgggaggctgaggcaggagaatggcgtgaacccgggaggtggagcttgcagtgagccgagatcgcgccactgcactccagcctgggccacagagcgagactctgtctcaaaaaaataaaaaaaaaaagagaaagaaaagaattcctcctaagtcactagcttttggctctatctcctgagtggcaggttctgtcttgtctctctgagatcctgactctttaaataaaggttacttaaccctatacctcttgctaggcatctcttgtctgaattccttcctccaagaagactaagaactggaggatttccatgcctctcacagtgacagtgctacccaaacatcagggttgtcatctaggccccctgccctgcacagaaagccaatcaccaacagcagtgccagggaagaaggcctcattcaagtgctacagcccagagatgggcgctcagtcacaaatccctctcctcagcccactaaaattagaagtttccagagcagggaagaaatgtcaccctgtgtgggaaaacaggaattagggagagtgaggaggcagctaggcagtcatgactggtgaggggtctggcctcaaggacctactgagtttcagcgccttgatactgtctgggaggcccgatggttggtttcctgagaaaggagctcagataagacaaatgtaactttcccaagttttaagacagggtgggccaatttctatgtttattcaaaagaaaccctaaatactagttttacgagaaattgggcccatgtgagtaggccccaaagggcaatccacaggtggtgttctccaccctgctttctcctctcaaccctctgtatagaggccctctgttaacacaggcaggagcaggaatttcacactcttttcctttctttgctttcttctttgtcttttttttttttttacagttgtgatatagtttggatctgtgtccccacccaaatctcatgttgaattgtaatccccagtgttgggggtggggcctggtgggaggtgattggatcataggggtggtccttcatgaatggtttagcactatccctttggtgctgttcttgtgatggagttctcacgagatctgttttttttaaaagtgtgtaggcaactccctttcttcctcctgctcaggccacgtaagaggtgcccgcttcccctttgccttccatcatgattgtaagtttcctgaggcctccccagaagccagcaccatgcttcctgcacagcctgtggaactgtgagacaattaaacctcttctctttataaattgcccagcctcaggtatttctttatagcaatgggagaaaggactaatacaagttgcatcatattccatggcctggatgtaccatagttaatttaaatagcctccttgaatgaacatttgtgttgttcacagtgtttttatatctcacatgtcaaagtcaaatacattataggatgaatctctaaacgttttattcaggaatcacagaattgtaattctgggcgtacacagaccagaaatgtgtttggtgtgtctgacgaacaaagagaaggttgaaagttttatttaagaaatgttacctattgtttagaaagaaaacttgtgggccctggtagaggtttggggagctggcaggctctgatgggtgagtga

SEQ ID NO: 587603 - DNA, 4001 bp, Homo sapiens
actccagcctgcacaacagagcaaaaccctgtctcaaaaataaatgataaaataagataaaatgtgaaatgttttaaaaagacaaattgagttattgttaagaaaagattgaaagctaaataataatacaaaatgttacatccataaaaaccatataaagagtggcataaaccgggcaaggtggcacacgcctgtaatcccagcactttgggaggccggggtgggcagatcacaagatcaggacattgagaccatcctggtcaacatgatgaaaccctgtctctactaaaatacaaaaaaaaaaaaaattagccgggtgtggtggcgcacacctgtagtcccagctactcaggaggctgaggcatgggaatcgtttgaacttgggaggcagaggttgcagtgagccgaaatcgcgccactgcactccagcctggcaacagagcaaaactctgtcacacacacacacacacacacacacacacacacacacacagtggcataattagcacatggtacaaaagagccaaaggaggagagggaagtgggggccaagtagagtaggagccttgctggaagaggggaatgcaaaaggatcttgcagcatggagagattttagacatacgtttggagggaattcagtgcaacccaccaggagaagggccatggtgtgtgactggccacactcctaagtctcctcctcacatgtggcaattatcccaatttcccgaaagtcactttatattagcatttggcagagcatgtttctcaagagagttaacatacactccagactaaaacacaaacaaacaaacaacaaatgaaattgaaaatgtggttaaacaggtgcctttattgcagaacttctcagaacccaaagtacatctgtaaatctctcccagatgattaggtcatagatcctattttcccaaaagaatctcaaagaactggtattttgggaagcaccactttaaacctcccagctattgctagtgggtggaaaagggcagccaacccatggtaagcagcacggtggaaagtaccgaaccaaaacagctgtcaggcctgacactgtgccttcagatcccaggacacttgctaatgagcagctggggcaggggacagtgacacagccagtgaatagtattagggtatggctgactccaaaaaaaaattaagagtattattgtctctatgtgaccctatgctaaaaaacttcacctcacaacacccttatcaagtagactataaaatcactttcacttcagtgctaaaaaggctggagtactttgcttaaggtcacacagctagtgacagaaccaggctttcatccagtgagggggatgattccaagagcactcaagagtcacagcttagagcagaaatcaactccaggaagcagctgggactgctctaccatctcaagaagaagaactagtaagtgtcaaggctgaggtgaaagctcagaagcagatggttttattaaaaatgggcagaaccaaaaactgggctcagggtagagaaagatgacgcagggaacagaagcacttggaggtcaagcacaacacagtttagagactcacaagctctgtgagtggtcgagaacattctcatggggcagctgccagctattgcttttcctgctggcagcgtccgccacagcagctggaacacactgatgtttcgtgtgttccagccacaacagtgtacggttctcgtgaaaacttaccctcaaaatagttgatgctacaattatttgttttgcggttttacttaccacagtaggtgtatgaaatacttgcatcggatgagttgcagacccaatactgcttctgagcttcagtaaatatggaagaaaacagggtggaaaaaaacagaaatggtaacatgattcaatatctccaaagctttacaaatgcaaagaggatcagtaactaatcatcagactcttccttttcagtaagcagaaaagatttaacttagtcatcagtcacatgatttctgagttcctatccaactgtttcctctttttttgtgtgtgtgtgctcaacatttgagcacttcctgtaaaggaagagagaaaaatgatttagaatgtactcttcaaacacttactgtaaatgagagtgatcaaagacttaaaaataaaacaagacactttggccaggcacggtggctcatgcctgtaatctcagtattttgggaggctgaggcaggtggatcacttgaggtcaggagttcaagaccagcctggctgacatgatgaaacacatctctactaaaaatacaaaaattagccaggtgtggtagtgcatgcctgtaatcccagctattcaggaggctgaggcaggagcttcactttatctgggaggcagaggttgcagtgagccaagatggcaccactgctctccagcctgggcaacagagcaagactccatttcaaaaaaattttttaaatgaaaaataaaataaaataaacaagacaattcccagtcaactgtaacaaaaccagtccctaggtccccctgaaagtctcaacagacaggcactccttttccctctgcattattcttctctcctacagctctgtataacagcagtccccaacatttttggcctcagggatcagtttcatggaagacaatttttccacggactgaggggatggggagggatggtttcagggtgaaactgttccacctcagaacatcaggcattagattcttatagggagcacgcaacctagatccctcgcttgtatacttcataacaaggttcctgctcccatgggaatctaatgctgctgctggtctgacaggagctggagctcaggtggtaatgctcgctcacctgctgttaacctccagctgtgcagcccacttcctaacaagccacaaccagattcctaacaggccatggactggtactggtccacggcccccagaggatggggcctcctgctttataaaacaaattctcagctgggcacggtggctcatgcctgtcatcccagcattttgggataccaaggtgggtggatcacttgaggtcaggagttcaagaccagcctggccaacatggtgaaattccgtctctactaaaaatataaaaattagccaggcatggtggcacacacctgtaatcccagctactcgggaggctgaggcaggagaatcgcttgaacccaggaggcagaggttgcagtgagccaagattgggccactacactccagcctgggcaacagagtgagactcggtctcaaaaacaaacaaacaggccaggcgcagtggctcacctctgtaaatcccagcactttgggaggtcaaggtgggcggatcacctgaggtcaggagtttgaaaccagcttgaccgacatagtgaaaccctgtctctactaaaaatacaaaaattagctaggcatggtggcaagtgcctgtagtcccagctactcaggaggctgaggcaagagaattgcttgaaccgaggaggtggagtttgcagtgagccaagattatgtcactgcactccagcctgggagacagagcgagactccatctcaaaaaacaacaataacaacaacaaatcaaattatcatggcccagagagctgcacctatagatctgaagtaaacagtctcatggaaactatttcttttcagcagcaggtttagttacaggacagaacagggccagataagaccccaaacaggggacactagctgtaattctgtgctgtgggcagggactccaccagtcttaataatgtattcacctacaacaagctagagctcaagagaacattttgagtcctaataatgaaatgtcatccttttgttatgacatgtatttcatttcaaaactctcactccattttagaaagacagctattcctttagatatcttgctacttgaaatcctttacaggatatagcttagggttagcagccaaaaatggcatggagttttggcctaaaaatctgcacacttaagaagaaaataatca

SEQ ID NO: 587604 - DNA, 4001 bp, Homo sapiens
atggagcttccactgtaatggttaatacagactatcaacctgcagacaaatcaatataactctggctgctgctataaaggaaatcttggctgaataaatggcccaagtggcttatcccaaatcacagcatattaaatgatggaagaggccaaaactcaaggttcctggctcctactttctctccccttacatctgctgccctctatccttcactcagcaaaagggccacacatttacatccaaagaggcccagtcaccaaagactctatgatccagtgaaatttattcaggcctcaaagcgcttacctgcttacctccaaatgagaatggagggactaactggatcccaccctttcccaacaaagcttactcttacagagaagggcttagtaaggcctgggttcttgcagtgcctattccccagggcatggctttaggtgttggctgtacagagaaaacatccctgtagcccaccagtttattggctagttctttagggaaagtcagactactgggccctgctttgggacagcaaatccctcatgtatttattaagcagatttactaataaggtcagatggctaaatctgacatggtagtcttagcttcaacatcaccaagctgcaaagaaccaagaagcctcatttatatgaatagaattcactgcaataaataacagtaacatcgtttatgaaatgcttggtacgtactaggggctttgtgtgtactaaacagcccctgaggtatatatgctctctcaaagatgaagaaactcaaacagggaatttcaataatcggtcccctaaatatacagccagaaaagtgcaaggcctagattctgagctggcgaagaagggcgaatttgggataattaacacactcggatatacaaaaacacaaccgctaatccacatgacaggcaggctgttggaaagttacgaatgcaccgcaagcaaaagatgccaccatgggcccagagaatgcaggaaagtgggaactgactcttacgcccttcccccaaggcgaaggaaaggcaacccctgaattcttaaaataactctcgcttcctctcagccggcaaaagcaccggactgctcctcggcaggccgagaggcgccgcagcgggagggtgagttccagcctccgctgcagcccctcgacgtcacgctcctgcccggggccaccagggagggcaactgtccgcgggcctcgagagggcgccggccgagccccatctcccactgccaggagacccagggtccagaggggagatcagattgcacaatccgaggagtcctctccagtatccccgccgcgcgcccgctccgcaagggcagcggcttccccactgtgtgcgagaagcggccggagcagggacagcagccggccctcgggccctcaccgggaaggacacgcggtgagcccgcccccgcgcccgcacctcccaccgctcccctgcgcggctccgcggcggacacctgcggagcctcagtccccgcgccctggctcccccgggcccggtcacccgtcggctgaagacatctaagagccttcgccgccggagcccagaggcggtgcggccaggaagccgccgcgggccgcgccgatgcccccggccccgagtctaccctgcgcccgggactccggctggtggcacagccgcggcccctgcacccactgcccgcgtgcccgcgcccacccctgggctcgcgcagaggactcacccgctcgcggtgaaagtttcggggcggcggagctccacggtgacttgagttcagagtggggggcgcgacggggcggcccagcaggacctgcgtatggggaggctgctggccgggaacgctggacgcgcggcgaggggctgctggcgcggggccgggggtggcgcggccgccccgcttgccgcgggctggaggctgcagcgcgtctggcccggaggcgccacggccggggagcgagcggcagcgcggcccggcgcggcgggagaggaactggctgtctctgggctcggccgagaggtcccagctacttcctggtgctcggatttgcatattgagcccggagggcggggaagtgaccgtttggtccctgcccaaggtttgggtgtttggtgtggccgtcgcgcagggctttgaaggcacagaaacctggcgactcagtctgcagctccggggagtggagcagcccgggccagccttctcctgtagggacggacggaaggatctccagaggagcctgggcttcgcaggcacatcgactacacctctcgcgtctcctttcctttccttccgacccatccccaaggtattattaggaagggggtgctcccaggagcggaggaggtgcgctctgatcccttccaacattaggggttctctagagaaaggatgcgatatgccgaggtgatgctcggggtctcgctgagttcttaataatcattacaaagtaagttccttaagggtgtacaggaggctgttcagggcattgatgggggaggggatgacgtagagtcaaatggcccggcaagttctccgtttctcaaagcctcagtttcctcccaggacaatggatgtgaggatgcctatctcgtgtacctttctgtacagggcccgcactgcccgcatgcaggaatgctggcgttatttcattcctactacagctgcgtcccagcatgtagggcagtgcttgcacgtagcagctggtgcctaaccagtgtttgctgaaagaatgtgtgaccgcgtgctcaagctcatgttcaactcaataaatgccacttacaaatccaagatgtaagattaggctcgggcaccgtggatacccacttcttctaagccagattctgttcactgggatctcagcattgcattaatagcaaacatttacagagggcctgatgggccagacactgcccaaagcacttcctttctctcattaacaatgttctgaagaggctgaccccagctacagagcaataagtcaaagcagctgccttgtgacacaatctgatacagcagttatttgttactaggaaaagagtactaaagtttgcatactaattccttaaaagaagaaaggtggtttatacctgtgatgttcactggtatgtagttgttagtttactgctgaagagaaggggtgggttgcccatggaaatacccatgggaaggtgtgtgattgaaacctatcaagaatcctatggagaaaaatagaaaaatgaaaaaagaacaaaacaaaacaaaatgaaacaaaaaacaatgaatcctacagaataattcactacctgagggcctattgcctagacttttcttaagaatgacctctcaaatatattaaccctacattaaagtttctgctgctactgatgaatccttgagatcctgactaaacgtgtgtggcaaataagaataggattcaaaaacgtttggtattggttaatctatcaggaatgtctgtcagtgtttttggtaaaatgtctctcagggtaaggaacaaagcatcatcaggcttacctgagcttgcaaccagatccccaactccctaactcctcacaaaattgtcctcactaagttcatctcttcattcttatttggaaaaaaacgatacgatgctaatttccacttcttaggctgcatttatacttgctgaatacttcattcaatcattctccatatctgtctttccttcttaatgtcccatgaaagttctatttctcaggaaagttttatttaaagctcctattgataggcaactttttaaagcatctgtagcatgtatggtgtgcaacattattttaaactagacctaggtactttttagcattgtttgcccatgttaggcttgtctcctcaactactggtaaactccttttgggaaggcactgccttttatatttatctattccccactctacctcccagaaattatgttgggtgctttaaaatagttcattagtattgattgattggttaattgattgatgactgatttatctcaccagtttt

SEQ ID NO: 587605 - DNA, 4001 bp, Homo sapiens
gggtgtcagggaaggtttcctggaggaggagacacttgggatgggacaagaagggagaagagatcaggacatttcaatcagagaccagcacctgcaaaagctcaaaacagcctgtagcgctggatggaggagagatggggggaggatgaggggcagtgctagagaaggagtagggatgggcagaggggccttaaataccaggcctaaacaaggattttacccaggggatggttggtgcagaggtcccatgggaggtggtctgcagccccatcccaagcagggccctgggggccggatggctggccatggcaggactgggcccaaaagctgggtctcttctcgctgttcccctcctctctgctcctggggtgtccctacttggggttccttcttccagaagacctccagagccctggttagggttgtctgagtcctcggccactgcagaagctccccagcagggatgagctgtgcccagcttggggggaatgcattttgagcccctcccaggagggcacttgggccagacaagaagaagcatttccccggctgggtctggtgtttggaacgggaatgccctctctggaaagaggtttacagtggggaggtgggggttggattacggctctcctacccctgccgggatactcggccctcggtctccgtcctggaggactaaattaaacttacgccttcccgagaacaacaaatccgtctctcacgacacatttgcccaggccaaccccaggatgccaaaggccagagtcaggcctgcggcttcgagcttcccaaccccctcacggagagccccgccccaaacactgcggtcccaggtcgaggggagggctctcggcgcgagcgggactatcagggtgacctcacctgtgaccttcaccaccgtgaggtaccgccgcgcctgggagtcacccgcggccgctcgccggtaggtgcctgcctgagtctaatcgtaggcgtgtctgtgtgtcccgcagcacccgtgccgcatcgcctgatgctcaccgcaggcccagcccagtcccgcccccggaacagcccgcccagcgcgagctcaccgcaggccccgccccaggcctgccccggccccacctcctgagcaaccccccgagccgagctcaccgcaggccccgccccggacccgcctcctgggctactcaccaagccgcgctcactgcaggccccgcccctgccccgcctcctgggcacccgccgagccgagttcaccgcaggccccgccccggacccgcctcctgggcacccgccgagccgagttcaccgcaggccccgccccggacccgcctcctgggcacccgccgagccgagttcaccgcaggccccgccccggacccgcctcctgggcacccgccgagccgagttcaccgcaggcctcggcccggacccgtccccggaccgccggctcgccgggcaagcgctgggaccccgaggccagtccaggcatctggatctccgacacagaggcagccacgcagtgattccctggcgaccctcagactcacgtgttcagcccggacactccgcaggctatcttcaccgcgtcccgcggcagcccagccttccccgcagccgcctccgcccactcgcccgcgccgcgtcgtttgtcggccggcaccagccttgcggccccagctccgccctcctgcagcccaggcccagcagctccggaactggcgccctttggcgcacccgcctcgctgcccatggcctccgcctgcctcccctgcgctcagctcccgcttctggtccctgtagcaaagctggaaggcaggcctgcaaggcagccccttgctccgtggtccctctcaccatcataatgttcatattaaataattatctttacataactttgaatacttatgttattggttctgtttttggcaaaatgtaataaaatttcatgggtccgaaagttttcattttttccaatgtgagaaagaaaaataaaaccttttcttctaccctaaagctcatttttttctttaaaacatttttgcgggcctgaggtacagaatacaccatgcctgctgggcaagcgggctccggttccaggaaatccttcggtccccagcaaactaggccagttagttgttctgtttgccgagaggtaatgcgcaccctcctgtgccaggtcctagttggggagaaggcaaagaataaaaccagcagacgttccagaatattcccaccccatggagctcacactctggtgggataaggggcgtggaaggaacgcataggtcagaaccagagtatgtcgcggtcttcagcctcagaccacgatgaattaatacggatgaaacttcccttgcccgcccgccagcgctcgcctcctgctgtgtggcgtggttcctaaccggtctgtgacccaggggttggggacctttatgttaaaggaagttcttcaggcagaaatacggatctacacaaaggaataaatgacaccagaaataggaaatagaaggtaatttttttcttatttttgaatcaagttaaaagatagttgattacctaaagcaaaaataataacaatgtattaaggaatttatagcaaatgtagaagtaaattgtatgataatagtagtgcaggctgggcaccgcggctcacgcctgtaatcccagcactttgggaggctgaggcgagtggatcgcttgagcccaggagttcaagaccaggcttggctgggcaacgtagagagacctcatctctaaaaaaaaaaaaataccaaaaaattagctgggtgtggtggtgcacacctgaggttgcacccaggaggctgaggtgggagaatcacttgaacccaggaggtggaggttgcagtgagctgtgatcacgctactgcactgaagcctgggtgatagagcaagacgctgtgtcaaataaatttaaaaaaaaatagtaatacaaatagaccaggagagggacaatggaagttcactgttgtagatttattctactctatgtgaagtggcctactatttcttggaggtagactagtaagtcaaaggtgtatgctaagacgctaaagtgtcactaaaaaaagacaaagaaaaaagcaaaagtcaaagcactgtagttaataaatcaacaaaagtgatgatacagaattatttatttataaaagcacatgttacagagactgcagaagaggagaaaggaaaaaacaatgagacaaatagaaaacaaatagcaagatgacatatatttaaacccagccacagcaataatgacactatgtcatctaaacacttcaatcaggctgagcacggtggctcacacctgtaatcctaacctgtaatcccaacactttgaaaggctgaggaaggtggatcacttgaagtcaggagttccagaccagcctggccaacatggtgaaactccctctctactaaaaaatacaaaaattagctgggcatggcggtgggtgcctgtaatcccagctacttgggaggctgaggcaggagaattgcttgaacctgggaggcagaggttgcagtaagctgagatggtgccactgcactccagcctgagcgacagagtgagtgagactctgcctcaaaaacaaacaaaaacatctcaattaaaaacagaggttgtcagattggataaaaatagaaacagccaagtatatgctgtcagtgggaaactcaccagacatgtaaaaacacaaataagataaaagtaaaaagatggagagagatatactatgctaacaccaattaaaagaacacagacatgactacgtcaatatcaaagtaggtttaaagcaaagactataatcagaaataaagaggagcattactggccaggtgtagtggctctcatctgcaatcccagcactttgggaggctgaggtgggaggattgcttgaggccaggagtttgagaccagccagggcaaaacagcaaaacactatctgtactagaaagaaagaaaaaaaatttaaaaagagggacattaccaaatg

SEQ ID NO: 587606 - DNA, 4001 bp, Homo sapiens
ggtgtcagggaaggtttcctggaggaggagacacttgggatgggacaagaagggagaagagatcaggacatttcaatcagagaccagcacctgcaaaagctcaaaacagcctgtagcgctggatggaggagagatggggggaggatgaggggcagtgctagagaaggagtagggatgggcagaggggccttaaataccaggcctaaacaaggattttacccaggggatggttggtgcagaggtcccatgggaggtggtctgcagccccatcccaagcagggccctgggggccggatggctggccatggcaggactgggcccaaaagctgggtctcttctcgctgttcccctcctctctgctcctggggtgtccctacttggggttccttcttccagaagacctccagagccctggttagggttgtctgagtcctcggccactgcagaagctccccagcagggatgagctgtgcccagcttggggggaatgcattttgagcccctcccaggagggcacttgggccagacaagaagaagcatttccccggctgggtctggtgtttggaacgggaatgccctctctggaaagaggtttacagtggggaggtgggggttggattacggctctcctacccctgccgggatactcggccctcggtctccgtcctggaggactaaattaaacttacgccttcccgagaacaacaaatccgtctctcacgacacatttgcccaggccaaccccaggatgccaaaggccagagtcaggcctgcggcttcgagcttcccaaccccctcacggagagccccgccccaaacactgcggtcccaggtcgaggggagggctctcggcgcgagcgggactatcagggtgacctcacctgtgaccttcaccaccgtgaggtaccgccgcgcctgggagtcacccgcggccgctcgccggtaggtgcctgcctgagtctaatcgtaggcgtgtctgtgtgtcccgcagcacccgtgccgcatcgcctgatgctcaccgcaggcccagcccagtcccgcccccggaacagcccgcccagcgcgagctcaccgcaggccccgccccaggcctgccccggccccacctcctgagcaaccccccgagccgagctcaccgcaggccccgccccggacccgcctcctgggctactcaccaagccgcgctcactgcaggccccgcccctgccccgcctcctgggcacccgccgagccgagttcaccgcaggccccgccccggacccgcctcctgggcacccgccgagccgagttcaccgcaggccccgccccggacccgcctcctgggcacccgccgagccgagttcaccgcaggccccgccccggacccgcctcctgggcacccgccgagccgagttcaccgcaggcctcggcccggacccgtccccggaccgccggctcgccgggcaagcgctgggaccccgaggccagtccaggcatctggatctccgacacagaggcagccacgcagtgattccctggcgaccctcagactcacgtgttcagcccggacactccgcaggctatcttcaccgcgtcccgcggcagcccagccttccccgcagccgcctccgcccactcgcccgcgccgcgtcgtttgtcggccggcaccagccttgcggccccagctccgccctcctgcagcccaggcccagcagctccggaactggcgccctttggcgcacccgcctcgctgcccatggcctccgcctgcctcccctgcgctcagctcccgcttctggtccctgtagcaaagctggaaggcaggcctgcaaggcagccccttgctccgtggtccctctcaccatcataatgttcatattaaataattatctttacataactttgaatacttatgttattggttctgtttttggcaaaatgtaataaaatttcatgggtccgaaagttttcattttttccaatgtgagaaagaaaaataaaaccttttcttctaccctaaagctcatttttttctttaaaacatttttgcgggcctgaggtacagaatacaccatgcctgctgggcaagcgggctccggttccaggaaatccttcggtccccagcaaactaggccagttagttgttctgtttgccgagaggtaatgcgcaccctcctgtgccaggtcctagttggggagaaggcaaagaataaaaccagcagacgttccagaatattcccaccccatggagctcacactctggtgggataaggggcgtggaaggaacgcataggtcagaaccagagtatgtcgcggtcttcagcctcagaccacgatgaattaatacggatgaaacttcccttgcccgcccgccagcgctcgcctcctgctgtgtggcgtggttcctaaccggtctgtgacccaggggttggggacctttatgttaaaggaagttcttcaggcagaaatacggatctacacaaaggaataaatgacaccagaaataggaaatagaaggtaatttttttcttatttttgaatcaagttaaaagatagttgattacctaaagcaaaaataataacaatgtattaaggaatttatagcaaatgtagaagtaaattgtatgataatagtagtgcaggctgggcaccgcggctcacgcctgtaatcccagcactttgggaggctgaggcgagtggatcgcttgagcccaggagttcaagaccaggcttggctgggcaacgtagagagacctcatctctaaaaaaaaaaaaataccaaaaaattagctgggtgtggtggtgcacacctgaggttgcacccaggaggctgaggtgggagaatcacttgaacccaggaggtggaggttgcagtgagctgtgatcacgctactgcactgaagcctgggtgatagagcaagacgctgtgtcaaataaatttaaaaaaaaatagtaatacaaatagaccaggagagggacaatggaagttcactgttgtagatttattctactctatgtgaagtggcctactatttcttggaggtagactagtaagtcaaaggtgtatgctaagacgctaaagtgtcactaaaaaaagacaaagaaaaaagcaaaagtcaaagcactgtagttaataaatcaacaaaagtgatgatacagaattatttatttataaaagcacatgttacagagactgcagaagaggagaaaggaaaaaacaatgagacaaatagaaaacaaatagcaagatgacatatatttaaacccagccacagcaataatgacactatgtcatctaaacacttcaatcaggctgagcacggtggctcacacctgtaatcctaacctgtaatcccaacactttgaaaggctgaggaaggtggatcacttgaagtcaggagttccagaccagcctggccaacatggtgaaactccctctctactaaaaaatacaaaaattagctgggcatggcggtgggtgcctgtaatcccagctacttgggaggctgaggcaggagaattgcttgaacctgggaggcagaggttgcagtaagctgagatggtgccactgcactccagcctgagcgacagagtgagtgagactctgcctcaaaaacaaacaaaaacatctcaattaaaaacagaggttgtcagattggataaaaatagaaacagccaagtatatgctgtcagtgggaaactcaccagacatgtaaaaacacaaataagataaaagtaaaaagatggagagagatatactatgctaacaccaattaaaagaacacagacatgactacgtcaatatcaaagtaggtttaaagcaaagactataatcagaaataaagaggagcattactggccaggtgtagtggctctcatctgcaatcccagcactttgggaggctgaggtgggaggattgcttgaggccaggagtttgagaccagccagggcaaaacagcaaaacactatctgtactagaaagaaagaaaaaaaatttaaaaagagggacattaccaaatga

SEQ ID NO: 587607 - DNA, 4001 bp, Homo sapiens
tctacccattcctcagtgctccctcccctgcacttaatgaggcccaggagaggcttgcagaatgaatgaataaatgaatgaatgaatgaatgaatgaatgaatgaattccgggggtggttgcaggttgggttatcaagagaaataataattctgtcccttatcagagggtttttgattttcagcaatgagatcctgagggaagcagataaaatgttagctccaaaccggaaaggctgctcgatggtgactgtgaggacacagggacagtgttcagactggcgcctgacacacgggagggaggggagatcagggggagaagaggagagaggaagggagggaggaggagaggaaggaaggaagggaaggagggaggaggaatagagaggaggagggaggtggggtgggggggagggggcaggaataatggagggacaaacaggatggtgggatgggctctgggtgtagctgcatggctgggggcaggtctctcccactggggacccccgtgctggctctgaagcaggctggcccctcggggagattgtgctgtccatgtatggcagagagcagacaccaagcaatgacaggggatgcaggtgcccctgagagaggctcgccagtcctccaaccggaagagcagtgaggcagcttggggcttgttcctcgaggggcaggtgggatttcagcagaaggaagggctccaggagccctggtgcagggaagggcctctgggtcagaggggagtccgtgggcaccgggcacccaggcagaggctcctgtgatgtgccatccctggcctggatggccacctgactgcctgtccagtcctgatggttacaaaggccttctccaggttaagtcgagtccccaggcccctgtgtgtctcggaccttcagcacagagctggtctgccctcatgaccctggggcagtcctcagggtcagcggctcagcctctcataggccaggagggtgcccctggggatggagactggagggatgtaagagacacctgagccagcgccagggactcaccgacgctccaccccctgctcattcagggcctgggaggcaggggctgcccaggtcgttcaacccacagccagggacgcagaggcttggcccctggggggctgggctgcttgggcttggaggtgcaggccaccggcagatcaaggggccagctggttttgttgaggcctcagggtgggggtggagatgccctgccaagagaagacgttcaggctctgctgggggatgccaaggccaggtgtgcacagctgtgcttgaggggtcatccccttggagccctcaggaaggccctgggccaagggatctgaagctggggggacagggccagccgtagcagacgtgggcactgcgggggtcgagggttgggggatggggagggggtaaaatcacccaggaaagcggggagcagaggagaggacccgggagcaggaactggggatgggagagcagagggacttggttttcccaggcaagagggaagagggagtcccgggagggtggccccaggagacaaaccagctgggaggccaggcccaagagggctggaggggggcacattcagagtgtgtgtgtgcacgtgcacgaaggtgcgtgtgtgaggggtgtcgcggtggactggagaggtctgggggctgggcagaggaagaggggggtttgagccaagggctgtgcatcctgagaagtgtgggggccagtgtcgggggctggggctgagctggatggacctgcaggatcgcaggaggctttcggaggaaagctgcacctggtagatggtggggggacaggaatgggttctcccgaggtgggcagtcacagcccagggctggagggacggtggttgggctagagtgatgggggccttgagcaggaggtggccccagcccctggactcacccagctgcaggctcaggacggcggccagcaggagcccagtgccgagctgcatgttctcctggtgaggtcgggctgtcggcgccctggccggctgccttatacctgctggcaccccgccctggccctcgcccgctcagcagactctgcgggtctgagtcaccaggcagccgggctcagtcaaggagccgggctggggtccgggcggtaggggccaacctggccccaaagctcgctggttaggcctctgagcgggccggtgtcatctcatgagccatctctccttgtccataaagtagggatagccctggctgacaggattgaggatctgataaaatggcctggcaccaggcaagcaatggccacaggccactctccctcagtggctgggaaggaaggcctggcaccaggcaggtgacggccacaggccggtctccctcagaggctgggaaggaaggtctggtgggaaggagggtcttgggcaccagccaccagcccaccccttacgcctcaaaatgcacatgaagctcagggctgggtggaagccacaggccttcatctgtactcccaccctagaatgagttccatgacaagacctcctccaaataagccagagctttcccatcctgacccccgcagggctgggagaacacagagggagcatggttgtgagccacctctctgtcatccgtacagggaatcatggccattgtcacactgtgactaacgccccaggatctgtgcagaggagtaggggggacagaaaggcccttggtactaaaagggaccccaaggataaggtaagagcccagaagggacaccctggagagcgggagccatcagctgttcctccaaaggctggccaggggctggggccccaaagggcctgtccgtagccagtcagccatgccaacccggggacccctatgtgtctctcgggctgcccacatggcttctgtctacccctccgtttcgggggctccttatggctgggaggtgggcccaggaggagggagatcctgaaagaggggctggcagatccaggccctccttcctggggcagtcgagaagctggggtcaggaaccaggtaggcagagaggtcagagatggtgggatggggtcctgggggagttcccgcctcccttaccccgcacacccagacttcctcaggggtttgtatgcccctcaggggtgctgggtggggggtggcctctctcccacggaactgggagcaactctcagcaagccccaggagccctgcctgtctccctccctgtgcctggctccgaggacaggtcaggcctagaggccagaaaagtccaggacctggaccgggtagggtagacaggaaagtggctgcatgcagcctggagtgccagcccagccaggctggaaaggtgaggcccgagctcaggccgaggcagtggggctggagagaagcgcagacaatgcgaatctgttgatttatttacggctcggtgagacgacgctggacgctggttagggtaagggttagggcaagcattagcagcaggggcatggccctgggaagcacctggaccccagaacataagacaggagggagagatgccatccattcagcgggcacttatgcccacgaccagctgagccagaccagcattcccatttcaccaccccttactcctcaagatgcaaatgaagctcagggctgggcggaagctggcagggctgtccacagggaggacccccgtgtgtctctcgggctgcccaggtggctctgtccacccttctgtctgggaggctccttaaggctggggagggcccagagggaaggagatcctgaggggctggcagattcaggccctccctgcgagctgaggtttgaagaggagagcagaccacccagagtagtgggagaaagcaccggcagaaaagctggcatatccaccgagggcctctctgcttcttttgacctttttcagagtttcagagttatgaaccaaatcgccttcatgagagatgacgaatcagatgctacatagtgggggaggcggcagctggcctggctcccccacttccccaggacctccgcctg

SEQ ID NO: 587608 - DNA, 4001 bp, Homo sapiens
ggtgtcttcttgcccacagtcctgaccctgggcatggctgaggaggtcgcagggagtgtggagggtgaggcagggtgagctgggtgcgagggtgtagcagtgtgtctcgagagctttgttcttgagtgggtctgcctcgggggctttagaggagaccccagagggtggccaggaggatgggggccagggccagggtggccggggtggcaaggccggtgccgttgcagaggtcgtactggcagcaggaggtggtggacgcgtgcttggagtagccatcatacacagtctcgaagcagcggggcacgcaggacttactgaccttcatcctggtgggggtgtagtctgcagaggggcggggcggtgagccagctccgctaagaggggcaggagacccagctggccccaccccagcatccacagccatcagggcagggcccctcagcctggagctcccagacaggatccgggaacaggagagcctccttcctcaggacccccgcatgctcaggggcagggcagaacctccccttcgtgctccccaggcagggccacgcagggcccccagactcacaggtgcgcgtggtcatgcagtaggcaaccatagccgggcagcgcatggggttgaagcagttgtctccgttgtaggcacacacgtggcagtccaaggcctgggctggggttggcagatgggcgggaagggaacgggggtcacagaacatgagaggcccctcctccagcccatcaggcccccagcccgtcaccttccccggggcagggggctagaaggaggggttgtcgctgggaattctagcctccttccctactgtcagcccatctgccctcaaagtgggtctgcccatccctctgtcctttgtccatcttacccagaggtaagcccatgaggaccaccaggatcagggtgagcaggggcgtcatggctgcaggcaggagggcagcgtgggagtggggaggtcaacagcagctagccctggatccaactcaggggtggcgcacagaggatccaactcagggtggtgcgcagaggacgtggggccggccctgcctcccggagctcctggtctactgggagtgctgcaaccctgcacagcaggtggcaaagacaggtggtcagtactgggcctgaaggacccatgggggcctgggcagggatgatggtgggcagaggggccacctaactcagtgggtgtcagggaaggtttcctggaggaggagacacttgggatgggacaagaagggagaagagatcaggacatttcaatcagagaccagcacctgcaaaagctcaaaacagcctgtagcgctggatggaggagagatggggggaggatgaggggcagtgctagagaaggagtagggatgggcagaggggccttaaataccaggcctaaacaaggattttacccaggggatggttggtgcagaggtcccatgggaggtggtctgcagccccatcccaagcagggccctgggggccggatggctggccatggcaggactgggcccaaaagctgggtctcttctcgctgttcccctcctctctgctcctggggtgtccctacttggggttccttcttccagaagacctccagagccctggttagggttgtctgagtcctcggccactgcagaagctccccagcagggatgagctgtgcccagcttggggggaatgcattttgagcccctcccaggagggcacttgggccagacaagaagaagcatttccccggctgggtctggtgtttggaacgggaatgccctctctggaaagaggtttacagtggggaggtgggggttggattacggctctcctacccctgccgggatactcggccctcggtctccgtcctggaggactaaattaaacttacgccttcccgagaacaacaaatccgtctctcacgacacatttgcccaggccaaccccaggatgccaaaggccagagtcaggcctgcggcttcgagcttcccaaccccctcacggagagccccgccccaaacactgcggtcccaggtcgaggggagggctctcggcgcgagcgggactatcagggtgacctcacctgtgaccttcaccaccgtgaggtaccgccgcgcctgggagtcacccgcggccgctcgccggtaggtgcctgcctgagtctaatcgtaggcgtgtctgtgtgtcccgcagcacccgtgccgcatcgcctgatgctcaccgcaggcccagcccagtcccgcccccggaacagcccgcccagcgcgagctcaccgcaggccccgccccaggcctgccccggccccacctcctgagcaaccccccgagccgagctcaccgcaggccccgccccggacccgcctcctgggctactcaccaagccgcgctcactgcaggccccgcccctgccccgcctcctgggcacccgccgagccgagttcaccgcaggccccgccccggacccgcctcctgggcacccgccgagccgagttcaccgcaggccccgccccggacccgcctcctgggcacccgccgagccgagttcaccgcaggccccgccccggacccgcctcctgggcacccgccgagccgagttcaccgcaggcctcggcccggacccgtccccggaccgccggctcgccgggcaagcgctgggaccccgaggccagtccaggcatctggatctccgacacagaggcagccacgcagtgattccctggcgaccctcagactcacgtgttcagcccggacactccgcaggctatcttcaccgcgtcccgcggcagcccagccttccccgcagccgcctccgcccactcgcccgcgccgcgtcgtttgtcggccggcaccagccttgcggccccagctccgccctcctgcagcccaggcccagcagctccggaactggcgccctttggcgcacccgcctcgctgcccatggcctccgcctgcctcccctgcgctcagctcccgcttctggtccctgtagcaaagctggaaggcaggcctgcaaggcagccccttgctccgtggtccctctcaccatcataatgttcatattaaataattatctttacataactttgaatacttatgttattggttctgtttttggcaaaatgtaataaaatttcatgggtccgaaagttttcattttttccaatgtgagaaagaaaaataaaaccttttcttctaccctaaagctcatttttttctttaaaacatttttgcgggcctgaggtacagaatacaccatgcctgctgggcaagcgggctccggttccaggaaatccttcggtccccagcaaactaggccagttagttgttctgtttgccgagaggtaatgcgcaccctcctgtgccaggtcctagttggggagaaggcaaagaataaaaccagcagacgttccagaatattcccaccccatggagctcacactctggtgggataaggggcgtggaaggaacgcataggtcagaaccagagtatgtcgcggtcttcagcctcagaccacgatgaattaatacggatgaaacttcccttgcccgcccgccagcgctcgcctcctgctgtgtggcgtggttcctaaccggtctgtgacccaggggttggggacctttatgttaaaggaagttcttcaggcagaaatacggatctacacaaaggaataaatgacaccagaaataggaaatagaaggtaatttttttcttatttttgaatcaagttaaaagatagttgattacctaaagcaaaaataataacaatgtattaaggaatttatagcaaatgtagaagtaaattgtatgataatagtagtgcaggctgggcaccgcggctcacgcctgtaatcccagcactttgggaggctgaggcgagtggatcgcttgagcccaggagttcaagaccaggcttggctgggcaacgtagagagacctcatctctaaaaaaaaaaaaataccaaaaaattagctgggtgtggtggtgcacacctgaggttg

SEQ ID NO: 587609 - DNA, 4001 bp, Homo sapiens
ggacttactgaccttcatcctggtgggggtgtagtctgcagaggggcggggcggtgagccagctccgctaagaggggcaggagacccagctggccccaccccagcatccacagccatcagggcagggcccctcagcctggagctcccagacaggatccgggaacaggagagcctccttcctcaggacccccgcatgctcaggggcagggcagaacctccccttcgtgctccccaggcagggccacgcagggcccccagactcacaggtgcgcgtggtcatgcagtaggcaaccatagccgggcagcgcatggggttgaagcagttgtctccgttgtaggcacacacgtggcagtccaaggcctgggctggggttggcagatgggcgggaagggaacgggggtcacagaacatgagaggcccctcctccagcccatcaggcccccagcccgtcaccttccccggggcagggggctagaaggaggggttgtcgctgggaattctagcctccttccctactgtcagcccatctgccctcaaagtgggtctgcccatccctctgtcctttgtccatcttacccagaggtaagcccatgaggaccaccaggatcagggtgagcaggggcgtcatggctgcaggcaggagggcagcgtgggagtggggaggtcaacagcagctagccctggatccaactcaggggtggcgcacagaggatccaactcagggtggtgcgcagaggacgtggggccggccctgcctcccggagctcctggtctactgggagtgctgcaaccctgcacagcaggtggcaaagacaggtggtcagtactgggcctgaaggacccatgggggcctgggcagggatgatggtgggcagaggggccacctaactcagtgggtgtcagggaaggtttcctggaggaggagacacttgggatgggacaagaagggagaagagatcaggacatttcaatcagagaccagcacctgcaaaagctcaaaacagcctgtagcgctggatggaggagagatggggggaggatgaggggcagtgctagagaaggagtagggatgggcagaggggccttaaataccaggcctaaacaaggattttacccaggggatggttggtgcagaggtcccatgggaggtggtctgcagccccatcccaagcagggccctgggggccggatggctggccatggcaggactgggcccaaaagctgggtctcttctcgctgttcccctcctctctgctcctggggtgtccctacttggggttccttcttccagaagacctccagagccctggttagggttgtctgagtcctcggccactgcagaagctccccagcagggatgagctgtgcccagcttggggggaatgcattttgagcccctcccaggagggcacttgggccagacaagaagaagcatttccccggctgggtctggtgtttggaacgggaatgccctctctggaaagaggtttacagtggggaggtgggggttggattacggctctcctacccctgccgggatactcggccctcggtctccgtcctggaggactaaattaaacttacgccttcccgagaacaacaaatccgtctctcacgacacatttgcccaggccaaccccaggatgccaaaggccagagtcaggcctgcggcttcgagcttcccaaccccctcacggagagccccgccccaaacactgcggtcccaggtcgaggggagggctctcggcgcgagcgggactatcagggtgacctcacctgtgaccttcaccaccgtgaggtaccgccgcgcctgggagtcacccgcggccgctcgccggtaggtgcctgcctgagtctaatcgtaggcgtgtctgtgtgtcccgcagcacccgtgccgcatcgcctgatgctcaccgcaggcccagcccagtcccgcccccggaacagcccgcccagcgcgagctcaccgcaggccccgccccaggcctgccccggccccacctcctgagcaaccccccgagccgagctcaccgcaggccccgccccggacccgcctcctgggctactcaccaagccgcgctcactgcaggccccgcccctgccccgcctcctgggcacccgccgagccgagttcaccgcaggccccgccccggacccgcctcctgggcacccgccgagccgagttcaccgcaggccccgccccggacccgcctcctgggcacccgccgagccgagttcaccgcaggccccgccccggacccgcctcctgggcacccgccgagccgagttcaccgcaggcctcggcccggacccgtccccggaccgccggctcgccgggcaagcgctgggaccccgaggccagtccaggcatctggatctccgacacagaggcagccacgcagtgattccctggcgaccctcagactcacgtgttcagcccggacactccgcaggctatcttcaccgcgtcccgcggcagcccagccttccccgcagccgcctccgcccactcgcccgcgccgcgtcgtttgtcggccggcaccagccttgcggccccagctccgccctcctgcagcccaggcccagcagctccggaactggcgccctttggcgcacccgcctcgctgcccatggcctccgcctgcctcccctgcgctcagctcccgcttctggtccctgtagcaaagctggaaggcaggcctgcaaggcagccccttgctccgtggtccctctcaccatcataatgttcatattaaataattatctttacataactttgaatacttatgttattggttctgtttttggcaaaatgtaataaaatttcatgggtccgaaagttttcattttttccaatgtgagaaagaaaaataaaaccttttcttctaccctaaagctcatttttttctttaaaacatttttgcgggcctgaggtacagaatacaccatgcctgctgggcaagcgggctccggttccaggaaatccttcggtccccagcaaactaggccagttagttgttctgtttgccgagaggtaatgcgcaccctcctgtgccaggtcctagttggggagaaggcaaagaataaaaccagcagacgttccagaatattcccaccccatggagctcacactctggtgggataaggggcgtggaaggaacgcataggtcagaaccagagtatgtcgcggtcttcagcctcagaccacgatgaattaatacggatgaaacttcccttgcccgcccgccagcgctcgcctcctgctgtgtggcgtggttcctaaccggtctgtgacccaggggttggggacctttatgttaaaggaagttcttcaggcagaaatacggatctacacaaaggaataaatgacaccagaaataggaaatagaaggtaatttttttcttatttttgaatcaagttaaaagatagttgattacctaaagcaaaaataataacaatgtattaaggaatttatagcaaatgtagaagtaaattgtatgataatagtagtgcaggctgggcaccgcggctcacgcctgtaatcccagcactttgggaggctgaggcgagtggatcgcttgagcccaggagttcaagaccaggcttggctgggcaacgtagagagacctcatctctaaaaaaaaaaaaataccaaaaaattagctgggtgtggtggtgcacacctgaggttgcacccaggaggctgaggtgggagaatcacttgaacccaggaggtggaggttgcagtgagctgtgatcacgctactgcactgaagcctgggtgatagagcaagacgctgtgtcaaataaatttaaaaaaaaatagtaatacaaatagaccaggagagggacaatggaagttcactgttgtagatttattctactctatgtgaagtggcctactatttcttggaggtagactagtaagtcaaaggtgtatgctaagacgctaaagtgtcactaaaaaaagacaaagaaaaaagcaaaagtcaaagcact

SEQ ID NO: 587610 - DNA, 4001 bp, Homo sapiens
ctggtccctgccagtaccacctcatgcaggccccactctggggtcacccacccgggtctccgtccctcctggcccagtgccctcctcttcctctctcctcccaccgacgttgtccgggtgtctaccatgtgccaggcacccggcctgatggggcagttcccgccccgaggtgactgttgaaaccaaagcctgtaagtgtgcccagcttctccagtccccccaaaacgaggttgcagatatgttcccaccgaaggacatgagggagagaggaaggaaggggagggcagagggaggcctagctcgggcagaaagccatttctggagatgggtgaggtggtggctgtgcactggggccaagctggctggtggtgactgggctggaggtggctctgaccgggaacccagccctgcccgccttccgtgctcactgccctatctcctgggagtagagtgtgactgggctggaggtggctctgaccgggaacccggccctgcccgccttctgtgcccactgacctatctcccgggagtagagtgtggtcttgcacatggtttcgttggtggtgcaggtggcgatggtgacacagtccgacactcctgtgggctccggacagacgtagcagcgcagggccggcgctggggagaagggacaagggcggtcaggcaggctccacccctcccaagcccagagacagtctgtcctggaagcccaggtctgaagaggacagtgacactggccagggtagagatgcctaccagccaaaactcaggagcaatgccaggagcctgcagctggggacaggccgggctcagcctcggaaccttgcatcccagaggcagagtcggctgctgggggtggggatccagcctgcaaggcctgggaggagccaagccaagcccctttggaagtgtttgggagactcagggggaccaaggccctggcatcttcatagcaagaggcacctcgggcaggaagccttgggtgggggcgtggctgggggcaggttaccccctcagtttccccatcagggaagtgctgctgtggaggtcaagggatcaggccaggaggcccatggaatgcagggtgtgccaggctgcatccgggctgtgtctgggtgcccactcctctcccacagggacttgcagaccggcagggacggggaccggagaggctccaattccctcctgctccggtgaccccggccccaaccgcagcagcccaggtgggtctggctggttccagctggccagggcagccagctgcacagctaggcccgactcctctgtccccactgtggggatgcagcggggcctctgcccctctctggtgcacctgtttctgggaaatgggcaaagccatctgccaggggcctctgggccaagctgcttctggttgagtccaggacattgcccctgatggttgtttcaggctccacatcagggagtcaccccaccccatgtgtctggtttccccactcctctccatctctactgccaccccagcctcagagcctccctggggttgccttccttcccccgctcaaggcccttctgggtgcccatagccccccataaagtgtgacacccaggctggtgctcaggggtgtggctggctgggcccccgcccacctcgaaggccaccctctgctcaccctcattaggcgtccccctcaccgccagcccctctctccgtttccaccctcccctccttatggcgggggggccacacccccggccccacagctctggcttctcctgcctctgaggccccttcctggggcgccctcccgggaacagtgtgaatgtcagtgggtggcatctccctccgtcccagctcccctgtgggtcccacacctcacccagctctccgcaggcagccagcaccagcgccaggagcgccagccgcgtcccccgcatggtcccggcccactcctctgtgctctcaccccaggcttgcctggcggggacagcagacaccaagtgaggtggcgacagactggtctgctgagcggattagtggggtagagtttccccagggtggaggtgtgaagaccccgcccctccaggggctccccagccttccaggctgctcctcccactcccagcctggccctctaggcccaccccacccaactgggaccctccctgtcccttcctcattcctccagtatcaggccggtcccctccctgccctttcctgacccctccagctccccgcctccgccaccatggcctggggccgccccttcttccctttgtggggaccctccttgactcctacacaccctgtgctcggctcttctccccacccccctcatccaggagagcccccactggctcaccccaggcagcccagggaccccccagactgcctggaagggggcaggggagtgttacgggccactctctgctgctggctcctcagggatccctcctgcctcaggtcatctgtgttccaaggcagatctgtgtgctggatcttccaagattctgggctggaatctttccaggaggaccttggtcccacctccgagctcctttgagtggtcaggctgggtgttgggggcctgggagtgaactgccacccggacagccagctacagggtgtgctcagaggcttaaggagacaaatgccaaaaactactgggtcagcagagaaggtcctggatagagagtggggtggggaggagctggggtctcttgggggtgctaatcccatgcccccagccacctgccagctgggtaccttcatctctaaccttctgataaagctgccctcaggcagggcttaccacctccttgcaggtaaggaaattgagggaaagttccttacccggggctcagacaggggacagtgattttgggttgggatgcctcagaccatctcctgctcagctcccagctccccccaaggacatccccccagactgcctgctccagcctccccaggttgtgtctggtctgtgatcctgccaccccctgctcccagtcctgcagctgccagtgtgtagggtgtgggggttgggggagggatgtgtgacaagcagcctgtgtcttcctgggccctggcggtcaaggccatgatctcagctaagcccagactcacactggagctcttcagcctgagcacccaaatcccacctcatcctggtctttgctcctgctgttcccactgccaggaatgcccttccctcttctgtcccagtgtttgaaattctgtctttggtcgaccgcactctcctgcccgcaccccctccctgccatggcccttttggtgtccccacactttcctgctgcatcagctgtttgggatctggtcttcgccccagtggctgggagagcctgtgtctctctgagactaggtgggggtggagtgtgcaggggtggtgagtggggcaccaaggattccctagcgccccacttgtgtcagagacttagcctagcagatctcacttttcctcactgcagcttcagaggtgcacagtgctaatgaatttattttgcataagggaactgtggctctgagaagtaattgacttaggcaaggccgcccagccaggcctgggtgaaggctgaacagcagcaagcctgtctggtttttcatggtgccactcagccacgctgcaactggccattgatgctgggtgcagctaactggattagacaccccaccctacacaccctgggttcctcttgaggcctgacccaattcctctgccatggcatggcccagctccttcctgtcctcagacccaggggccccacctgtgccttctacccagaatacacgcctggcccccaggcattcacctcctcctagaatatctgcctgacccccattggagagatccaggctaagcctttctgcaaagttgcagctgcctgattggggtgtggaaaaatgtggcctagccagggtctgggctggctttgtttgggaggactgtgttccaggaagaccacacccttccctcctcagttccaccaggaacttctgggtc

SEQ ID NO: 587611 - DNA, 4001 bp, Homo sapiens
tggggctactttatcaaaatttatttatcttcagttttcctctatttctgcaatttttcaacaacattcatattttgcttaagtttcacagattatcaccaatttaaatataaaaacaaaaacatctcaatatagaaaaagcttgagtaaaagataaatcatgtatctaaagttagtacaaaaggccaggctcaggcagctcccacctctaatctctgtgctttgagaggctgaggctgaaggatcacttgagcccaggagttcaaagctgcagtgagctaagatcctgcaactgcactccagcctgggcgacagagagagcccttgtctctaaaaataataacaaaagaaaaaagcaaacaaacaaaaaataaaataaaaataagtagttagtacaacaaattgtttgataagcctccaaataaatctttgagttgcctcccctgcctttcaactcattagagtgaacatctaatccctctattcagaatgctgcatgccttatgttgccactagttctcttatcaaaatcaactagttcttctcttcaatctgctctgaaattttaactgctctggaaagctctcaattgcacaccgtccctactaacattccacggatctctggtatccaatacccaaagcaactaatgaggaatttgaaattttaatatgttccagaaaccagagttaaaaaatcaataaactcacgatgataaggggaaaattctgagggttttcaaaacataaaatcaccgcactgtaagatacattaactggcaatcttaaaataccattttagcgcccttaaacattaaacctttgaacgcgtaaacaaaagttgcatgacccagtttcattactgttactattaataataatggtacctacccagtatctcccaatccatgcaggaaaatcacctataagagaagaggaaaattaataagcaatgcctaaataagcccacacaggattgttacacactagctttgcttaaggtggaaaacggaacgaaacctacgagagaattacacaacactatcttcggcgacttaatctttatcgacctcttttaaatggcaaaaattctgatcaacttctccctttatttcctgagataatgaatggggggggggtagcactgagaggtcccagttagacattgagtgcaaatgatcacattctaagaaaaacagtttatctctttcaagtgaaatcaggaacatctcacatatcctgtagaatttttccactgcaaaagcaagcttccggaggcaaaaataagtttgacttttcatacacgagttttctaaaaaacagtacgtctgaccttgtaggacactcaatcttcaaacttctttcattgaggataagagtgcgaggtgacaataaggcgatttcctggcggacttaggtttccctcacccacacaccaggcagaaacacgctgcagaggctgacgccgtgccctaggccggcccgcgggggtcccggggccacacttcctccgcaatgcagggaggagctggggactggccctcgcgccggctgtgaccccccggctgcccccgccccccgcggacccggccgcgcggaccattcgcaccccacccgggccgggaggagcgtcctcgtccgcaggccgccacgcgcccgcaacgcccaccccgcgcgaggggcaaccaccggtggccggcccagtggacccctccgagcccacgcctacgccactcaccgcagcggtggccttccgggcggcgggcacgatggcgggcagcggggttgacatgttattgccgcacatacaccgcctcagctcacagcgcaagcggaaggaagagcgggcgcccggccgcggcccaagggcgtgcgagcggcgagtcccggccggccccaccgggcgcacgctcaggcgcgtgcgcgccaacgcggccccgcgctaccttccgcgcgcgcccgcgcgtccagggtccgccctgccctgcccctcgcccgccgcccctccctcggcacctcacaatgtccgggcggctccctccctccgattggctgcggcggcagcgcggacctggctgcgctttcgccacaccacgcagcctgcgcatgctcagtgctggctagggaaaatgtgctctcaggtgcaggctgagggctggtctcttgggtcttggtttaggtttttgcttttctggcgctgtagtgaaaagaatgagccccagagccaattcacccaacccaaccccaggtgctccttggtttcctgcggccggggtctatccatttgtaaaagtctggatggactgggagacgttgatggagcttttgcagtatttccgtttggggctacagcagtatgtagatttgggttcaacttaccttctttaaactttagttggaaagggtaacatttgtcaccagaaatccactacttccctaacttgatcgacaacacttactgatgtacggatattgacacagtacaggtttaagtgagaggtaaagccagctggtcttctgggtcggttggggacttggagaacttttctgtcttacaagaggattgtaaaatgtaccaacagcactctgtagctaggattgtaaaatgcaccaatcagcactttgtggctagctagaggtttgtaaaatgcaccaatcagtaccctgtaaaacgggctaatcagtgttctgtaaagtggaccaatccgcaggacttgggccgggacaaataaggaaataaaagctggccacgccccccatcccctagctggcagtggcagccctgggtccccttccacactgtggaaagtttgttctttcactcttcacaataaatcttgctgctgctgctcactctttgggtctgtgggacctttaagagctgtaacactcccagcactttgggaggccgaggcgggtggatcaggaggtcaggtgatcgagaccatcctgccttaacacggtgagacctcgtctctactaaaaatacaaaaaaaaaaaattggccggtcgtgtagtccaagctacttgggaggctgaggcaggggaatggcgtgaacctgagaggcagagcttgtagtgacctgagatcgcgtcactgcactccagcctgggagacagagagagaccttgtctcaaaaaaaaaaaaaaaaaaaaaaaaaaactgtaacactcaccacgaaggtgacaagctttattcttgaagtcagcgagaccatgaacccaccggaaggaaccaactctggacacataagcatgagactagactgcccttttctgcacaggtgcctttatggcctaaaatgtagttactcaacaaatgtgttgcatatcaactacatggtaagatctggaagagagcacaagatagaaacacttaaagccaaaatgccctgaccttcagaagtttacaattcagtgaaggacatactggaggccgggcgcagtggctcaaacctgtaatcccagcactttgggaggccgaggtgggcggatcacgaggtcaggagattgagaccatcctggctcacacggtgaaaacccgtctctactaacaatacaaaaaaaaaaaaaaattagctgggtgtggtggtggttgcctgtagtcccagctactcgggaggctaaggcaggagaatggcatgaacccaggaggcggagcttgcagtgagccaagatagtaccactgcactccagcctgggcaacagagcaggactccatctgaaaaaaaaaaggacatactggataccatccttagagagtaaggttcggaagaaagctgtaaaaaaaacaacactccatttctttcacacggtaaccagtgtcagaggcgtgtgaaccagagcaactccatcttaaataggggctgagtaaagtaaggctgaaacctattgggctgcattcccagacggttaaggcattctaagtcacaggatgagatagaacgtcagcgcaaaatatagcttataaagatcttgctgataaaacaggatgcagtaaag

SEQ ID NO: 587612 - DNA, 4001 bp, Homo sapiens
tagtcccagctactcgggagacccaggaacccagaaggtggaggttgcagtgagtcaagatcacgccactgccctccagccagggcaacacagcagaccctgtctccaaacaaacaaacaaaaatctagcctaatggcattttttttttttttgagtctcactctgtggcccaggctggagtgcagtcgtgcaatcttggctcactgaagcctctgcctcccaggttcaagtgattctcttctctcagcctccctagcagctgggattacaggcatgcaccaccacacccgggtaatttttatatttttagtagagatggggtttcaccatattggccaagctggtgtcgaactcttgacatcaagtgaactacccacctcggcctcccaaagtgctgggattacaggtgtgagccaccgcgcccggccccaatggttcattttaaagaaaatttagtcgttctggggctactttatcaaaatttatttatcttcagttttcctctatttctgcaatttttcaacaacattcatattttgcttaagtttcacagattatcaccaatttaaatataaaaacaaaaacatctcaatatagaaaaagcttgagtaaaagataaatcatgtatctaaagttagtacaaaaggccaggctcaggcagctcccacctctaatctctgtgctttgagaggctgaggctgaaggatcacttgagcccaggagttcaaagctgcagtgagctaagatcctgcaactgcactccagcctgggcgacagagagagcccttgtctctaaaaataataacaaaagaaaaaagcaaacaaacaaaaaataaaataaaaataagtagttagtacaacaaattgtttgataagcctccaaataaatctttgagttgcctcccctgcctttcaactcattagagtgaacatctaatccctctattcagaatgctgcatgccttatgttgccactagttctcttatcaaaatcaactagttcttctcttcaatctgctctgaaattttaactgctctggaaagctctcaattgcacaccgtccctactaacattccacggatctctggtatccaatacccaaagcaactaatgaggaatttgaaattttaatatgttccagaaaccagagttaaaaaatcaataaactcacgatgataaggggaaaattctgagggttttcaaaacataaaatcaccgcactgtaagatacattaactggcaatcttaaaataccattttagcgcccttaaacattaaacctttgaacgcgtaaacaaaagttgcatgacccagtttcattactgttactattaataataatggtacctacccagtatctcccaatccatgcaggaaaatcacctataagagaagaggaaaattaataagcaatgcctaaataagcccacacaggattgttacacactagctttgcttaaggtggaaaacggaacgaaacctacgagagaattacacaacactatcttcggcgacttaatctttatcgacctcttttaaatggcaaaaattctgatcaacttctccctttatttcctgagataatgaatggggggggggtagcactgagaggtcccagttagacattgagtgcaaatgatcacattctaagaaaaacagtttatctctttcaagtgaaatcaggaacatctcacatatcctgtagaatttttccactgcaaaagcaagcttccggaggcaaaaataagtttgacttttcatacacgagttttctaaaaaacagtacgtctgaccttgtaggacactcaatcttcaaacttctttcattgaggataagagtgcgaggtgacaataaggcgatttcctggcggacttaggtttccctcacccacacaccaggcagaaacacgctgcagaggctgacgccgtgccctaggccggcccgcgggggtcccggggccacacttcctccgcaatgcagggaggagctggggactggccctcgcgccggctgtgaccccccggctgcccccgccccccgcggacccggccgcgcggaccattcgcaccccacccgggccgggaggagcgtcctcgtccgcaggccgccacgcgcccgcaacgcccaccccgcgcgaggggcaaccaccggtggccggcccagtggacccctccgagcccacgcctacgccactcaccgcagcggtggccttccgggcggcgggcacgatggcgggcagcggggttgacatgttattgccgcacatacaccgcctcagctcacagcgcaagcggaaggaagagcgggcgcccggccgcggcccaagggcgtgcgagcggcgagtcccggccggccccaccgggcgcacgctcaggcgcgtgcgcgccaacgcggccccgcgctaccttccgcgcgcgcccgcgcgtccagggtccgccctgccctgcccctcgcccgccgcccctccctcggcacctcacaatgtccgggcggctccctccctccgattggctgcggcggcagcgcggacctggctgcgctttcgccacaccacgcagcctgcgcatgctcagtgctggctagggaaaatgtgctctcaggtgcaggctgagggctggtctcttgggtcttggtttaggtttttgcttttctggcgctgtagtgaaaagaatgagccccagagccaattcacccaacccaaccccaggtgctccttggtttcctgcggccggggtctatccatttgtaaaagtctggatggactgggagacgttgatggagcttttgcagtatttccgtttggggctacagcagtatgtagatttgggttcaacttaccttctttaaactttagttggaaagggtaacatttgtcaccagaaatccactacttccctaacttgatcgacaacacttactgatgtacggatattgacacagtacaggtttaagtgagaggtaaagccagctggtcttctgggtcggttggggacttggagaacttttctgtcttacaagaggattgtaaaatgtaccaacagcactctgtagctaggattgtaaaatgcaccaatcagcactttgtggctagctagaggtttgtaaaatgcaccaatcagtaccctgtaaaacgggctaatcagtgttctgtaaagtggaccaatccgcaggacttgggccgggacaaataaggaaataaaagctggccacgccccccatcccctagctggcagtggcagccctgggtccccttccacactgtggaaagtttgttctttcactcttcacaataaatcttgctgctgctgctcactctttgggtctgtgggacctttaagagctgtaacactcccagcactttgggaggccgaggcgggtggatcaggaggtcaggtgatcgagaccatcctgccttaacacggtgagacctcgtctctactaaaaatacaaaaaaaaaaaattggccggtcgtgtagtccaagctacttgggaggctgaggcaggggaatggcgtgaacctgagaggcagagcttgtagtgacctgagatcgcgtcactgcactccagcctgggagacagagagagaccttgtctcaaaaaaaaaaaaaaaaaaaaaaaaaaactgtaacactcaccacgaaggtgacaagctttattcttgaagtcagcgagaccatgaacccaccggaaggaaccaactctggacacataagcatgagactagactgcccttttctgcacaggtgcctttatggcctaaaatgtagttactcaacaaatgtgttgcatatcaactacatggtaagatctggaagagagcacaagatagaaacacttaaagccaaaatgccctgaccttcagaagtttacaattcagtgaaggacatactggaggccgggcgcagtggctcaaacctgtaatcccagcactttgggaggccgaggtgggcggatcacgaggtcaggagattgagaccatcctggctcacacggtgaaa

SEQ ID NO: 587613 - DNA, 4001 bp, Homo sapiens
atgttgtgggcggagcccccaaaacggcttgtgggtcccacgggtgtgaccagcgggtccagctggtagctgctgctggtgctgtgtgtgggcaggctggacatggagttccggccggagtctgacagcgccccagagcacaggccaggcttcagctcctgctccttgggcttgtctggaggggcggggtgcagctggtggctggcactctccggggaggagtgcaggatggctcctgaccgtggcagcacaggcttgaaggctgtgggcctcactgcacccttctcggagccctgtagaggaaaaggaccgcggtgactcatgcctcccctgcgcgcgcattgcaccctccctccccaggcacgcgtgccgaccttgagccagtctgggctctctgagcgcacgcagcacccctcttggtcaattgtctcagcagaccttgcctgttgctttgaagcagctgaatgtcatctctcttaggaaggaaaaaccctaatggcgacttgggcactttgttctatgaaatagcaacctgccaccagcttgccccagccctcccgaggtgataaataccatcttgaggctcctgctctaggtctctgtgtggggcaagttagggcatcaggctggccgagcttgctgtccctctttaggtccatcccttcttcctgttcactgcctcttccattaagcctggagcaaggacacggacctggcctccttacagggttgggaggctcactccaaatcacgatccttttttaaaactgtaattttccctggtagagtgcttcacagtttacaagccccttaatttgaaaagctgaatgctctatgcaaacataagaggctctttcctagtaaatcaaagccggggattcatttccccagggcaaggggcagaggactgaataggaaaattgatttcagtgtccactcgtgggacgcacgagggcttgagctggtgtgagggctggatttctcagtgcctgggcctcctttgccctaatctctggtaaatggatgacaaaactccagcctgtattcaaagatgcccccaggcgcagcttgaacaaggagctaatgcacaccagggcagcaaatgagaagaccgcacccacccccacgagtctcccggggagagaagcggttaactcccggcctgcatcctcttcatctgtgcttccagatgagaacagggctccctctccttcccgaggcttggcaaacgcctggatcctacgttgacaatccagctacatttcagtgggactccagaaagctcacatatcccctgtgctctttgcttatggcctgacccaagacttctgcttcagggggactgagcgatgctctaattcctttgtgaaacgtttgatctctgcggtgtggccacaggcttccgccggcacccctgccgctctggttttgaggagtctgaatgctcaggtcaccactccccctgaacccccaggctctccacccccattttgctttctcctgcgtttccaacccacttacccttgccagcgacccccgcttaccatttctagctgattggagaagggcatgagcttggggggtgtggacgggtcaaagtccaccccagcctggccccctaaatccccgctggacagtgccgtgtaatctgggtgatgggagccccgggctttctggctgaccttgatgtagaagaagtcttcgctcttgcccattttggagctggacttgccgtgaccggagtcctgggagaagccaaacctcagcagcccgtcggaataccggttgagcttcttgaggtgggaggacttgcgcagcttgtactgcgaagcccggcagtgcttgctgtggaagctgtggccggagatgaggctactgacgctgcccatggtgactcggggctgaggatggggcagggccgggcagggtcttggaaaggctgtggcagcaaggggcagtcgtggctccgtgaggggactgaggtcatagcaaagccctcacagagcctgcgagagccgtagacctggaagaagacacaagacagaagtcagcgtgggtgggagtggtcacagcacagtgctgattccgacttccagatctgggcagtagagaaacacatgtcagagcccagcactgtctccaccaccgggtgctccgttccttcttcctttgtctgataattcaacaaacattcactgggagcccacttcatgcaagcctctactctaaacactcgggacccagcaagtgactaaaacagtcacagtccctgcattcctggaacttagggttacagtggtgtggagaggccagaagcaaaccaatgtatactatagcaagtggtaccagtgctgcgggtaccagtgctgcgggtaccagtgctgcgggggaaactggagcagagaggacagaacagaattctgggaggtggctgttttatgcaggaaggtcttcttttgttagggtagcattttaaaaggcttcaagaaaatgagggggcagccaggcatgatggttcacacctgtaatcccagcactctgggaggctgaggtgggcagattgcttgagtccaggagttcgagaccagcctgtgcaacttagagaaaccccatttctactaaaaatacaaaaattagccgggcgtagtggtgcacacctgtaatcccagctacttgggagggtgaggtgggagaatcgtctgagccccggggatcaaggctgcagtgagccacaattgtgccactgcactccagcctgggcctgactcaaaaaaaaaaaaaaaaaaaaaaaagaagaagaagaaaagaaaatgaggtgcaagtcatatgaaaatctagggggagaggggtaccagaagaaaccccaagtataaaagcctgagtccctgaggcagagggggcttggctgtgtgagacccacatgggaagcagcctggctggagaacaattagcaaggctgggaaggagaaacagaaaccaggagccagcagacatcagagaacaaggaggctgtgcagctcaaagagctctggctttgcttgggttgagacaaggagcccctggatggctttaagcagctgacaccttgatctgccttaggttggggaaggtcactctggcttccgggtggggaagaagcttattgaggagacgggggatagaagtggtggccaattacaggctaatagtctagggtggtagttgtggatttagatgtggtggtggctcacgtctgtaatcccagcattttgggaggccaaggcaggaggatcacttgaggccaggagttcaagaccagcctgggcaacacagtgagaccctgtctctaaaaaacagttttcaatgtaattttgaggttgagctgacaggacttgctaaaggatcagatgtagggagtgagcgaaagagaggagtcagggacaatgccaaagagaggagtttggttgaagacattcagtttgcaaagcctatttggcatccagggagtgatggagagtaggcaggagggtgagtgggcagctgctgggagctgcagatgcacttgtcagagctgggagtgtggaagtggctatgagactagatggggtcaccaaagagcggatgcagaaagacaagagaggcctgaggatggttaacatggagcactcggcatctggaggtcaggcaggttaggagaagtgaaaaagagcagcagagaaggttttcagggtgatgtcgatatagaagacctaagaaagccaagtcaagaaattgtttcctaaaaatggtgtcaaatggccaggcgcaatggctcaagcctgtaatcccagcactttgggaggccaaggtgggcagatcacttgaggtcaagggtttgaaaccagcctggctaacatggtggaaccccgtctctactaaaaatataaaaaattagccaggcaaattgggcatggtggcacgcacctgtagtcccagctactgaggaagctgaggcatgagaatagcttgaacccaggaggcgg

SEQ ID NO: 587614 - DNA, 4001 bp, Homo sapiens
cagatccttgaagtcctcccgcacagctgagaacagactgcagttgactgcattcaccacctagggcaggtcacagtcagggtgacaggagcccagggctacccaaagtggggaaggacagtggggtggctgtgggtcccttccctccacctgaccctcacccagctaaggctgggctcccggctgaactcatggctgcgggctgtgctgaagtcatagtcaggcctgaaggactcattgagcgtggcaatcaggtagaagagggtcttgcggctgcacttgtcactgagggggccctcctcctcaccgccttggcttttgctgagtctgcacagacagaaccatcagctgggcccatcacctcccctcaacccccagccccaggtaggccccaccatggctcacctgctggggctcagtcctgaagtctggggtggagaaagtgcctccagcacgtggggctggccctcctggcagaactgcttgaacatgtgtttgtcgtctcctgccatcttacatgagtagctctcaatcctataggatgcagagagaaccatgaagcatgcttcccccaggttccactgaagggcgcggcagtgtgacctccgagatgccagcccccccagcctgcctcacctgccaatgatgtgggcatctccagtctccacagtcagctgtgagttgatggcttcaaagctcgagttctccaatagcttcatgtctttggggaaggagctccgtgctccagaggggctagtattgcctggggagtgagagaccagaccatgggtatctatctggccccttggggccctgccttcagccctcctacccactaagtggagccgctaggaacaagctgagtctggcctctgtccaggctgcacatcaggagctcccctctctgcccggccaggagaggtgacagagatcctgttttacctgagggtggtaagtccaggctccaggtcagccataccccctgcagaacacgcgagttctgggactagactagaccaccggggaccctgctcaccctggggctgctggctgagattgttgctcaacattcccattccccatctccacgcccactccaaaagagctccagccaccatgggggtaactcttgagtccgcaacgggacgtgactcctgcagtctccctcaggctggctgggctcctcagccaaggtaagaggctgcatcccggttaggaaccaggacacctgggactccgggccctgcggtcacctgggcgggcgctctttcgttttggctactttctggcccggggagaggaaaactacaggttcctccactctacccggaaaaattgcctagtttctccagacgcctaggagggcggtccctcggccccgctggggcgctgcagtcaccaggcagcgcccgcctgggccacgtcgggcaccagccaagccgcggtggaactacaaatcccaggaggcagcgcgccgcgcgaggcctgctgggggctgtggttccgggtacgcagacggcgcgggacgcagggcggacacccacctgcctggctgggttagatcaggccgcgccgggccgggtctggctgggctgggtcgctccgcgtcggtgccggtgcgcaggcgggggcgggctccgcgcagcgcgggctcttcaagatcggagggcggcgccgcggcctccgctcgggccgcactgtatccgggggaagaagctccgcggcgacgtcccgttactcccggccctgccggcccatccgggctgccaccgcgacatagcctcgcccccttccacagagcccgctctcgcgaccgacctgccgccgaccgccacagagcgctccggcgagtcagcgagccgagcgagcgagcgagcgacctccgcctcccccggccggacaacaacaagcgtccgccgggcccggccccgcgcctctgaatggcccgctccagtctccgagatcgagagctcgaatagccatcgggtgccgtacccgccactcagttctgccttctacgtctactggttatggagcctgtctgtcactcttctcgtcgtactaacccgcttacccccggcgttcattggccgtggcctctctagctccgccccctaggggggtcgaccccgtaaccagtgaggcgcgggccaacctagtgcgacgtgtgggcgtggcgggggctggggtctgcgggcgaaggtggcagcccattggaggtcccgggagcgaagtccagctgccgttaggcgctgggatagtcgcacgctggatgcatctacgtccgccgagcccctggggcgaagaggccgcgtccgccttcagttgtggccggtgcttcgccccctgacccttcgcccccaaagaccagctctaacgtgagcgcctcggccgccctgccccagcctcgtacacgccgccagcctcgcccagccggtgtccggagaccctcgggccgtgtccatttgtgggcaaagccagcggggcaggcttggccagagtgcaccactcggcgccgtcccaggcccgacgctctgggcgcgcccggaaccccaggttcgcggcccgtgtttccgaccggcggagggggctcagcggcccgatcccacggaagcgcgctcggaggggtgggacccggccggaccggagatggcgccgccagcgggcggggcggcggcggcggcctcggacttgggctccgccgcagtgctcttggctgtgcacgccgcggtgaggccgctgggcgccgggccagacgccgaggcacagctgcggaggctgcagctgagcgcggaccctgagcggcctgggcgcttccggctggagctgctgggcgcgggacctggggcggtgagtgggggcggagggcgcgcggtcagtcctcttggcccgggcagggcacggagcccaaagttaggcccctccgcttgccacctgggtgcccttaagcagttatgtttctttgcttctgttttctcgtccgtgaaatgggggtgacgctcggacctactgggacctacctggacctactttacagggctattgtgaggatttgatgataggcgtacagggcttaggaccgtgtaaatggtctataaatgttaccttgtatttctttgctcctcgtgcgatgtagggcggggggacgccctgagcctggactctccctcttctcaggttaatttggagtggcccctggagtcagtttcctacaccatccgaggccccacccagcacgagctacagcctccaccaggagggcctggaaccctcagcctgcacttcctcaaccctcaggaagctcagcggtgggcagtcctagtccgaggtgccaccgtggaaggacagaatggtcagtgccctgtaatggatacaattacaatttggaatagccttggccccccagtcctggttggggaagttggatccaccttccccactgctggatgtctgggaaggcttccaggagggagtaggtggagcctggagtagcttggagtacttggagtggctgctggagtcagtctcctacaccatctgaggccccagccagcacaagttgcagcctccaccaggaagccctggaacctcagcctgcacttccttaaccctcaggaaggatgagaggcaagcatgaagaggcagagcaggcagggtcaggacctgtgtgagaagacatcatcccaagagcagcaggagagtgacaggagtgggagagtgacagactcagatacctcctgcttaagacagagttctgcagtggcaagggttggtgcagatagggttggggagaaggatgtttctagagatgcttagaagatggaattagtggccgggtggggtggctcacgcctgtaattccagcactttgggaggccgaggtgggtgatcacctgatgtcaggagtttgagaccagcctggtcagcaaggtgaaaccctgtctctactaaaaatacaaaaattagccaggcgtggtggcgtgtgcctgtagtcccagcta

SEQ ID NO: 587615 - DNA, 4001 bp, Homo sapiens
ggctctggcccaagcctcctcttaaaaaaaaaaattttctgctagaaatactgtgcattacttttttctttcacttctcttgaaggttaaaacaagatgtatttccccaggagttacagatatgttctggtgcatagagagacagcagctcgggatccgggccagcccccacccgactgagcacaggactcacccccctccccccacccccggttgagcatagtaggacagcaggcctggacacagcacgggtgacgtccctggcttcgacctccaaggaacgccggtagcagggtcgggggcaagcggggagggggcaggcaggggccgggcccctcctggcgagcgactcatgctgtgactcgcgactgagggcggaccccggctggggaaagaaggggcttcctccaaggttttcttttctaatcaccaagcataataattataaatacttcgaaaataagaccgattttaaaacggggaggggaagttaaaaaaggcaaggaaagggaggctgagaagagaacgaaggagggcgggggcaggcaggggccacccgggaagggacggcagcgcggtccctctaggctggcagggcgaaggtgggaacggagaaccacgttcaacgtatgtacaagcggacgcttggaaagaagttagacctggctcaagtttccttagaaatcaccgttctccgctcaacctcaggacggcgacccgggccgacgcgcgcgaacggggaccgggagcgaaggggcctccagccccgcgcccgcagacttggcaccggggccagcacggccgggccgggcctggtgtccacgtcctgtaccgcggagtccgagccgaggccccgagaggcctgcgcgaacttgtccccggcgacggcggcgcgggctcggggtccggcgcctacaggaagaagtcggccgtgcccttggccccgccgggaccggcctgcggcggcgaaggctcccgcgggaaaccggccccgcccgcgctcccggggccgccccggcccgccagcttctcgtatttctccttgtacaggtcccgctctttggccaggcgccccacctccagcttcagctgctccacctggctctggagttggcacttctcgctctccagaatgtgccgctgctgcacccgcttgaagcggcaggactgcgcgtagccgcggttcttgagcgtgcgccgcttctgcttgagccggatgacctcctccttgctgaagccgcggagctgccggttcagctcgcgcaccgacatggacaccagctggtcgtcggagaagcgctcctccaggcgcacgtggtggcccgcgccaccgccgtgtcccgcgccgccatggtggtggtggtggtggtggtggtggtgggcggcgtggtgatggtgggcggcgtggtgcgcgccgtggtggtggccggcgcccatgtcgtccgctccgccgccgcccgcgaagcccgggccgcggaaagcctcgtaggctgcggcggccgccgggtggtgcgcgccgtggtgcgcgccgtggtggccgctgccgatgagcgcctccaccgcgtcctcgggcgtcaggttgagcgcctcggggttgaggtgatgctggtagccgctcatccagtacagatcctccagcgccggcttccccgaggtgcccccgacggcgccggggcccccgctcggcggcccgggggcgcccccggcctgagacgagccgccgccgccccccgcgccgccgccgccgccggtgcccgggctgggcgcgcagaagctgggcgaggagggcacggaggagcagggcgtgctgagcggcgtcgaggacagcgagcctggcggcaggcggtggcagaagcgctcggcctcgggaggctccttcttcacctcgaacttcatcaggtcgaagtcgttgacgtactcgatggccagcgggctgctgggcagctcggcgcccatcgccagctccgcggccatcgcccggggcccgcgcccggccgcgccccgacgggcggcgtgggagtggggggggagctgcaggcctctcccccccctgctccccgcgggcggcggtcccggcgggggcgggggggcgccggcgcggggcggcggcgccgaggggcgcagggaaaagtttcacgtggtcaactccggggcggcgcgctaggggcaccgctggccaggtgtctcgggcgaccccgggcccgcgtcgccgcctcctccccgcggccgccgcctcgggctgctccgggaccgctcccgcgccccacccgcgccgccggccggccccgcctcccacggctaaacgcgaagccgcgcgcgcccctttatagagccgggtgcctgggcccgcctccccgggaggggcgcgcgcccccgggccaatcggagccccagccccgccgccctcatttgcttatccccatggcaactcagagcccagctgtcaatctcctgcgggaaacagctgtgggaagaggtagggacgggccgccggctagaggagagggcagggccctctggtggccatcacggggcactgcacgggcagagggcgcgccgcctcaggggacaactgccgtctccaggggcctcagctcccacacccggcggccggagagtccggggaagcagacggggaccgcgcccggggaccccctcggggcctcgtccgcctcgggccacgcggcgggacgccccctcggccccctgggtttgcggccgggcctgggggccgggggcagctccgctagcggcggcggcggcggcagcgggacctccgggcctctggacacgggtgacaccgcgcggcccggcagagcgcggcgcgctgagccggttatttttagcccgcggctcagacgcgttcaggaatttggtcaacaaagttgccggcacctccgggcaccgggaagcacggggcgggcggagggggacacacgcgtgcggggcggcgcgaggggccggggacggagggccggcttgtggggggccgcggagagcgcaggactgtgggggtcgcgggacaacgcgggtgggtgcgagcggcgggggcggggcccacgggctggcagcccctcagggcgttaggaatccccgcccaagcggccaccactgcccactttcgccccccgcagggctggaggcgccttgctgggcctggagtgggacggggggtaactgagacgggaaggcggggatttccacctggcggccgtgcacctgctgggaggagacggctccggttcacggggcaaaggaggtgacgatgggcggtgggcctgtgaccccaggtccccgacaccagcgagccgggtgatgggagggttgcgccaggagttacaaggccggtgacccgaagtgggcctattgtttcttctcgaaattctctccattgctgttctatgacttcagcaatttaaaaaaaaaaaaaaaaagtctaaaatgtaaccacctgtgtagagaaaaaaagcctggaaggagttgcgcagaggccacagggaggcctggtcacggcgccgcagatttagtaccaggctctcacctccttccctctacaaagatctattgttttgtaacaagaagactgtcatgaagtgaggactgaacatctgcttcctaaggtgtctcggggtgtccctggcccttccctgggccctcccactcctctgggcagagctgggactgctgatttgggaagaccaggccttcctccccgcaagggagggccaaggacagcatgaggacccacctgcagggacccctctcccccgatcctgtcccagagggggctctgagctccccacccttctacagatgaagaaatgaagtgggcatgcagcagagccaagtccccacactgggtacctggacttgagaccacacgagtggtcagccagccaggggtgtggggtttcctttatggcaccccgtgttgagagggaggcccgggaagggaggatgccgccgcgcagtggagctggtggtagtccaggttgtctgca

SEQ ID NO: 587616 - DNA, 4001 bp, Homo sapiens
aaaatagcaggtctaaaggccacatagcatgcgtaagagtatgacagcctttgagtgcgctgccttgaggaactggggtaaaaaaaagctttaccactgttaaaggaaaaatatgaagagggcaaaagaataaaacacactttaagaattttataggtgtgtctggtgggggatggtaggaaacaggtaagaagaataagggagctcttttaggcttgtggctttaagtatcatctctaaatggatgactcctaaattgttattttctggtcagacttctttcctgagcaccagatttttatatgacatctcttcaatatctaaaaggcaacataaatattaacatatccacaaggagttctcaattccacatccctcgtaagaacagtcttccctagagttcccccacttcaataaataaaatcaccatttaactatgtatttatatcccaaatcctttgatttcttccttttcttcttcacttaatccatcaccaaagtcttgtcaattatactgacgtaaaaggtctcaaattcatcaatttcttttcatctccaccattaaattactaccttaggcgaagccactttcgtttttaaaaaaatttatttactttagagatagggtctctctgtcacccaggctggagtgcagtggtgccatcatagctcactgcagcctcggacttttcggctcaagtagtccttctgcctcagccttcgaagtaactgggacctcaggcgaacaccaccgcgcccagctaattttttattttttgtagagatggagtctcactttattgcctaggctggaatcgaactcctggcctcaagcgatcctccagccccagcctcccaaagcgttgggattacaggcatgagccactgtgtctggcttgaagcaacctttgtcataccctagtctccttgctttcattttttccctccaaaagtccttcacacagcaactagacaacttttcacaaacatagatcattaaaaggcctaaaaaacacttcctacaagattctgcatgacctcgccctggcaagcatatctaatttcattacctgtcttacattgtcactttgatgacccttatattcattctctcatatcttcaactctttgtactttactgttcctactgcctggattgctttttcctcagctcctcagtgactggcttattcttatcttttagatctcaactcaaacatcttctgttcagagaaaccttccctgagtaaccctatctgaagtgtccttcatcatctctggtctttctttcatagtatgattatatagtgtaattgttaacttatttgttcacttgtttactgtgtctcccccatcagtgttccaggagaggtgggacattttttctggttaaccaaatcctcaataattaccacaatgcctggcacactgtaagcacactgttatttctccaacaaaaaactcaatgaatgaatctaggatacttccgaaattatgacttaggcagaagtagagcaaatgtaaagaaaagcctacacaggaaacgcagatggaagagtaacgcgcacatggatgagaaggacgcttaaacttggagtcagcttcgccaaatcccgggccgccccccaccccaagtccggagctgacagctgacagctgacagcatgacgcgacgtcctgcattggtaggcacgaaggacgggacacatcgaccccatgggctgaggtgacggagtcctgtgctcacaacccggccggggcagcgggcagtaaacccctgctagacacgcgtgagaacctatgttggaaaatcggggttccggaagcctcacatccagagcggcacgaggcaacagacccgctgcgtacgcgttttctaagtgtccgaaaatgggcaaaattccctgcgcaaaccccgggtgtaagaacaaccggaggagactcacatcatccgactgcatggtgtccgcggctcagcgtgcaacttccggtcggatcgcgggcgcagacatgctccttccgggaaaccagttccggaacgcgcagcctcacctatctcgagaaacgctgagactctcggtgttgcgaagcgtcccctggcagtctcgtcgccgcgcgcgcgcccccgcgtcttcaccacgctggcgtctgcgcgcgcccgtccgcaatgctgggcttgttcatgggcgcagcctggagctgggaaccctgttgggacccagtgcgatccgcgggaggcaggacgcgcgcagtctgccgaatcctggagcgcggggaccgcgggggtcgggcgtgcttccctagcgccctgtttgtgaccgttcatgaggatgggacccctccctgtcgggcctcccctctgctgggaggaggctggggaaagctgcaggcggcgcggcggggctgggtccccgctcctccgagtcccccggccccagctcgcagccaggccccggccctgcccctcagaccctgacttagccactccccacgcccacgttgggtgcggcaccgggtcctgactttagaaactcagaacttgaattcctcctgctttgagaaaccactgaccaaatggaaagagcattccaataataataaacacctgtgtcttcctcattgcctatttgagacaacaaacaaagttgataagggagggaaaataccaagaagaaaagtagaggtctaataacccacaaaaacaaatctggaagcctaacagctcttttccgccaggggaaaaagaaaatctttactagtttgtatcgtattatagaagaaagactgtcggccgggccgggcgcggtggctctcgcctgtacctcagcactttgggcggcctaggcgggcgagttccagaccagcctggccaacatagtgaaatcccgtctctactaaaaatacaaaaattagtcgggcgtggtagcaggtgcctgtaatcccagctacttgggaggctgaggcaggagaatcgcttgaacccgggaggcggaggttgcagtgagccgagatcatgctgtggccctccagcctgggtgacaaccaaaactacctctcaaaaaaaaaaaaagaaaaagaaaaaagaaaaggaaagaaagactgtcaagaggcatttgaaccagagcaaccccatcttgaatagtggctgggtaaaataaggctgagatctgctaggctgcattcccgagggtcaggccatctaaatcacaggatgaggtcagcacaaaatacaggtcataaggatgttgctgataaaacagattgcagtaaagaagccagtcaagacccacaaaaccaagatggcaatgagtttgacctctggtcgtcctcactgctacactcccactggcgccacaaatgccatggcaacatcaggaaattactctatatggtctaaaaaggagaggcgtaagtaatccgctccgtgtttagcatataatcaataaataggctgggcttggtggctcacgcctgtaatcagcattttgggaggccgaggcaggtggatcacccgaggtcagaagttcaagaccagacgggccaacgtggtgaaaccccatctctactaaaaatacaaaacttaaccaggcgtggtggtgggcacctgtagtccccgctacttgggaggctgaggcaggagaatcacttgaatctgggaggcagagattacagtgagctgagatcaagccgctgcacttcagcctgggcaacagagcaagaatcagtctcaaaaaatacatgaacaaatagcgataaaaatgggcaaccagcagccctcggtgccgctctgcctatgcagtagccattctttcattcctttactttcttaataagcttgctttcactttacgaaacttatggactcacctcaaattctttcttgcttaagatccaagaaccctctcttgggtctgattggggaccactttccagtaacaagaccattttaataacaaaagtgtaagaaggacacagtctcagtaaggatggcgtgtgtccgg

SEQ ID NO: 587617 - DNA, 4001 bp, Homo sapiens
cccccagaattaggccttgtttcctaaaagtctgacatgactacaggttcttgagatggtatttgattagagggcatatggataagccttctttgcatatacacatgtatatatatttacatatacacatacatgtatctttacatacatacatacatatatttgaataaacattagaaaaatataaccagaatatcaaatttgaaatttcatgtatattattgcttaagaaaagacaaaagtactgaagtttagaaagtatttcaatgaactgtctgtaaattctagtacaggtggaatgcggatatggcaaaaacttctcaaagaggtaggcaaaaaactggagcttgcagaacatggaataaagtagccgagaacctaagaaatcgttctttgcagatcttccagttctaaacgtgtctccctcccacagcaaggcagccagcccaatgccatcgtctctccgctcttcccacatggatgcctgcacctcatcccaagcactcagatgcttctgaaccaggctcaaactcaaaccagcctcgcagtcaggatcccattactgatgtcatagcctgcaactcactcacgtctcctctttcagattcaaatccgggctaaacttaacttagggtggtgtggctacctgagcataatagaacagtgctcacaaggtgatccagctccacaagcacaaaagtgaaaccaaagcgacccaaataaaggttatgcaagctcaaaggccagggtgaggggagagatgaaaatcctaaaccgagcaaacaataccagcctgccggaaaggcactaactcgctaacatttcactttttatttgccattctcaggcatgatgcaacctcaggttgcccaatttatatttgcacattatctacttgtccacaaggagcttcgaaagtttccaactccataaaattccatttaaaaagttcaagtgctacctaaaaaggctgcacgacaggcaggtaaccccacctttacttgggcccaacaaagtgtgctaaaaaggtttggagttgcgtaaggaggccaggaagtgagaaggtgcaaaggcaggcagagaagaactcgagagccacgtttccatctttcccccaccattgtcacacccactggattagaaactgcccagggcatggcacataactcacctttctccttgccctgcctcctgcccagctcctctttccaatccaaaggccactaatgatggcaagggtgagtggggaaaaagcatgttcaagtcctcagccctcttcctcttcctgttgcctcccgcccccactttccacagcgtggcagccaccaggtcacccagtcatcggctacacctttgcaccacccaacaaaatggcaggttagcaacaggcgaggccgagagccaggagctcgctccggccaagcgcggcccctggccatgccctgggtttctaaaggcgcctctgagccccaacacctttctttcctccacgtccccaatgttcggccctgccgggccgcctactcgccctccccaggcaatttccgtcgcccgcgggggagcaggtgcccgcgtaacaggtgctaggagggagggcccgggcggcggcgcggggcaccgagaggaccccgggagggagcgcaggacaaagccacgtcgaagggaaggaggccgggggcggacgcagaggaagacagcccgggggacaaggatgccgccgcctgtcctcgctccccgcgcgaccctcgctccggcggccccacttacaatctccaggcagacgaaggcgcccgagtaggtccgcaggatgtcggggccggcgggcagggtgacccggggcggcgggaaggacacggcggggttcgggggcggcgggactgacgctccgccggccgacatgctgccgctgccgctgctgcgtctccgcgcgccgccgccgcctcccgcctccgcctcccgggctcctgccgccgccgccgccgccgctcagctccgcgggctccgggcgcgccgcgcgggaggaggcgtggccgtggggctcctcgagccccgccccgtcacgtgggcccaggtgagcgccgctccgccctggcgcccgagccgctcgcgatcacgtgcacaggtgcggctattgcagccgccaggcgcggtcctcccagctccgccgacctcacctcctgctccgctggccagcgccagcgctccgcgggcgtctccatgcgcacccccatacccctgatcgctatttttaccttctagccctccccttagtttgcacctgtgctctccacctgtcttctccccagctctcacagcgcgccctcgcccactgtgctcagtttgacagatacacaggtcttggtgctgtgactcagaaggtaaaatcgaggtcaccagtcacacttaaaaagtggggtgcttatgttttaaatgggactcgagtgggatttttttaaacgccactagggcagcgtcgcgcgtgggagtcggatgagtcagctgcagcagccactggcgcggggtccctgcaggtcaccggaggtgtcctcgtccgtgaaacggggatgtgaaatccaccggcatagatgctcacattagatcatataacatgaaaagagttgagcgcacagtaagctccttaaatgctagctgatatgatgagagctcttttccttacacaggcgcctatcactgctcagtggacacacgatgttgcatgggttatatttttttaagtagaacttttaattattgatttcactggtataaaactaattgcttattgccttttaatggcttaaggggattttttttttaagtctatgtatggttcgaatttcctgctctagtttatccccatttatctccattttatcgttggttttaacgtcaacattttgtaagttcaacagaggagatgagcttaattttctcgtctactaaagatgagcaaatctaccaaatctacatgcatcagcacacacaggtagaccacgttggaaaaaaacattggctaatctcatcagacattctccaagttgaatcctgaccttgcctgtcaggttcagtctctgaggaactgtatttagcactatgctctgctcagcagattctagttactctacttctctattattttaataagtgaaactcataggtgtggttgtggcatccgggtaaaaaccacaaaacagggtgtgggtgaaaccttctgtatatccctcctctccccacctcttagtcaccactttctgatatttaatgtgtggtgtttatttaataggaaattttaagttttctgcatggatttgtttgatcgatgagccctgtctgtattcagactctggcacgggatgatctttctgttttattttctgcctaagaattctcagtaagcacttaaaaaatgttcaaaggaaagacttcaaagaagtaatcatggagatgatcagcaactacgctatgcccaaaatattttagtgagtgaatttaatacgtccttggagtttctagaagggctaatgattcagaagagcctcaagtgagcttattttagcattgccacctaggagaacactttcaactgggtctcttactgcaccctccttgctgtactgcatatcctcagccatctttgctttgcctctccttcctgcttccacagtgaccagtggcatgaaaaaggttgtcaatgagcgctctgttattgtaacatattatctgcttgaaaaagaacactttttttttttttcgagacagagtcttactctgtctcctaggctgaagtgcaatagtgtggtcttggctcactgcaatctctgcctcctgggatcaagcaattctcctgcctcagcctcctgagtagctgggaatacaggcacctgccaccacaccgggctaattttagtatttttagtagagacagggtttcactatgttggccaggctggtctcgaactcctgacctggtgatccacccacctcagcctcccaaagtgctg

SEQ ID NO: 587618 - DNA, 4001 bp, Homo sapiens
ggtggggctggggcgctggccggggcctcactcacccataaactcaaacaccaggtaaatgtccctgtcgttctctgcccggatcacgtcaaggaggctgatgatgttgggatggtccccaaactcctggggagagagtcggaggcggctggaaggccaggaggggctgtgctctggggcccaagaaggccagtttctctcctgtctggagagatctgtacctgggcaaggggattggactggagggcccaggccactcacctggaggagcgtgatttcccggaatgttctctgaagagacagaaacacaggtgtgtgggtgggtggagcaagaaggaagcccatgtcctgagaggacccaaaggagctgatgtctgtcacccaatacccaccagaccaggcgtggcaagggggcagtgttccgagacaggccagaacatctgctatgactgggctccagctcccacctgagcttccaggcaccagggcaaggggctgcccctccctgcccccatcctctcccacgcttctccccacacactcacctgggcatctgtcttatccctaaaagcatcaaagattttcttgatggccacgacctcaccagtcctccggtccactgccttccacacaatgccataggcctgggaaggagtgccgtcacacagggccagccccttccccccatcccctgcccacccagattgtccctacagacatgaggctcctccttcccatcctgggtcccgagaggggatgggagtgtgggctcccgcaactgcaggctgccctagactccgacatcttccagaggaggggaggtagagggaagggagggtgagagctggcgaggccctggaggaaaggaggccacagaggggagcgtctgggcaggaaatgaagctcggggatgccctatcatccttccagctgcccaggcactctccctccctttctctcacaccccatccacccccaatcccattggccctaccttcagattcctccagaatctagcccctgccacggtctcttctgcccccaccctggtcccagcctctggcatctctcgctgcgtggctacgctaaccccttaactcatctccgtctgccgctcccgtgcacacccacggtaggtcctcagcacaggggtgggccttgtaaagtgacaccagcagctgctacagctcccagcctcagcaacagtaaaaaccaaagtcttggaagttccccaaagctcccacacgatcggaccctcaccactcacctgtctctctccatctcctatccagttgcacatacacaaccctgcactgggcctacgcacttaccgtctgcactgcctggaaggctcttcctcccctcccccatggcaccctcgaacacccccccacacacccacgcacacacacacaggcttacatgctcacacacacacacagatacacaaggctctgcccttcactctgcgcccaccccataaccgctcaggcccttctcgggcctcgcccctgtgctcctgagcctggggtccgcccttcctctcagtgacccgggcgcgggcccagcctccccagagcgtcgtgtgcacccgggaagcgggcgactgtggacgcgtggggagtggggcgccaggatccctctgcctgaggcctctggcggccctggctgtcacctgcctccaggagccaggttcctgggagtcaggatcgtgttaccccatgaggaaactgaggcacgaaggggctccagaccacctctcccgcctacggaggaggcaggacgccagtgtgtgacggaacaggcctccgaggggaccggccgcgccccgcaggtcctctctccgcagatctgccgcgcccctcggcgcgcggacgcacccccaggcactcaccccctgcccgagctgccgcctgagtaggtatctccggacaatgcgagggtccactacggtgcacatggcggccaggacgcccgcggggccttactgttgagtcggttgccgtgggaaccgacggcggcccggccccgcccctcggggcgcccctcccaacaccccccgcccccggcaggccccggctccgccccacagtgggcccaccccacctccccgcaggcccctcccctcaatgcgccccgcccacgtccccaccggccccgccccacagtgcgccccgcccacctcctcgcaggaccacgcccagcccagctgactaaagtagaaacaagaactatctgttgtggactctataacttgtagaagtaaaatgcatgacaccaatagcaaaaagtgaagggggataatggaaatacacatttatactattacaaaataacatgagaatatgtattgtaaggttcttaagttacatgtgaagtattaatagtatattattatttgggcgggacacggtggttcacgcctgtaatcccaacactctgggaggccgaggcgggtggatcacccgaggtcaagggttcaagaccagcctggccaacgtggtgaaaccccgtctccactaaaaatacaaaaattagccgggcgtggctaatgactcaggaattggagaccagcttcggcaacataaaacctcatttctattaaaaaaaaaaaataggaaaattagctgggtgtggtgacatgagcctgttgtcccagctacttgggaggctgaggtaggaggatcgcttgagccgggaggcagaggttgcagtgagcctggattgcgccactgcactccagcctgggtgacagagccagaccctgtctcaaacaacaaccacaacacaaactacttgctcaaaaagaattcaaaaaaagaaggaaaaggaacaaagaaaagataagaccagtagaaaacaaatagcagggctgggcgcagtggctcacacctgtaatcccagcactttgggaggccgaggcgggtggatcacgagatcaggagatcgagaccatcctggccaacatggtgaaaccccgtctctattaaaaatacaaaaaaattagctgggtgtggtggtgggcgccgtggtgggcgcctatagtcccagctacttgggaggctgaggcaggagaatcacttgaacccaggaggtggaggttgcagtgagctgagatcgcgccactgaactccagcctggcaacaagagcaagactcctcagaaaaaaaaaaaaaaaaaaaaaaaggctgggcgtgatggcgcacgcctataatcccagcactttgggaggccgaggcaggtggatcacctgaagttggaagtttgagactagcctggccaatatggtgaaaccttgtttctactaaaaatacaaaaattagctgggcatggtggcgtgcacctgtaattccagctactagggaggctgaggcaggagaatcgcttgaacccaggatgcagaggttgcagtgagccgagattgcaccactgcactccagcctgggtgacagactgagactccgtctaaaaaaaaaaaaaaaaaaaaaaaaaaagcaaaaagcaagatggctgacgtaaaacttaccatttttctttaactaaaaagtaaactttaatgtcgaaaatgcaaacttggggaagacagaaaagatcacacacaaggctgtcacttcacacttggaaggttgcacagcggccgggcagaggcgctcctcacttcccagacgatgggcagccaaagtgctgggattacaggagtgagccaccgcgccccatccctttttttttttgagacagagtctcgctctgtcacccagggtagagtgcagtggcgccatctcagctcactgccagctccgcctcccaggttcacgccattctcctgtctcagcctcccaagtagctgggactacaggtgcccgccaccacgcctggctaattttttgtatttttagtagagacggggtttcaccgtgttagccaggatggtctcgatttcctggcctcgtgatccacccaccccggcctgggcactatttcaaccaagtccaactttccct

SEQ ID NO: 587619 - DNA, 4001 bp, Homo sapiens
ttggactctgctctgacacctccaacaagcaagcttaggccttggtggccctgggttgcctgggaacaagaaaccccagagccccgatttatagaagacagtgtcctggtaactcgggggcctgagattgaattctattggcagaaataaaagtaaaaagtgtggacagataggaaaatgcaaggtgaagagccataagtatctcattctccacagaggattctaagtgccaagtttcagggactgagaggaaacattccaggtcataaacccatgttggtattttgacatggttttatgaggttggccctttgggagcaagcagggagaactgcgcccgtgtggactcctgcatggaactaccagttgcatacacgtggcttatctgccaccctcacgtacccatggagagcctctctttctgaactggggaagaggtacattcactgctcatagcagctccttgctatttctgcaaagacaagccatggaactcacctaatcttagaatgctcctggaaatgttctaaggactttacttgccatatctttttttttttcttttgagacggagtttagctcttgttgcccaggctggagtgcaatggcaccatctccgctcactgcaatctctgcctcctgggttcaaccgattctcctgcctcaacctcccgagtagctgggattacaggcatgcgccaccaagtccggctaattttgtatttttagtagagacggggtttctccatgttggtcaggctggtctcgaactcccgacctcaggtgatccgcccgccccggcttcccaaagtgctgggatgacagccctgagccaccgtgcccggccgccatatctcatttaatcctcacagttctgtgggtattaccatcctcattagacagatgaggaaactgaggcatacttgggtaccttcaagttatcaaccctgtaaacttcacagctggggttgaaacccaagcaggctgaccccagtctctgctctcgaccacgggtccctgaagtctcttgactgccccattccttaaaggccgattttaagtgtgcttggtgcagatgcattgtggcttcctgatttatgacaaattgaaacttggtcaattgggtttgttcagggtgggcgcgagtgtccctgaggagagcactttcctgtgcccccagtcctggagaccctaccagggacagtccccatttctctgtcctctccccaaacggctccaaattgttctggggtttctagcaactaccacaaaatgccttcccctttctctccctcttccacaatatagggaagctggaggtttagctgccatagagacccaagaacaaaatccagatgacacgggcatgaaaataccaggttccgaagagggaagggggagccatcggctgtccgtggaataggaatcaccctgcatacccgctcaacaggtctccctttccctgggtcgcggtggccggggtctgggcgtccccgctgcgtgccacagcgcccccacggggcactccggggcggctgcagcgcggcttgtcctgcgcagggagcgcgcccagctctcccggccgaggggtcgggcagcgccgccctccctctccccctgtcctcggaggggtcgaaggcgccggggccccggggcgctgggggctgcagtgcgggcctggggagggcgcctgcgcgtcgggcagcccaggctcggtattctgtcggtgggtcggtccgcctgcacttcgaggccgcccggccgcgcagagccgggggaaagcgcgccgcgctcacctgcagccgccggcgcctgggaagcgaggcaggggcgcagccacccgggtcttcctcgtcggcctcttcgcctcgccgagggccgcggctctcctcggggatcgctcgtgggaggcgaggacggagccccagcttctgcctctgcctctgtctccgccgccgccgcttgctccaagtcccatcccagagcgctcccttcgctcgctggctgcctgggaggcgctgggcaagggcgggcggctggggaggcggtgccgcggcgggggtggggagcgggccgggcggaaggaggggtgtcctctttggggatggggaaggcgcggagagggagcggcggcgagggcggccccaccctgtgggcagccccgggagctgggcactctggcggcgcgccctgcctgctgccacctggctccactccgtccgtgcctgagcccaggcgggcatcagactccaggggtccggagccgcaggcacggaacacaggcagctttaggggcctgtcgggttgggagtgcggggaggggtcttctgggggaaaggagacatggcaggaatcttacatctagaacttggggtcatgacctgcgggacgcacccactgacgcggggatggagaaaaaagtggtgagaattgggctaattgatgacaagcgccaagagctgtcttgccagtgcccagagcaccccaccagtgccagttcatattaacagagcgtccactggctggggaccaggccccgggatggggaggaggtaaagatgccaggatggagaggagacaaaattcctaccccgagggagcagggaaagtctagttcagacaagacttttgaaattatgagcagagacatttgcaactttgcagaatggaggaacctcaccttggatgtccccatggagccttggagggatgcagaagacaggattggccagcgacagtcaaagtggccggcacccccctctaccagctccccagttcctggaggctggggtgagtggatgtataacagaccaggacatctcctataaagctccaaaattctgttcccaaaccactagccaacgcacccagttcaggttttgtgtttttgtttgtttgtttgttttttgagacggagtcgcccaggctggagtgcagtggcgcaatcttggcttactgcaagctctgcctcccggattcacgccattctcctgcctcagagtagctgggactacaggctcccgccaccacggccggctaattttttttgtattttcagtagagacggggtttcaccgtgttagccaggatggtgtcgatctcctgacctcgtgatccgcccgcctcggcctcccaaagtgctgggattacaggcgtgagccactgcgcccggccccagttcaggttttaacaagctaccagcagaggcagcagcactaactagtttcaaaacctctggatgtgccacagtctgataatttggtgctttgggcggactttgttttgtaattaaccatcattcctatttgatgatagagttgatttctgaaatatgaataaacgccaaaatcaattcttcagaaaagctccaggaggggtaattaaaattccagccatgaagcaaggggttaacatactcgagccatcaggcaagtcaatgataccttaataccaagaaagaattgtggattcctgttcctttacccagtaccttaggcccactgggcactcttggctgcctgcactgatcacaaatagtttttttgttatgtctttgggaggaggtaggtggaggtcagaaagcagaggaaagtcttcaggaaatgtttggtctctgaagtcttggatcccatagaagaaaattcttcctgagtctgggccagtgaaaatcccctaggaacttgggaagttgagctacagtttatggaaacttaaatttaaaatgtgttgacttattccaagacaccagtgtgatccagtaatttaccaggaaaacaataacaatccccaaacccttccaaattgtaaggaaattgtaatttagtaactgattccagtgactctggtgtatgccaattaaaatgggtgttttccccccagggagttctattggaattcttcagaatagttaatctatgtacaaattacacttggggccaagtcaaataggttaaatgagttgttctaccttgtgggatgatcttcaggtctgccagaaaaaa

SEQ ID NO: 587620 - DNA, 4001 bp, Homo sapiens
aactccatgaggattaatccttatttttgcactcatgttgctttattgttttgagaatctttctcaaaaggaaacttctttacagctgtcccccaactccaatctccattagtgaagttaagggccatgagacagttgtgaacacttgatcataccattgtttaatcaaattccacaatcctaactgatcgttagatacagctatattttatttaagaatcccaatatataaaaatcctaattcccaaaataagtgaattattaggaagtggccctttggcaacagattttcactttacaaaaggacattccacaaaaccttgttaaaaatagggactgtcagggaaaaagggttgaaaaactaactcttgggtactgtgctcactacctgggtgatgggatcaatcataccccaaccctcagcatcatacaatatacccacgtaacaaacctacacatgtaccccttgaatctaaaataaaaattggaattatttttaaaaatgtatttcaaattagctgggcatggtggtgtgcacctatagtcccaggtactggggaggctgaggcaggagaatcccttgaatccaggaggtggaggttgcagtgagccgagatcgtgccactgcactccagcctgggcgacagagcgagactccgtctcaaaaaaaaaaaaaaaaaaaatatatatatatatatatatatatatatatatataaaaataaataaaataaaaaatgtatttgcgacttttcaatttaacagaaaatcatgtagccatgttaacagtacactcaccatttctgttctatgttcagttaagttcttgccttttgactatgttaaaaacataaaatcttatatgagcaatctaaaaaaataggtgctgtctctaatgtgttgaggttatttgatatttaaaaaatcattacaatcaagtcatcacatctctagtgataatttttgaacttcaaattatcatatagctaatctaacaagattcattttgacttatttcatttctctgagaattcatataaaggcactttaaaaatcacatttagttataataaaacttatactgatgtaactttatataaaatttaatttgattgaaaatgataaaattccataaaattaggactattcaagaatatctgagatccatggttgacagagatgtatccatttggagaattcctgtaccatcgcaacaaccatctctcctgagagtttattttcactcatctgccatttaacctgaacccagcaaaccttacatcagtgcaggaaggatgtgaatttccagtttagttttactctgttatatatattcattatcaaatatcaataatcagtgacagtgagagtaagttaaaaacaagtgtaattaatatattgtaatcttcacatctgcagtctactctgctttttgccctactatagtatttctgaattttttttttttttagatagaggcttgctccgttgcccaggctggagtgcaatggcgccatctcggctcactgcaacctccacctcctgggcttaagcaggtctcctgcctccctcccgaggagctggaactacaggcatgagccaccatgcccagctaattttttttgtatttgcattagagacagggtttcgctatgttggccaggcagttctcaaacccctggcctcaagtgatctgcccgcctcagcctcccaaattgcagggattacgggcgtgagccaccgcacccagtcactatagtatttctggatgtaagagtaaaaatagccatccagcctacctggcacgagtggagaatgaatccatgatgcagagataattgaagagaagtgcaaagggaaatgcagccccctggtaaaacgatataggatggagaaagaacagccaaagccactccattaggaaccagaacaaaagagcctgtcttttccagtgtccttaactgatgccttcctccaagagtaatctcaaccaggctgtctctggtctttttatctggtttagcggggctagggtgagcaaaaggcaaacaaaagctctggagataagcagaataaaaactggctttctgattgaggaactgcactatggaaaccaaaacacattttggtgtaacattaatcatgacatgcactaaaaacattgcttttggaagcgtggttttgtttcattgacatagtatactatttacctttccagtcatcatgctgtcgtattttcttcactaagttaatgaaaaatctcatttcccaactgtggacagacaactctgtggactgaaaaggggaaacaagaatgtgaccaggaggaagggaagcaggttcttttctttttctttttttgagatagggtctggctctgtcacccaggctggagtgcagtggcacaaccttggctcactgcaacctctatctccccagctcaagtgatcctcccacctcagcctcctgagaagctggggctataggcatgtgccaccatgcccagctaatttttatattttttttatagagatggggttttgccatgttggccaggctgatctcaaactcctggtgtcaagcgatcctcctgcctcagcctcccaaagtgctgagattataggcataaggaactgcacccagctggaggcaggttcttaaggcaaaaaccaagattccccttcctcaccacaactctcctccttatgctactttttttcgtatcagtacctcttatgtatctatttctcaattcattttcctgccccctttacaacatgagctctacaagggaaagactttgttttgttgattactgtatccgtagcacatagaacactgctgaatacatactatatacccagtaaatatttgtttaaaagattttgaggaggctggctgtggtggctcatgcctgtaatcctagcactttgggaaggcgaggtgggtggatcatctgaggtcagcagttcaagactagcctggccaacatgtgaaaccctgtctctatgaaaaatgcaaaaatttagctgggcatggtggtggacacctgtaatcccagctactcaggaggctgaggcaggacaatcacttgaacccagggggcagaggttgcagtgcgctgagattatgccgctgcactccagcctgggcaacaagagtgaaactccgtcttggaaaaaaaaaaaaaaggttttgaggatatcaaagtgtagaggggaaacatttcaagagaatcttttcttgacaagtaatacagaagagacttcctagaggcaagacatctcttggctagtagcgatccatctcctgagcccagggcattccagggctgtccctgatcagttgttttccctctccaaagtcacttgcatgagcaagttgtcaataaaggacaggaaaatctgacatgagcatcttcagggcaaggaccatcttttagtgagagactgtattcgtccgttttcacactgctataaagaactacccgagaccggtaatttataaaggacagaggtttaattgactcacagttctgcatggctggagaggcctctggaaacttacagtcatggtggaaggcaaaggagaagcaagtaccttctttacaaggtgacaggaaagagaagtaagagcgcaggaagaaaacaccatttataaaaccaccagatctcatgagaactatcatgtgagaatgatcacgagaacagcatggggaaaccgttcccataatccagtcacttcccttcctcaatacatggggattataactggggatgagatttgggtggggacatagacccaaacatatcagagactgctctgcacagagaagaaaatccaaaagaatcttattgattggggaactttgagcaagtcacatcacctctctgggactaagcttcaccttaaaactagacataattaggcctatctcaacagaactgttatgaaaatcagataaagcatgtaaaagcatggcatataaagctggctggttga

SEQ ID NO: 587621 - DNA, 4001 bp, Homo sapiens
agatccacttgcaggcccttctgtgcagagcccaggtcaggcctctgtctcacaggtgtgcccctaacaccacttcttggggttccctctacccgagagctgggagtgccgtatgtcagtggtgaactaacatcaaagtcaagagggatagctataaaaacaaaattaggaaattctggtggcatatcaaacctgaaattacagcatgttgtctgttgatctataccatctaatcgcaacagcaaactgaatatttattgcaacctgcggtggctgagattctgagcactcttaaatgttctattaaaaaaaagcaccagagaagctgcttcctctgctcactaagccctaaaactactattttctgcactccgttcagctcctctggttaagaacatgctcagtcacgtgcagaggggatgctttaggcgttatgccaactgttataaagccagtaaacctgagcagataaagcatcagctgtgtatcaagcacagcaaaaccaagatcttcagacacgcacctgaagaatgcatttggggagggctggaaaacagcacgtcctgcgcagcagggctctgcaggtccactccaggcgaggttggcatcggctgcaactcccccgtggaggtggaatcctcgcctctacgtctctgagagggagatgacctggcatcctcactccgagcttgtgtcacacaaaacagaaaagacagccattaactttcagggccggccttcctggatttgtcttttccttggggcattatgactcaccactgaaccaaaccaaacagaggcaaatggcaatcgaattaagcagcacccaggccacagcctgctgtgggtgtctgtgcgcaccaagcggcagcgcccagcccgaggctgagcgcccgggtcccgcgcacccacccagcgctgccagctgcggcgagagggcagacggggcggcgccgggggctgtagtgggcccggctcgggggactcacgcgtctgggcgggggtggcccttccacgccggctgccgcggcggctcggggtcgacgccggggacgacatagtgctcggagtacctgcgcgacaaggacaagctcgggccgggcccgcctcccggcttccctgccctgctccgcagcgcggacgttcccgtcggctccgcgccacgccctccccgccggcgcgcggttaccgtggaaaggcggccgcttgccgacgacgctcgcggactccgagtccacctggcgagtagcgctcccaaaccgcgagacccagagttcccgccggcggcaaggtcgtctccgcccctggcggggcctcaccaatcacagcggcgctcgtacgtggctccgcctccgggaggcgccactgcgcatcggcagggggggacagtgccgcttctttcagcgcccgtgcgtaaaccagaagtaggcctcgctcggccccccttggtccagatggtctgaccccctgcgcggcagcgttttcgcgggaaaactgggtcctacagcaccagctctcggggtgtgttcctctagcgttggctagggagcgtgtgcttctttatcccttaggcgtttttggttaataaggacattacagatgcatttctcacttaaagattttttttattaaaaaaaattaaggacgggaggtggtggggatggtctcattatgttgcccagactggtctcgaactcctgcgatccccccgcctcagcttcctaaagtgttgggactgcaggcgggcatcaccgcccccgaccgcgtttgtcgttttttatcgaggaacaaacttggaactcttgacctaggcccctcgcttgttttatctgcctctggtatttatttagccaagtccaacaccaagtagccacccaaactacctccgcaggtcagacgtttttccttaggtttccatgttgattcgggccaaagaggcgcgcttactggccaggccttcccgcaggggtccccgggaaagttcctgccgccgcgccccgcagccccgcctccgcgcgtaggggcatttccgggtccgggccgagcgggcgcacgcgcgggagcgggactcggcggcatggcgggctccggagccggtgtgcgttgctccctgctgcggctgcaggagaccttgtccgctgcggaccgctgcggtgctgccctggccggtcatcaactgatccgcggcctggggcaggaatgcgtcctgagcagcagccccgcggtgctgggtgggtaccggcccgagctgggccgcgggtgggtcctggcttcccgagtcgttctggagccgggcagcccggcgcttctctgtgtttagatgacggtattttgaagtacagcaattagattcttgggggaatttctgtgtatgtgtataaagggatttgtcatactgctttttaccccctagtattagaggaaagatattttaaagccaaagttggtgaaaacgacccctaatatggcaatcattgctatgcagagtggggggcagggcaagagaaataattttttttttttttgagacggagtctcgctctgtcgcccaggctggagtgaagtggcgcgatctcggctcactgcaacctccgcctcccgggttcaagctattctcctgcctcagccccccgagtagctgggattacaggcgcgcgccaccacgcccggctaatttttttgtatttttagtagagatggggtttcaccatgttggtcaggctggtctcgaactcctgacctcgtgatccccccgcctcggcctcccaaagtgctgggattacagacgtgagccaccgggcccggccaagagaaagtattttctttcacctgaatctcgcctaatcccaccagtaccttttccaaacccctctatttgccgttcctactttgagaaaaattgaagaaatgtaattgaagtcatgttcttttaactctttagcaatgcctgggtgggaactttttcccctttgtagtaaaagtgcctctttttagcattttaaatattcaaatacttaattatgtggatctcctgtattccttctttaaaacacgagtatgcagaccttgatgttgtgccctattaaaaggtgagattttcttccggagggtctagtagtgaatatggtgtaggaataacttaaacagtttaaactagatgctatatgtggcacggtgcggtggctcatgcctgtaatcccagcactttgggaggctgtggcagctggatcacctgaggtcaggagatggagaccaacctgaccagtatggtgaaaccttgtctctactaaaaatacaaaaattaactgggcatggtggcgagcgcctgtagtcccagctattcgggaggctgagacaggagaatgtcttgaacccaggagaaggagattgcagtgagccgagattgtgccactgcactccagcctgggcaacagagcacgactccgtcccaaaaaaaaaaaaaaaaagatgctatatacatgtatcctatatgtactctatctgttgtcaagaatatattaacaatggggaaatatcaaacaaaaaactaacattgcgtgattactttctcttctcagggtttcaaatttagaattcatttttgttcgtttagtaacttgtttctaaagcacttccaagtttaccttccatttatgccatatctcctttcacttgagagattccaggggaagtgtattagttccttattgctgctgtaacaattaccacaagcttagtggtttaaaacagcacaggtctgttactcttacagttcccactgtaagggggattctgtgagtcagaatcccacacaggtctcaccaagctagaaccaaagtaccagacagggctgctttctttctgaaggctcttggggaggatccattgccttattcattcaggttatataggattgaggtccctgacattccatacttcttgaagctgtcccctttccttggatcacagctcccttcccttggtcttcaaggccagcaaca

SEQ ID NO: 587622 - DNA, 4001 bp, Homo sapiens
ttgttgaaataaacaatatctgatgatgagggtcctttccaggtgttgtttaaaaaatgaaactggtaaaagttgtttcataaattcaatctaagtaacaaaatatagtagaattagtattaaactgggaaacctgagaacttggttctagacccagcatttcctggttgctatggggaaatcatctgacctctcttggctcagtatctatctgtaggaaaggaaagtgttgtatcagatgattaaagccccttccaattttaaatattgtgtcagtgaccaacataaaacattaaaccacagtaatgagtaaagaatggaatatgtgaaattcattgaaagacagcaaatactaattggaaacaatatatgtcagtagttgtaacaggtgctagaaataaaatgattaataggtgctaaaataaaatgattaagattggatcctgcctttcaagaagttgctaggcagagacagagaagtcagaaataatgactaacacgttattcattcattaccaggttgttttttttttttttttttttttgagatggagtcccaactctgtcgcccaggctggagtacagtggcactatcttggctcactccagtctccacccctgggttcaaacgattctcctgcttcagtctcccaagtagctgggattataggcatgtgtcacccggcccagctaatttttgtatttttagtagagacggagtttcaccatgttggccaggttggtctcgaactcctgacctcaagtgatctgcccgccttggcctcccaaagtgctgggattacaggcgtgagccaccgcacccggcctcattaccaaatatttatttggcacctactataggttggatactagattgtcctaggcacttaaggatactaagatgagtaaaatattgtccctatccttcagaaagagtgcagtgagagaagacatatatgtaaacagttacatggcaatttaagtgctgtaatagaaatatgaatataccaggtagcatgaaaggaacaacatatatgaaatatttcacaaaatttggggtcatccttgtatatgggtcataacattttccattattttaagacattttcattgaagatggtggggtcatagggaagaaggtatgaattctactttaaggtgacatttgatagacgactatttcactaattggaggagaggtgaagagaaagagaaagtgttccagagatggaggtcaccttccaccctcattatcagttttacactactggatccacacacccactacgtggagttcaggctactttccaaagaaaaccaattaagactgtcctttttgctacaacataaaagtgaaactttagcgtttatttctccgtggccataaggacaatgatctcaaaatgtgtgttgtgttcagaacatcacatctttgctgcactagaacattaggtttctggggtggaatgaagggcgactattggtaattaaatggttgggtgaggccagattatgtacgcttttgaagattatataggcaaagggaagccatcaaagtttttttaagggggttagtattatagtcagattttttttttttttgagacagggtctcactatgttgcccaggttggagttgcagtggcgtgatctcggcttgctgcagcctctacctcccgggctcaagctatcctcccttctcagcctgggactataggcacgtgccaccacatccagataatttttaatttttttgtagagacggagttttactgtgttgcccaggctggtctccaactcttgggtagctgtctcatcctcccaaagtgctgggattacaggtatgagccactacgcctagcccatagtcagatttttattttggaaacctgtgcctgctgccaatgtggaaagtaggttggaatagcgggagagctgataatcagtttctacctattgggatattcctacaagttggatggcctgatccagggcattaggaacgaaatggaatggaggagatcgattctagaattttaaagattgcacactggacctggtgatcagtctacaatacgcagaagagtaatcgaaagctaagtggggttttaatatgggtatgggtggatgctgctgctctaatggaaatacagagcccaaggagaagtgttaaggacatgaggaaaagttcccttgagatatcctgactttgaggactcttgggattccctgatagatgtaagcaggagggggccataaatcagggcctggagttcggtggcatcaaaagagttagagctaagtctgggtgtcactgcgtaaagcggaggccctggggagtggacgcgttttcacggaggcatattaagtcgggaaaagacatagaagcctgtggaaaagcgttaagtgagggaacagggataaaattctaactccctgtcttcccttagtctaacgaacgccgagtgttgctgcacgtggaacaggcgcggattctgtcttctctccgtgccctgtcagcaccggggatgaactggtgaggggaagactgcaggaaaacacttcacaaccaaagcggatgaaagcgagtccagactcatgaggacccctcccactgacagcggtgacctcgagttagtgggaccccagcgctgtagtgctttgcactcaccttgactcccaccaagcttggcggttgctctccgcctgcagcgtaggcggagcggagtcctagcgcgcatgcgcgcacgtcccggccgttggctgcgtcgcggggcctgccgggaccgcccgcgccctcgggtcagcaggggaactagccgggcttgttcccttacgttttaatagcttcactcttgctccctcccagcgaagcagagaaaaaataggtctacgtttggtttttgttgttatctcaggcaaatgatgttatgtttaaaaaattcaaaacgctgcttcagggaatgcaaaatgtctagtcactttagaagacattccagtattccctcgaaggactcaacataaagttaccctatgatccagtaattccactcttaggtatttataaatacacccaagagaattgaaaacatatgttcacacagagacttctacacgaatgttcatagtattattcatagtagccccaaagtggaaacaatatgaatgcccatcaccgattaatggataactgtggtgtaagccatacaatggaatggttttggccataaaacgtgatgaggcactaatacatgctacaacatggatgaacctggcaaacactatgtaagaagccagacacaaaaggccatatgttgtgtaattttgtttatatgaaatgtccagaataggcgaatccataaggaaagaaagcagatttgtggttgcccagaggttggttgagaatgcagaatgattgctaatgcgtatgggatttcttgttctttttaaattgtggtaaaatatacataaaatatacaattttaaccatcctaaagtgtagttacactacctacgttcacactgtgcactcatcaccactatctgtagaactgttttcattttcccaaactgaaactccatacacattaaacaactccccattcttctcttcctcatcccctggcaaccatcagtctttgcttccttgaattcgactactccaggtacctcatgtaaatagaatcaaacagtatttgtccatttgtgatgggcttatttcactttgccaaacatcttccagtttcatccatgttgtaacatgttagagtttccttcctttttaaggctgaataatattccactgtgtgtgtaccatattttttgttgttcatgaattcacacaggttttcttttagaagtgatggaaatgatctaaaattgattgtggtgatagtcacacaactctgaatctactgaaagccagttgattgtacattttaaatagttgaattgtacagtacttgaattaaatcttattgaggttggccgggtgcggtggt

SEQ ID NO: 587623 - DNA, 4001 bp, Homo sapiens
ctgacctcaagtgatctgcccgccttggcctcccaaagtgctgggattacaggcgtgagccaccgcacccggcctcattaccaaatatttatttggcacctactataggttggatactagattgtcctaggcacttaaggatactaagatgagtaaaatattgtccctatccttcagaaagagtgcagtgagagaagacatatatgtaaacagttacatggcaatttaagtgctgtaatagaaatatgaatataccaggtagcatgaaaggaacaacatatatgaaatatttcacaaaatttggggtcatccttgtatatgggtcataacattttccattattttaagacattttcattgaagatggtggggtcatagggaagaaggtatgaattctactttaaggtgacatttgatagacgactatttcactaattggaggagaggtgaagagaaagagaaagtgttccagagatggaggtcaccttccaccctcattatcagttttacactactggatccacacacccactacgtggagttcaggctactttccaaagaaaaccaattaagactgtcctttttgctacaacataaaagtgaaactttagcgtttatttctccgtggccataaggacaatgatctcaaaatgtgtgttgtgttcagaacatcacatctttgctgcactagaacattaggtttctggggtggaatgaagggcgactattggtaattaaatggttgggtgaggccagattatgtacgcttttgaagattatataggcaaagggaagccatcaaagtttttttaagggggttagtattatagtcagattttttttttttttgagacagggtctcactatgttgcccaggttggagttgcagtggcgtgatctcggcttgctgcagcctctacctcccgggctcaagctatcctcccttctcagcctgggactataggcacgtgccaccacatccagataatttttaatttttttgtagagacggagttttactgtgttgcccaggctggtctccaactcttgggtagctgtctcatcctcccaaagtgctgggattacaggtatgagccactacgcctagcccatagtcagatttttattttggaaacctgtgcctgctgccaatgtggaaagtaggttggaatagcgggagagctgataatcagtttctacctattgggatattcctacaagttggatggcctgatccagggcattaggaacgaaatggaatggaggagatcgattctagaattttaaagattgcacactggacctggtgatcagtctacaatacgcagaagagtaatcgaaagctaagtggggttttaatatgggtatgggtggatgctgctgctctaatggaaatacagagcccaaggagaagtgttaaggacatgaggaaaagttcccttgagatatcctgactttgaggactcttgggattccctgatagatgtaagcaggagggggccataaatcagggcctggagttcggtggcatcaaaagagttagagctaagtctgggtgtcactgcgtaaagcggaggccctggggagtggacgcgttttcacggaggcatattaagtcgggaaaagacatagaagcctgtggaaaagcgttaagtgagggaacagggataaaattctaactccctgtcttcccttagtctaacgaacgccgagtgttgctgcacgtggaacaggcgcggattctgtcttctctccgtgccctgtcagcaccggggatgaactggtgaggggaagactgcaggaaaacacttcacaaccaaagcggatgaaagcgagtccagactcatgaggacccctcccactgacagcggtgacctcgagttagtgggaccccagcgctgtagtgctttgcactcaccttgactcccaccaagcttggcggttgctctccgcctgcagcgtaggcggagcggagtcctagcgcgcatgcgcgcacgtcccggccgttggctgcgtcgcggggcctgccgggaccgcccgcgccctcgggtcagcaggggaactagccgggcttgttcccttacgttttaatagcttcactcttgctccctcccagcgaagcagagaaaaaataggtctacgtttggtttttgttgttatctcaggcaaatgatgttatgtttaaaaaattcaaaacgctgcttcagggaatgcaaaatgtctagtcactttagaagacattccagtattccctcgaaggactcaacataaagttaccctatgatccagtaattccactcttaggtatttataaatacacccaagagaattgaaaacatatgttcacacagagacttctacacgaatgttcatagtattattcatagtagccccaaagtggaaacaatatgaatgcccatcaccgattaatggataactgtggtgtaagccatacaatggaatggttttggccataaaacgtgatgaggcactaatacatgctacaacatggatgaacctggcaaacactatgtaagaagccagacacaaaaggccatatgttgtgtaattttgtttatatgaaatgtccagaataggcgaatccataaggaaagaaagcagatttgtggttgcccagaggttggttgagaatgcagaatgattgctaatgcgtatgggatttcttgttctttttaaattgtggtaaaatatacataaaatatacaattttaaccatcctaaagtgtagttacactacctacgttcacactgtgcactcatcaccactatctgtagaactgttttcattttcccaaactgaaactccatacacattaaacaactccccattcttctcttcctcatcccctggcaaccatcagtctttgcttccttgaattcgactactccaggtacctcatgtaaatagaatcaaacagtatttgtccatttgtgatgggcttatttcactttgccaaacatcttccagtttcatccatgttgtaacatgttagagtttccttcctttttaaggctgaataatattccactgtgtgtgtaccatattttttgttgttcatgaattcacacaggttttcttttagaagtgatggaaatgatctaaaattgattgtggtgatagtcacacaactctgaatctactgaaagccagttgattgtacattttaaatagttgaattgtacagtacttgaattaaatcttattgaggttggccgggtgcggtggttcacgcctataatcccagcactttgggaggccaaggcgggtgggtcacttgaagtcgggagtggacaccagcctggacaacatggtgaaaccccatctctactaaaaatacaaaaattagccaggtgtggtggcgcgcgcctgtaattccagctactctggattaatactattagcagacaggataatcacttgaacccaggaggcagaagttgcagtgagcagatatcgcaccattgcactccaacctgggcgatagagcgagaccctgtctccaaaaaaaaaaaaaaagaaactgttaccaaaaaaccccaaacccttaaattgtacctgcttctccaccattagtatttccttttttttttttttaagacaaggtctacctgtgtcccaggacacagtggcccaatcagggctcattgcagtctcaatctcctggctcaagtgatcctctcacctcaggctcccaagtagctaagacttcaactatgcctggcaaacttgtaaattttttttcgtagagacaggggtctcattttgtttcccatgctggtctcatactcccgggctcaagcaatcatccacctcagcctcccgaagtgctgggattacaggcatgagccaccgtgcctggcctcaacctttagtgttcttgatacagttatcaactctgctccattgcattgggttggatcattttccatgaaaaagtaattgaggtcatcccttttcatatataataggagtggcaaaa

SEQ ID NO: 587624 - DNA, 4001 bp, Homo sapiens
gcactccagcctgggcagcagagaaagaccttgcctcaaaaataagaaaagtaaatgaagtttcttctactggctgaacaaagtagctcatgcctgtaatcccagcattttgcaaggtggaggcgggaggattgcttgaggctaggaattcaagaccagcctaggcaacatagtgagaccctggctctacaaaaaaataataaattaaaaaataaaaataaaaataaccgggcgtggtagtgcctgtagtcccaagttactcaggaggctgaagcagaattgcttgagctattatgtgatcacatcactgcgctccagcctgggcaagagagtaagactctgtctcataaataaatttctactgaaagccttttcaaaatagcttcagtggaatttattaaaattttaagcaaagaacaactgtacccatacaatacatgagagtttacatttgtaaaattagttgctttccccaaattcttacgcttaatttttccagtgcagaaacctattttctgtaaagagacagatggtaaatatttcaggctttgtggccaatacagtatttgccacaactactcaacttcacggttgtggcacaaacataaccataggtaatatattaacgggccggcctgtgttccaataaaactttatttatggagaaggaaatgtgaatgtgatataatttttcatttgacctttttttaaaatcacttaaaaatgtaaaagacattcttagctcgtagacccttacaaaaacaggcagcaggctagatatggcctggggggcatagtgagtggacccctgttctagtggatatcctcttctcaaaacctgatgtttaaaagcattttccaggtgtgccgttggtcaatgattgggggtaacgctaaaagaaaaccaggttaatttaacaaaatactaacattagaaaaatagccacatctgattacagactttgtataaagcctctagtctttacttttggctatgaggttttatgactccaggccccacaatacaggccccttttttctcacggtcaaactctacaagacacgtgtccgctattcccctctcctgggctcttccaggtgcacagagggtgggactgcgtgcggtatcatatactggttaggacagcagctccggtctaaggccctgtcagcactgactagccacacacagggagagtcacctaaacgtccgatgccttagtttctgcctgtaaaatgatataagagagttgatagagcggttaaaaaaatcagacaataccatactagcctaagcacagcgcctggcacacaaagactccgcagtaaaaggcggctcctattattggaacaattagcatagaaactcaactgccgctcctccaggtgggcctcagagggggtcgaacaggaccagacccaggagggccccacaccaacttccggagggcaggactctgcctgccagtgagccccagatccagggactaaggcagcaggggtgaaagcaggtagggggaaaggcgggatttgggggacaggcagcatgggggagggagcaggcagcgggggattgaggggaactagcagcacgggggttggggcacaagcagtacgggggaggaagcaggcagtcgggggtttggggggacagggagcacgggagacgaagcaggcagccgggggttttggggggacaggcagcgggggagagagcaggagcagggggttttggtgggacaggcagcgggggaggaaggaggcggcagggggtctgggggagacaggcagcgagggaggggcgagcggggctcctcccacgggatcccccgagtgcgcccgcgacgaggggtgccggtcctcaaactcccgctgctggagcaggcagcaggaagtacctcacctttcaggatgggggccgccatgacagacggcgggatccggccagctggcctacgcggtgcttgcgagcctggcggcgcgcgcgggcactgggcatgcgcggggtgagcgcgccgccgtcaccgcgctccgctgaatccgcgtttccgggatttctctgtaggtgaggcgggaggctggagggagctgagcccccggggagggggcccgattccgcctcgccgcgcctctggctgctgggccgtgggtttttctcttctcctgggagtaaggaggacgacggcccctaacccctgaattagccttctatttccattagtgacttagaagctacccggcgcctcatctgggctcacctgagctgaggatcaggaaggggagggggcacagtcattccctcgcggacgcggcgggaccccagcggacggctttgtgcggactttcggcaccgttatgcccccctagcccgacaccacctggggctggcgcgccacgttactgttcagggccagacgcaccgccctgcctgctccggggagccggacctccgatcccggggatgggggaccccgagacctcagacccaacggaggggactctgatacctcagaccccacgcggggaccccgaggcttcagacccccacagggtgaccccgagatctcagacccccgcaggagtacctccagacctcaaatccccagtaagggaatgaaagagacttcggatccctgaggcagcaaatccctgtaggggcatcccaggactcaggtcaccgcggggtgaacccagacctcacattcaggcaatccccaggacgccgatcggctggcactacccactgtcccggccaccccccctggagctcaaaggcttggccctccagctgctccaccctgccggcaaccaggctcaaacctgcagcccgcggatcccctgccccggaagcaaccagattcgcgggaggttacctgactgatccaaggtgatacagctggtaactgatggagatgttggtagtgaaattcatgtacttttagttctttctatggaatctagaggtagaatacatgtaaaagaatatcgactaccgtctactcaggtctctgttttatctgtttattcattcactctcagcttttaataggatccaatgagccctctgtggttctgaagaattgccttgagtatatgcagcctcaaaaaacccacttcctaggctcagtctttgatcaatatttatcattatcaccagttattgttctaataaactctactctggaaatatggtgttatggtttacttgggagtgtgagttcagggcatcattgaagactcacgtacttttactgagaaagtgacattgatctctgtagattttgaattaaatgatatgatgaagtatataaaccaattacttttggtcaaggtggtaaaaaaagtttagtatttgatagattcttcatctccacgatcacaaatattttctcctaggatttcttctagaaatattactgctttaggttgtatatcaggtctaggttctacttttttttttttttttctccaggcagtttctcactccgttgcccaggctggaatgcagtggtgtaatcacagctcactgcagcctcaacctactggactcaaaggataagatctgcttttaattaatttttgtatacggtatgggatagggaccaaagttcatttttttgcatgtatacatatccaaatgttccagcatcatttattaaaaagttatttttgtctctactgcatttcctttgtgcttacatcaaaatctgtgttgcatatgtatgtgtttcattttaggcttcctattgtgttccattgagctatttgtctttttgctgccagcaccatgctgttttgattattgtagctatataaataagtgatgaaatcagatagtttatgtcctacaactttatttttcaaggttattttgtatcttctagattcttcagatttccttttaaatcttagagtcgacttctcattttgcacaaaaaaatactgctgggattttgattgagattgtgttgactctacagatgaatttggggagaattgac

SEQ ID NO: 587625 - DNA, 4001 bp, Homo sapiens
ttaaaaatttccacgaaactgaattactcttataatcaggacgaaaaaaaaagtcttgaccagttaaaaaaaaaaaaagcaataaaacacttttttggacacccacagaaataagagctgtaagatttttgaaaacttggtttcaaatttaccctaccactgactaggtttgggcaagtcactttatctctctgaagtacagaatcttcatctgtaaaacaaaaataatatctactacatgtagtgggtaatataagcaagcattaaaaatgggtcagcaaaatggtgctggaacaactggatatccaaatgcaaaacaatgaacttggatccgtatctgccactatgtatacatatttaaaaactcacaaaactaaatataggttgtagacctaaatataaagcttgaaagtacaaaacttctagaagaaaacagaaaccctttgtcaccttgggttaggcaaagatttcttaggtatgacagcaaaaccaaaatctataaaagaacaaatcagtaagctggattccatcaaaatttaaaatgtctgttcttcaaaagacagtattaagagaataaaaaggcaggatagactgggagaagtatttggaaagcatcaagacataacaggtgttgatgaggatgaggagaaactagaaccctcaaacagcaatgtttacattcccactagcaataatcgggacgtaaaatggctcaggccactttggaaaagtttcttaaagtattaaacagacatgtactgcatgatccagcaattccactcctgaatctgtccaagagaaatgacacatacgttcacacaaaaatttgtcagcaaaagttcatagcagcattatttacaacagccaaaaagtggaaacaacccaaatgtccatcaacagaagaaaaggtaggcaaatggtgatacatggatacaatggaacattactcagcaataaaaaggaaattattgatgcattcttagtgaaggatctcagacaaaaaaaaaagcccacatactgtagactccgtttatataaaaccctagcaaatgcaaattaatttatgattacagaacgcagatcaatggttgcttagcgatggaaggtgggaagcaaagatgtcagaggggtatgaagaaactttctgggatgatgtgtacactattttgattgtggtgataatttcacaagtatacagactacagtacacatatatatcaaaactttaggtgagtgtagtttactgtatattaactatgccaaaaaaaggaggactgtttttttaaaaaaaatgtaaattcttcaactccttggacctccccagaagaaatgctggaaaaaacatttaaagcaacctaaagagggaagtggagtgcgacccatctctgccttgaaaggtgcaagagtttacagagtaactaaagagctcgattgaatctaaaaaaaattggcttcaattctgcagaaatctggtctggaaaacatcacctctacaaatccgacttttggggacactcttgagtgtgaatgggggagaccctacacctaaggtttgcccagggcagccccgatgacatccacgggccccacgtaaagaggaaaccagaggccctttccctcccagctgcatccccctggcctcgcgcgcccgccttcctacctgcatgttcctcaggagctggaagatctccatggtgcggtacacgatgtcctgcactgtctcctgcccgatgcggcacagcgacgccgtgttgacttcccgggcggcctgctgagcctggggcccggcgaagggcccgggcgccatccccgacgcggccaacggaggggtggacatggcgcggctgcagcttcaggccggaaggggccagacagcaggtgtcaggggtctgcccggaattgggaggctgtggggcctcagcgttggaaccagcttgagagaccccccgcggcccgatttcaaaacagcggccgcgacttccgcccactgtgacgtaacacgtcagaaaacgtcatagacaccgcccactcggcgaactgtctccgagcggagccgggctggattggattggacccctgggcgggaaaggacggacgggttaagtagccaatcaccaattgcgctccagccagaggggcgatgttcttggggagcctggggtgagttcccagagttcgtttcccagtcttggctcagcgttagaaccttctgtgtttagttccttgcggagcattttctcttaacaagcctgaggtttgtagtataacagctaagagacaggttaaagtacttgttgagtcgcatacaggtgtaactggcaacctgcgattcgaattcagaaaacaagattcctaagcttgtacgcttctctgtgacatgatacggactccccgattgctcttggtccctgctcagatgttttattctttgagttttcccagtatctgtaagcaaaaaaaatgatcaacacacacacttctttctgactctggctcttattagtgtctgatttttttttctttttctttttgagatggagtctcgctctgtcacccaggctggagtgcagtggcgcgacctcggctcactgcaagctccgcctcccgggttcacaccattctccagcctcggcctcccgagtagctgggactacaggcgcccgccaccacgcccgacaaattttttgtatttttagtagagacggggtttcaccgtgttagccgggatggtctcgatctcctgacctcgtgatccgcccgcctcggcctcccaaagtgctgggattacaggcataagccaccgcgcccggcctactgtctgatattttatatagctttcagtttgtttactttcagactttatctcaccctatctacacacactgccaactccatgaaaacagactattttattcacttattctcaacacctagtgattggcacaagtatcaataaatacttattgaatgattgttgagtgacatgataaatgcaagagaaattaaaatgtctctcacaatgtctctcacttactgttcatctccaaagtggggaaaagtgaagaatgtaaaattagtgataggcacaaacattgcattttttagaagtatctgaatgctccattgtacggactttccaggaaatagttactaaatatgtcataggaaccctggtagagattttaaacatagtaattcgcaggtcttcggtaattaccattcgacaaatattggctgagcacctattatgtgctgggtgctaggagtgaagatagcgtactgaacaaaccaggcaaaagccctgcagcatgtttgtcatggggacaaacagaacactattgtgatgagcgtcttgaagcaaaagttcctgatatcagggtgctaacaatttaggagattgagaacgacctgaagggagcagtgtggaacctgaaggtggatagggaagggagtaacgaatgatagagtcttttctatgaggacgaggaaggccagtgccaacacctgaagtgaagaggcctcctaatgctttctaggatctggaagaagttcagtgtgaggacgagtgttaggaaataaggctgaagacagaggcaaccctggaggatcttctaacccatgtcaagcagttgagaatttatggagtgaaatagcaagccattgaagagtttcaaggtgagaggaataatttgaaatattcattttagaacacttattctggttgctaaatggggaacagatggtgggtttctattgtcttctctcccaaaggggaatgatgatgatgatcatgacctgtgcagagaaaggagacagagggtaactttgaataaatatttagtaagtagaatctagagaacttgatagtaactggatcaggaacattaaggagaggaaagaattaaggatggcacgtatttctgctttcatgtgaaacttcaggtgaagtttatgtcatttaccaagacaggatacactgaagaaaaaataagtttccgaga

SEQ ID NO: 587626 - DNA, 4001 bp, Homo sapiens
agctaagtcatacacgatgaaccgcaggccccgggaggcatcggccgtccagctggtcacctcgatgcccttgctcacagggggaggtgacggtgggtagcacttctccttgtcccctcctcctgggcatccctccactctctcctcggtgaggcagtggcgcagcaaagtctttcctgcagccttatgccccatcaggagcagcttgagccggggctgcaccgccggctgggaatgagccagttccttctggtaggctgcgatgtaggggatccccttcatgcagacctcgtaggggggctggatcagtgggttgtctttgatcttccacaaacccacccgggagagctggccaaagtggtcgggcagcaccgcgatctggttcccctgcagcacgagctcctccaggccggtcagctccacgatggagtccggcaggtagcggatgcggttattatccagccacaaggtgagaagccggcccaggcccgagataagggatggcaccgaggtgagctggttgcgactaaggtagagctcctccagaccagccaggggcagcagcgcggcagggaactcctcgaagaggttggaggagaggttgagcattttgagccgctgcaggcagctgaactgggcgggcagagcctgcagcccgttgttgtctagcatgaggctctccaaactggccagctcgcagaagccggcgggcagcgtgccaagctcggccccactcagccagaggatcttgagggcacgcagggcactgatatcctcaggcaggccccgcagccggttgctggacacgtccagctcctccagggccaccagctgcagcagctgccgggggaaggcagtgagctggttgtgatccacgtccagggtgcgcaggcgggagaggcaggagagggagtcaggcaggtgcgccagccggttaaagctgacatccagctcctccaggtgagcgagagcgcccagctgggcgggcagggcgggcagctggttgtggctgaggttgagcttccgcagctccctcagagcactcaccacctccgcgcccagggcggtcagccggttgtggctcacgtccagctcggtgaggtggtggccgagctcggccaccgccgggggcagccgggcgaagcggttcctgcgcaggaccaggacgcgcaggctgcccagcgccgaccccagcccctcgggtacctcctccaggccgttgttccccaggttcagtgcctcaatgtccccgaggttggccggcagcacgagctggggggaggcgggggactcgagcgcgtcggccccggccccggggcaggccccggcggcggtaagcgtgagctggcgcaggttgctccgcagcttcctggcacgcagggcggcgtcccgccacagcctcgcggtcttcaggttgccactgtccatcccagccatggcggggccccgggccgacagcctcacgcggacgcgggagcccgcagctacatgccgcgccgcgccccgggccctccggctcctgcccctgcctgccctcccgcgctcggcggccggcggccgcgggtcctagcgcagccagcggccgagcgctggcggctagggggcggcggcgacgcgagcggctccgggggacgccgagcgcgtggagagcagcttgcattctccctgcggccgggccatgggcgcgccgggcagcagggccgccgcccgcgcgccgcggaggatgcctgctcctcctccctctccgcccgccgcgcggcgcctcggggggcccggctccggccccgctaccctcgcagccgcggtcccgcggccggcagcggcgtcgcctcctcgagctcctgggggagggcggcgctcggcccggcggcgggcatgctgcgggcgcagggctggggcgcagccgcggggagggggcggcggcgcctccttgtctccgtttccccgggctcgggcgggagcgcgggcgccgcgtccccggcgctgggagggcgcgattgggaagcggcagcgccgcccgccggagcggcccccacgtgaccggcggaggcgccgcgttttcccggcaccgccccgggggcgggagctgcggagggcgccgggtgcggggccgggggcgcctggcgcggggccgggtccgcgccccggaccatgctgggcggggaggtcgtcccagcggcggatgtggggctccggggcccccctggtgggttcgcccgcgcctggctctttgttggcccccagtctctaaggatttctttttcttgttctctaatgcgtcggatccgccggcttcccttactcatcctttacctgctcccctgccgctcgccttgcatccacgccgtagtggaactggcacaactcgggggccctgggtatcatcatagaagcttaggacaagagtgtggttaaacaaaattagaacaggcaaccattcattcatttggtaaatatttcctgaggccctatttcgtgttgaacatgggacaggagtaatgcaggctggtcagaggagaataaaaaataccaggcagcagtttcacttgactggaggctatgggctgataagaccctgaaaaccagggtgtgtaccaagctggctaagaccggctggacccgacgtggtcctggatttgacctaggtttctcctaggcctccattatacgctctttaacatcctaagtcacaccagtgccatgacaattccggggacacccatatttgaagtaaaaatgggtggcaccacagtcccgaaaaatctccacacttttccaggaattttcatgaatatttcaccccttggttaaagaaacccataaaggtagcagccccaagccccgttgtgagtgaccctctccacaatcccttttcctgggtgtgtacttttccctttgcaataaatctgcatattgtcactattttctgagttgtccttgaactcattctctggatgtgtcaagagcctggacattggctggggtcaaggtcgcactggctttagaggatctcccccagcccacccgtaccagaactactaaaagacggttttaacccccctggggaaggcttttgagcaggtggcccgccagcctaaaggagggttgttaagatgggggggacacaagctgtttatctggggtatcccgtttatcttcacaacaacgctgtgaaacaaatactgtatccccattaatacagtacctgttgttctgcggactcaagaaaacagctattttgggaaacagtcacagtccattgttcaactctaatgcttatttttattgctgttaggaaatgtttctttgagctcacatctatgctaagtcaataatttctcccgaacttatgaaagtctggaaacctaccaagactcccagtgtcacctccatcattcccttcaggttgattgataaggaagcaaatagttttcagggaccgaaaactgcgttcagttggttaaaggcatcacttgacccactgcagctctccccgacatgcgctatggctgtcatttggggacccatatttggtgcagtaacgtgagaagtgtgtgtttccaaaaagagcacctgaacatctgaggctggaaatccaccccagtgatggttatcaggctgcaggtagtacatgctgtaactggaggatgttccccagttctgctgggtccctgaggctctgacaccacagatgaaatgtgagtaagtgaacagcaagagctgatctgtgttcactctgaaggacttccgagagttcagatggctcagggtagccccacccacactccctcccagagacagtcaattttacaacaaatattctgagttatctaggctgaccctttttttcccccacagaggaggaaatgggctcaaagtaagtgacttctcaatcagccatcaaagtagagtagaggcaggactgctaactccccgtgtggaatgtattcccctgtgatcatcacctgtactcacactgttcttgagccagaccccaaatt

SEQ ID NO: 587627 - DNA, 4001 bp, Homo sapiens
tcagctcagagaaaggtgctgggtgctaggtccaggtacagaacgggaaaggcagagaggatgagcaggagcaagaagcagggatgtggccccaacccatcagccaggcctccggccagagtgcccagcagcagcttccccagcagctccagcgtggccagaaggctgtagtgtgtggcctgaggggggtgggggtcacggtcaaggtcaggcccacacagccccagccccgtggtctctcttgtgtccctgctacatctactcacctgcagggccctgggggccagctggctgcagcgcatcatcccagtgaaggtgactgtggtgaccaggcctcccaagaagtgctgcagacataggctcagcaaggctgaccctgggagggcagaagtcagcagtgccccaggctcctggcccctctcttcctcctcaaggccagcccctcacctctcaagattgtgccagcgtccatgctggcccccagggtgtccaggtggaagaccaaggcagtctgacaggctaggcccccgaggcggaagcgcagcaccgacctcaacagaggcagcagtttcctgggatgggggtgggaaatgggtcagtatagtggattgggggcagctcaggtacaagtgggtgggcagggtacactggggagggctcaccagtgcttggccagcaaggtcccacccagggaggagccagcgatggagcagaccacagcacccacaccattccacagtcccaactcgggagcagaaacgccgtggtccagcaggagaagaggaaacaggctgctggcaccctgctcaccttgggtggtggggggggcatgagcacgggaggttccatatctgcccccacctcccttctccccacctgggccctcagtcctgccctgctctcctcagtgttccagagctgcagatactgggggagaagtggggcagcccgagagagcgctcagggatggggctagagctgggggcggacaagacacaaggcccagctgcagagccccggatgtcagggccaagtcttgcaggtcataccccagaaagagcgtggccctgtaatgggttgcaagcccctggggacacacctggagctgtcccggaagccccaactgctgttgcctggctcgaggcctcactcacccagcttgtaggtgagcacaaagcctgccgtccacacggtccccggcacggctagcacgtcccgcagaaggtgcgcggtgtggggacgctgctcggaagggggctgctgtgggagccgccgcagggctggtgcagcccaggccagggccgcggccagccagtaggtggcagccaggagcagaaagagttgcggccacgagaaggtgggcagcagcgccagcagcgcgcccccagctagcgcggcccccagcttgtacgcgaccacctgcacggtattgcccggccccagttcggccggctccagcagctgcacagccagcgcgtccagggccacatcctgcatggcggcacccaggttcaacaacagcagcaaccccgccacagcggcgggcagcccggcctggccagctccaggagggggcagcccggcaagcagcccacacaccaggcccaggcccgccgtgctgcgcgtcacccaggccctcgccgagccctgcgcgtccaccagcggggcccaagccagcttgagcagccacggagcgtacagaaccttggccagccccacgcgcgtcagcgagaggccgccggcacgcagcagcactggcaggaggccggactggagcccgtagggcaggccctgcaccaggtagaggccggccagcggcagcaacttcccgcgcatggcggctcaggccggctgcgaggctgggaggtcgggttccaggtggggtcccgcaaggcgaggtcccctccgcgtggggtcagaggccacaccccggcatggctttggttctgggaccgggcagagtcagcgtcgtacaggctagggtctggacacgtgctctcgggctttaggagcatcaacaccccagaagaaccgaagtcgggtccaaacgggggcgagcggtccggacaccggcggccggcggctcccggcatgctctgcgcggccgcagggaagggggcggggccactgcctcccggggctcccaccatgctctgcgataccgcaggtgaggggagcggggccactgcctcccgcggctcccagcatgctctgcgaggccgcaggtaaagagggcggggccgctgcctcccggggccctcggcccgcgcccagcactgccggccgggccggactctcagcagtttctcggccccctggagccacagagcggagcacggaccacacggcgtcgctggagccccgcggccaccggctccagggccggaaggtcgcgcgggccacagagaccgcaacgggccagagcgtcagctcgcgggcgcccccggtggccagtccgggctcgggcccgcggccccccgccccgccacgtgcgcgctcccaccgaggtcctgcgcgggtgagaggcccagagggggaagctacagagctgggccggcctcgaatgtaaggatcggcctgcgcccacggccagccctggcccctctcagtagtttcggatccgctccaggcgtgcttccttcctggtgtcagccgaagcgtggttgctgcagtgcccagcccccgcttctccagccgcccgcatgaaggcgtccgtttcttaagggttccgccgtctaccactggatacttccggtgcggaccccaaccttgctgtgtctgtggcttcagctcctccgtaaggcggtgacagagccatggaagttaggagggaagtgtgaaaggtcaggacccagcttagctcagaaggacaccgccagccactgcccgtgacgcccttcggtgtccggtgacaaggctaggagcaccctgcctgattcgagcccgccctgccaagggaggggcccacctgctgtgtctcctgcccagagctgtgccctctggggctcccgagggccagatgaggctgtgaagtgtgtgtggcctgtggttaagaaccatctccagagcgaaaaaaaccaggtgcccttggccagtcctatctcccaagtttgtgagtctctaaagccagccctgtccttggcggacttgagggcactggacccaacgcatttttctggctgccgaggcctctgagggggtttcttgtcagctcagcaggtttttgggttgcaggtttccacgtctatcaaatggggactatcatgcctacttcagaagagcatctgtgcagattgagtgaccccccagcagtgtctgcatgtagtaggtgctcagccatgctccccaggccaggacacagcgctgcccactcccgctcagcccagcccctgcctcctccagccccagccctcccctgggacgctcccttatcctctccctctgcctcccactccacccagccgaaggactgcaccacacaatgacaccaaaggtggtctctggccccccagacagtggccccacccctgcttccttgggtaagagaaccaagacttccttcctgagctgtcagtcaccctgaccagccagcaccatgctggtttagtatttccccctgccccagggaagacatggacctcacaggaaagggagccaggaaggaggcagttcactgtgccttcctcaggaaaggctgtgtttcttcgggtggccacctgggcccctggctccctagattcttgggggcttccacaaaggggtgtggggcctgcgctttcctcacactctggaccctctcaacccatttctgtgtgatctgacgggctctgccccacaaccagaggccagagggaagacccagcctatggtgggcacggggtcttcaggaggaagaggtgggtggtggccgtggaaggtcccttctctgaagggactcaggcctgcaagaagggtaggcaggtgggagcgggccacgcagctgccaacgcttcctccctgga

SEQ ID NO: 587628 - DNA, 4001 bp, Homo sapiens
ctcccaaagtgctgggattacaggcgtgagccaccacgctcagccaaaaaataaatttatttaatgttctttagtagtaccattgttttaaatatactgtgttaactcatttaactctcataacaccccaggagactattagcctcatttcacaggtgaggaaacaggcattgacaggtcaagtaatttctccataatgacacaagtagcaagtcgtggagccaaagttctagctttctgaacgtggtctttttaaaaactgcaagataacatctctcaactgtaaaagtaaaattaattttaagaaagaaaagaaaatactacttgaattccctaccttgctgatctgttcctagaccaactatggttaattaaaagttctgccatcatgaaaaacgctatgctccttgccaagccacaaaagtggatgtgtatttgtgaagggggagggggtggagatttgagggtatttcctagtattttgaatattcatgtgtaaaaggactttatgttatgtgcttgtgatctgctgctagatagtccataaagcagattccgtaacctaattgcattgacaacctccaccaaaggaaatgatgcacttacatcagatcaccactgcgtattaagaacaaagcctataaaaattgcattagaaacagcatagctctctgttttctaaattattttcatctacgccgttcacattcttcgagccttgcaaggaaaatctccttaattttcctagtcatttacatgactattaaatatactgatgcgacaaaaaaaatcacgctcctttactcactgttgcctttcacacatctttaccttgtattattaactacataatgacagttgaacattttcacgtgactttcttctgtaggagtttgtgtcattcacagcctcctacatttgctatcctatccattttgtgttttatcgttacctactaacgggattctggctttagtgggggaaggaaaaagagagaaatacttatgtctctttttgaacaattttttatttcttttcagacctggtaacatcaacattccctgggtatgataagggcgttagcatgcaggtttagcatttcctttcttgggactaataaattctcatatgctaaagtagtggcttttgagatctcagaccgctgcttcgaaactcattctaatgcaacagacctcctgggtcattagctgtcgccccgcgcaatctaggagttcctttttcccacacctacagcggtccactttctgcctgtcatggccttcatttctgaatctttttttgtaagagggggaggggtgttggttttgggtttggattgatacttggtagctgcagccacctttaaggtcctgatgcatcagggacagcatcactggtcttcccaatacgtgggtgaccggatcctaggctgtccggcctaggtgtcagcctcgctcacgggaagttcctcacccgcggccacagcgcttgcaccgtccccacagcctccagggtcctgcgtacccggcacgaaggtcacatcccccgcgcaggtgtgacgcgcgctcgcgcactcaccgtctccttggcagccgccactgggatgggcagcatcccccggccgcggggcgggtcctcgggctccgtggccgcgctctttgagggtcgcccggtcgccggcgagccggccctggggtccccgtacagctggtagcataccaggccgaccagccccccgccggccgccgccgccacgctcagctccccccagcgccgccgccgcctccatgccgcctccgccacagccctctcctcatcctctcgggaggagaagggccggccaggaaggcccagggtggtcaccgcaggccgcccccacggcccaaggaggggctggtgagcgcagagtggaggagacacccggggtggcggccacaagagccttcgcagcgcagccatagcggaggccgcccacaccagagctgggagggggcagagaacggaggggcgggggcgggggggggggtcgccgaaatctcgcgagaagtcggtgccgcgagcttcgcggccggccgagagcgacccctacactcgcgcggccccggggacccgcgacgccaccttcagcgtagcggtcccgtggttcggcccgggaagatcatggaagaggcggcggatcccggctgctccccggccccgaacccccagcccaaccacgcagtcataaataaccgcgccagcccggcgacacctggctacgcgacagcgcgacactgcgggcacagccgagtcagcgtaactgaggcgcggccgagtgcggggctctctggggcccgcgccgctgctacgggcggggtgggtctccgagctgggctcagcgcccgtctgggacactcacattccctaacggtctcctgacctcaggaaactcaaggtcttgactcaaggtcgtgaacgatttgcaattgtatcttcacatatacgacacaaatgaggtataagcatttggctcaagtcataacgattgcaaattaaggcaaacactttgacgactgaagggcagcttccggacttttgatgggagaaggctaatgctgttttttagaagcattagcacacccgcggtcacttaattcaacaaatcagaactgtcttgtgcatataaaagttaaaaattttaaaacttctgtgaataaagataaaatcttgaacgataccctgatttttcagggaagcgctgtttgtataaatataaaataaatgagaagcgtattgtgtcatctttttgtttttactgtactttttgtttgctatgttatcagtatcagtttttatgagaaagtgtagatgaagttcctatcagtttctctccccagaccccagttttggtaacttgaattatgttagctttttcttcctactatggaatggtgccaggagtccctaaaatattgtggatctaaggggacagacaactaaatacagtggtctcaattgggctgcagtgacaagagaatacaccatcagttgattctggcaattcttgtaaagactaaaggctttcagagacgaccaaatgagttttttctggctcaggtcctacaatttcttcccttttttttttctttttttgagacggagtcttgctctgttgcccaggctagagtgcagtggcacattctcggctcactgcaacgtccgtctccctggttcaagcgattctcctgcctcagcctcccgagtagctgggattacaggcacccgccaccgtgcctggctaatttttgtgtttttagtagagatgggggtctcaccatcttggcctggctggcctcgaactcctggaggtcctgcaatttctattcctaacaccttgcatgtaaatagcacatcaggtacaccctgttacctcttattttaatagaggttaatggcattttgctttcttaaagctgctaaaagcggtaagaagaaaaatcttctgtagcagatgaacaaattttgtgtattttaaaacctgtctctgagttttcttcagtttcagcctgtgggttttatggagtcaatgcctaaggaagactctgatagcgtcttgctttatcaccaaattttcctcaatttatgctttctctatattctgtgaaatggtagtttccccaaataaattatcttctgggtaataattatatatattatatataatataataatcatattggccgggcgtggtggctcacacttgtaatcccagcactttgggaggccgaggcgggtggatcatgaggtcaggagatagagcccatcctggctaacacggtgaaaccccatctctactaaaaatacaaaaaacttaaaaaaaaaaaagccaggtgtggtggcatgcgcctgtagtcccaactactcaggagcctgggacaggagaactgtttgaacccgggaggtggaggtttcagtgagccgagactgtgccgctgcactccagcgtgggtgacagagcgaaa

SEQ ID NO: 587629 - DNA, 4001 bp, Homo sapiens
cccttctgtttataacattataaataacagcttgccactttaattcctccagcctatgaactaatccttcatttcaacattaaattatctcttgatttaaatgttaggtacaaaaatccatctgtggcacgtaattccaaaagttcaaatttgcaataaaaaaagtctggactttcaagcccctttctctttttatctagaaaaataaagttgtatttttcaaagggttaaacctttttagttttcaaattgggttttttttgtgtaatttattcatacttaatatctgtgaaggtctttaactcttgataatagctcttactttttcaaatactttttttgtactaaccatgacttattacatgaagtcctaagaacagtttctataaacacagttatattcagaatatgcctttacacatggcatttattatgcacactctgtgtatcaattggttacatgaagcatgttcaaatactgtgcaacaggtcttgctattgtgtaaacacacactcccagcaaaatgacaataagcttcataatatcaacaatataagaaaaaaaatcacattattccttaaaaaattattcataattcgtttgagagttcagaggacatcagatctaatcaaaagaagtaaatgttactaagaccctcttactggctttgtatcccaccgtatatgtgataaagttgtgttacagcccaggtgtatacacgctttcattgatttattgcacattactggcttcagtgctgacttgatgacaggaagagtactttggcagaggtctgacaagtccctatccttaagttcccttttgctttgtgccgtctgttcccaaagctatcaaagtaaagcaaatgacagtctaaaacctccccgttttgccacgagagtgtgaaatcaaattaaaaacacacctcaaaactattacattgggccacgtttattttcaattggcgggggagggggaaagaagacacttaaaaagagatggatttcatgtcctctgtgtagccagatctagttacagtgtattaagttatgtctaaatgaaaaaaaaaaagattctcaagtgttttatcacaaagtaatgttattaaacacatctagtgttcccacgctctcctctagattctttgatttttaacctcctttgttaggcaccaaacactgggagaaagatttcaggaacaatacctaggcagcacatgatgccagggaattaattctgtcttccccgagctgtttatccatcataaactcaagctgccttatttagctacacggttgctatatgtaggacttctcttccctgggtgaaaagcatggaccggctacaattgtgtctttgagcgcgcagcatcgtgctttgtgctgccggggataacggattctgggtctcacacgcatccgtcacctaaaacacccttaaactgaaccagggtctccacagctggaagggaaacaacgtgctgggacccaggctgctctgagctacaaggatcccaggagtgaaggaaatgtttcagggagcagcccaggcagcggggggaggaagaaagccctcgcactcttacctccacattgaaatactgctccgttccgcagactgtagcacataaaatccaaagcaaggtttgcaagaaaaacacccccgaatgatgcacgaaatccaaccgtcttccagtgctgaatgtgagtaagatcatagtgaactgtgcttcaatggatggacgagctccccttcgttttctccctctctccctctccctccctccctcgtttcctttcaaaaaaaagtcctccgggtgggtaaggagcctgcaggttcacccacagccgggcaaggggaggagacaggggccccgcgctcggcagcccccgagaggcagcggcgaagacagggtcagcagtagttcctgttcaccatcctccggggtcagtcaccgggaacgtggcgcctaagttcaccggcggttccggctcaaagagcctagtcgcagccgcagcagcagcagccgccgccgccgccgccgcctccagcccgtgcgtcctcctcctgcactgcctactcctcctcctcctccgccgccgccgccgcccccagctcctgcgggaagggcctccgccgctcctcactctctcgcctctgcttctccttccctcctctcctcgctcccctccagaatgttcatccgtaatctacataactcctccttcccggggtctgcctggctctcggggcccttggcgcgcgcgcgcgcgcgcacacacacacacacacacacacacacagagacacaccgcgacacacacacacacacgcgcgcatacacacagcccgacacacacgcacgcgcgcttcttaaaggagacggctcataaaggattccccactacggtagggcgcaccggaggtatccagcccgcgacaagggccctggtttgagcacagctcttcgacagtatctcccatcccgcatccccgaggcaggcacccaggaacttgggcggctccattctttcttcccgcccaccctgccgcctcgcatctaaaaacgagtgcgcccctctccagccatgagctgggtggggctcaggctgcggaccctagtggggcctggggagcggcccaaccctggtcctggagagcggtcggcattcctgaggaagcggccctggaagaataggggcgctgggaatcagaggagcgcctggtcactgagcgcccctgggtggctcgggtcggtggccggggctgaccaagtttgggaagactgagatagcaaatcccgaacgtccaaaactttgttggggtcccgagcctgtggcctggtgtcttcctgaatcccctctaccatagctacattccgccttccaggcttgaggagtaggcacagggttttggtggcggactagacaaatacagaagcgggatgaaaacgctcactttccaagtgaacggtggacacacgcgcacagtgggacccgggagagatggtcctgggtgttaacaaaacatccgatgagagggatgggggcgctggaaagaaaccggctgcgggagccaggggaagggttggggaaagaaggagaagaagcagcctgaggaaaggcgagtaaagcagctggcaagggcgggaggaagaggctgctcgcagaccgagcgggggagaggctggcgggagctaggagagctgcaggcaagagggggaggcggctggcaagaagcacgggcgaacgcgggcagggaacttcagaggaggctgccagaaaggactggagctgtagcagtgcgaggcagtggacagggggggcagcaaccaccagcccttggcaagtgatggtttggctgaaagaggaagggggaagggagcgaggcaagcatctgtttgggggctaatgccagtaaatgtgcttctccttggcagccagcagaggggaagaggagcccacgggaaagaaaagcaggcgaggttaagaataaagagtgttccaggtatgacagctacctcggtgaggtggaagagagaattgacaaggcaaatttcatgggtgagttggaaaggcaagaagcaggactacaagaggtcctatgtggtaagcagatggaaaattctgagaatggtttgccaaaaattgtattagactgcaataacttttatccaataaaagaaaaaaaggctgaggaatgggactttgcagctgttgctgtaaaaatgtaagaaatgcccacccaacttgacccaagacccaagaagttctcagggagaccttcctgacagtctgccttgtgcccagcatgtgctgcccacaaaataattttgaagatgtaataaaaagcaatgtcttatattgtatagtacattagaatattcagaatgtttccagacatagtatctcatttaattctcacaccatctctgaggattttgtttttattttacagatgaagtaaatgatagcaataaaatataacgttccagcaaacc

SEQ ID NO: 587630 - DNA, 4001 bp, Homo sapiens
ctccctccttaacagtgcatgcacagcctctgcttcagggccttgccattccctctgccagccattgcatcagccttgctttccaccatgcacagaaactgctattgctaaaagaaagtcaaagctgtcccaatgacaaaatccaatcaccttctcctttaaatcctatgtaccaacatccattgttttgatgtctagagtgggcaatctagttctatttgtctgttctcttccatccaaatgttaaatttcatgattcctgacatcatataatctttaccttctactcctacattttcctctcacatcatataatctttatcttctacttctgagtcccaataccaggtaaaaatgacccagtttagaagtgttttagcaaaatgtttctactcattgcaatgcacaagttaaagatattacaataagtcatttatgatataattcctttgaatgtaaatgtacctcagtgtatgacttttatgagtgaaggtcattacaaacaagaagttttactggggggagtagtaggaaagcattacttatttttttaaaagtttttactgatttggtgtgggagcaactacaccattaatagttggaatttatgtggtaggtatgggatatatatggatttatagaaaattttgacatttctgcagtggagttctattttggacaaacttttatcaataacaaatttaaataaatgaaatactagcaatggaaagcaaagcacatgactatatgaataagattagttactaacagtactgagacaacaggtactagacttgtagctttgctaatgtgtcctagaaaaagcactggagactaaaggagtttttagtaactttattttctaaaactccatcctacaaatatgttttcttcgacatctccacttcctttaaaaacaaatagaatcagacaaaaacttatcttgaccaggttttcagtcagccgagttcagctttcaaagaggtgagatccaccaaaagcagccgcgcgctcggcctctgcgccgcgctgggtctccagcagcgctggatgacgtccccaaggcgctgcccggggagcgagtcctcgaagacggcagcggagagggacgggcgcaggtcgtaggccaccaccgcgtacagtatgtgctgccgctcccccgaatacggcgcctgcttggtagtcatttgccagagagtgatggcaaaggaataaatgtcggctttaggcgtcacgccctctcctttcaggagctccggggcgcggtgggtgtatgtgcctcctagagggtaagagggtgtctggaagcacagcagatcttccaacttctcagagcaaccgaagtcactaattttacagacatcctgctcactgatcaagatgttcgcgggcttcaggtccaagtgcacaatgctttgcgagtggaggaagagcaggccgttcacaacatctagtgagtacttgagacactttcccaaacttaactgtcctccagtgcggcagtgaggctcccctgcgtccccctcagggtggccggcggcgccatagatgacttggtgtaaagtgacgttgccaccgaactccatgatgatggtccctaggctattggaccctgcgggcgtgcgcgtgctggcagccaccacgcgcacgatgttatcgtggcgcagccttgctacgttgagctcagcccagaaactccgccgagatgctagtcggttcttggtgcacttgttcacttgctttatggccacaggaacaccgcggtaagtcgccttgtacaccgagccaaaccctccagctcccagcctctgcagcaagcacacctgctcccagtcaatggagcaccaggccagccggcgcggcagccgcggggcccgaggaagagtggcccccagaagcagcttcgcaggtagctctgagggactgctgcagggccgcgcgtccaccgatggggaaaactcgctccggaggtaggggcgtagggccaggggcgagggcatcgcactttgcagggggacaccagggccgctggagtgaatgaagagactaggggaaaccgcgggactttggaaacatgactgactactccttcgctccacctcatcccttttctccttttccttcacttgttccaaatgagctacatctgtgctgtcactcagcaagagtttttatcagatggagggagaaaccggaatgaagcacagctatccctttcagatgaaagcatttcccttccacacttgaagtgaattcttataaaaacaagctcatgccagacaaacagcatggagctgcctcagaactcacccctcttttacattatttcttaaattataataaaatacgtttttttcaagtctcatccgctgcacattatcagtcctcagactaaagagaccacaaagcacaatgaaattgtttcacactttgcaggctgtaatgattgttagtgtcattctccagctgcattaaatcacttccagcaggtattggctaagagttaaaatgcaaacagcagacatttgtttaaccaattacagggaaaaactaggtgcaacattcatatggataaaaaattgcaaccttaatcaatccaaatagaatcactgatacaggtcataacacacacctaaattcatcagtggaaaggagaatcccctgacactctatgcagcttacacagcaaattagcaagacatcttagcaacatactgacttcctaacaatccttcccttccaaggcgatttggcccaaccggtcagctcacttgcaagagagattctagacttcgtagcaaatgagttaccgaagttttgaaccagagttgggggagacaaaagaatagaaatgattcagagctgtgatcagggcttcaaataataacacatatgggagaattgtagaagaggaaaaatctgaagaaataaaaatggcacaaaatcactggtacctacatataatgtagaaaaccagaagttggaatgaaattcagggtattggccatcagacaataagatctttctttctgatttttataatgaaaattaattttctaccaagtgcagtgagttatgcctataataccagtgctttgggaggctaaggtggaagggccacttgaggccaagaatttgagacctgcctctacaaaaaataataataaagttagctgagtgtggtggtgcactcctatagtcctagctactttggaggctggggcgggaggagacttgaactgaggagtttgaggctatagtgagctatgatcgtgccactgcacaccaggctggatgatggagcaagatcctgactctaagcaaaaaattaatttcataccatatctttggaaaaaggaccaataatattaccatattcatgagaaaacacacacacacaaaagtgttaggatctatattttaaaaaatcaaatggtaaagttcccttcttctaaagcacttatgtgttaggttatgtgtaaccacattttaatgatagcagttctgtttttgaagtatattgactttgagaaggtaaattaataaacatgaaccatttacagaaacaatttgaggtctgtgaagccctggaataggatttctattctatacaacctgtgtggcttagtatgtgatctagtgtgtgtataatatttaacctgcttgagcctcaatcttttttttttttttgagacagagtttcgctcttgttgcccaggctggagtgcaatggcacgatctccgctcactgcaacctccgccacctgggttcaagcgattctcccgcctcagcctcccgagtagctgggattacaggcgcatgccaccatgcccagctaacttttgtatttttagtagagatggggtttcaccatgttggccaggctggtctcaaactcctgaccccaggtgatccacctgcctcagcctcccaaagtgctaggattacaggcgtgagccaccatgcctggccaactctatggaatattttagtagaaaga

SEQ ID NO: 587631 - DNA, 4001 bp, Homo sapiens
gactgggaggtcacagaatgccccacccacgcgtcaggtccaaggaaccttctctcccagcacagcagccacagaatcaacttccaaagtcaccaataaggctgatgaccctgggaaatgcaatcccacagcccactgctcacagtccaccgagaacatggttcctcaatacaggccacaccaagctgtgtcactggtgctcatgcaaacccccaaaaccaggtggcccctcaagctcagtgaagaaagcacatttctcatgatgggcagcagtccatgttctctgcacactggctaggagctcccaagagccacgggagcctttcctggtgctcctaccccaaagaaaccaagctgggtggaccggcacagacagaggatctctaccccaaataacccagctctgtgaaaggggggctacgagacagagggcagcaaccaggcttctctcctgggcctctgtggaccctgggaaagaaaactaagcaccagcacctgtttcctgacacaggagacagccacgaactcaggcaagcacatgccccacagcctccacctctgaccccctggtgtccctcagcagtcagcaatcaaccccagccagtgggaaatgacgaggtgcaggtctccacaagccacagcggcctgcacgtcagtttcaagttaacaaaaacaccttagcctcaggtcattccactctgacatcaaagagagaccagagacacctgttcacggggaccctgagagcctgagactgagcactgaagatcctgctgacggcagcaccctagggtgcccagactgtccatgcagccacgtcacaaacacgtaccacctatgaaacatgccgcaaacaacgattcccacacgcatctccagccctcgcctcgccgggacccgaggtcttcgggacatctccatccatggtcatcgcactgagacccaacagctctaaactcaactcaccaccctcacctgacttatcaccggccctaccctgcctgcctcttaccgcatcgtgtgcgttcaccaccatccccttccaaagtggtccctgcctacagggctgtccccgacccaactctgctcacatccctaagttcggccacacccccgtaccccttttctgcttacctcactgcacttgagtttatgagtctgtcccttccccaactgagcaggcaaaggagcccctccccagagtgtgtaggaccgagccaccagcgcccgcagagtggtttcctctgaccctcacactgcagctgcactgacgctgcccgaaaatccgaccccctaagtctcaccttggctgagtgagggctggctcccggcggccctgccagcgctatgcccggcacgctatgaccagtcatcctcgtgactagggacaaatcaccttcctgctcgcgatcgtcagagaatacggaaggcatacggaggcccggggcacgccggctttgcaggctccgggcgtatgcttggcttcccggagagaggacccccggtggccccgcctggggggagaagggccggggaccaccgcgctcccggggagggccgggcactggggaccaccgggctcacaggaggggcgggcaccggggaccaccgggctcccgcggaggggcgggcaccggggaccaccaagctccccgaagaggggtggtcgcgcggccgagacgacttagcggcgcagaggaggagcacagccgcacagctccggcctctcttccgggctgtggcgcggcgcacacctgagccgaggtccccgcgacacccaggaccctcccagcgttcgccctgtgaccttggggaggcgcctcctgactcggcttcctccgcggccccgccaagggagccgccccaggctcttcagcccagacttccccgaggggctcttccccagcgccgccgaaggctcatccccacccgccgtttacctgaggagccgccgccacctcggccggggcgccgccttcccgcccagcaggggcccggagtgggcggagccgcgcgcgccgagcccgcccccgctgccttctggccacccgcagcctggagcgcggcagcaggtccccgcccccgagcgatctctgcacttattggtcgggggcacgtctctcacgctcgctccaccccgcccaccttcatttgcaaagcagcagtgcgcagactccgcctcacgctcggccccgcccgtctgttgagcgacagttcggccgccacggcgcaggcgcggccttcaggctcgcgacagctacgccagccccggggtgctgcagtccccgtgtccccgtcggacgcatacagccctgacgacctccgctcccagacgccggggacgcgggctcggcgcggcgttgcggccgctcgcaagcacacgcccgccctggactcgcgcggcccgcccgccctctgtctgccccggaagcgccagctggaggccgcggcacccggaggggggcaggactcgcagggccctgcgctcgttgggaaagaggcgaccagcggggtcccgggaactcgggacgcgataagagcgatgtgaggaaggaaagcgcccgccgcgcgtccaggctgggcgtcggcagaggcggaggcggcgggagcagcgcgggcaggatgtccactcctggccggagggactgggctcccgctgtggggacggcgcccgggagagcgcagtaccctttgcggatgcgggcgcggcccctgcggcggcttcccacgcgcctgtggccttgtcccctcccggtctcggtgccgcccccgcctcacgcacaccagctgccgcgcgcagcacagccccactttcactccgatcacaaacgaacgccagcccctccgccaggggcaggcctgagtctgtattttgctcccgagggctgcttacaaagccccgcacgggacggctgcccaatgaagccccgggaatggactcaggtgcaggcaacgacgcggataatcgagactgcaaagggagggtggacagagccaatggccgttctgatcctgcagtcatcacttggcttgacactcgcgggcttccagctgtgtcctgccactggtgggagcggaggtgtgccgcaggggccgcaggctcccaggctccgcagcagagcccagaggctcagccaccctgggtcgggaccacctggctccggttctagagtggccgcttcttgcagcccccaccttcgacgaactccaccctgcccccgtgcctctcaagcccttctgacacttaagcaaccaatcccacctgcttaaattgcctggcgcagtttctatttttttcctaatgaaggggtggcctgcccctccacacctgtgggtatttctagtcgggtgggacgagagactgagaaaagaaataagacacagagacaaagtatagagaaacaacagtgggcccaggggaccagcactcagcacaccaaggacctgcaccagcaccggcctctgagttccctcagtttttattattattttcattatttcagcaaaaaggaatgttgtaggagagcagggtgatgagaaggtcagcaaaaaacgtgagcaaaagcatctatgtcataattaagttcaagggaaggtactatgactggacgtgcacttaagccagatttatgtttctctccacccaaacatctcagtggagtaaagaataacaaagcagcattactgcaaacatgtctcacctcccaccatagggcggtttttctcctagctcagaactgaatgtacaatcgggttttataccaagacattcagtttccaggggcaggcaggagacagtggccttcctctaactcaactgcaagaggctttcctcttttactaatccacctcagcacagaccctttacgggtgtcagtttgggggacagtcaggtctttctcatcccacgaggccatatttcagactatcacatggggagaaaccttggacaataccctgctttcaagggcagaggtccctgtggctttccacagtgcatt

SEQ ID NO: 587632 - DNA, 4001 bp, Homo sapiens
ctagctcctctatttgtaggctacatggcaaaaagtgtcaccagtcaaaggcttgcagtgaggccagcacacagttgaacaccaagagcatctgacgtgctgaggacaggggctactcggtgctggtgccagtagcagaacctgaagaacggccccaacaagcctcagtggctaaacatccacttttccacatctatctacagatgccctcgtactagtacacacacatgtatataatggggatgtcagaaaaaaacacaaatgccaatcagggctctggttaaattaacaaaaagcaaacgaatgggagaaggtggcaggcagggttgatagggtcttctctccctacatagcacacatttctgtgtgaatgaaagagctgcttccttttcatttaattcaaccacatttagtaaacacccgccagtcaccatcccaggcccagagttcctgtcttgaaagccctccggccacaaaaagtatatggctgccacacctgtgcccacaacagaggtgctgcactgggtccaaaagggttaggagggggtgtgcgaggctgtgcaggccacaggaatcaatagcccagaagcagtggtgagccagcctgcagggctgggtgtgtgcagggagactgggaggtcacagaatgccccacccacgcgtcaggtccaaggaaccttctctcccagcacagcagccacagaatcaacttccaaagtcaccaataaggctgatgaccctgggaaatgcaatcccacagcccactgctcacagtccaccgagaacatggttcctcaatacaggccacaccaagctgtgtcactggtgctcatgcaaacccccaaaaccaggtggcccctcaagctcagtgaagaaagcacatttctcatgatgggcagcagtccatgttctctgcacactggctaggagctcccaagagccacgggagcctttcctggtgctcctaccccaaagaaaccaagctgggtggaccggcacagacagaggatctctaccccaaataacccagctctgtgaaaggggggctacgagacagagggcagcaaccaggcttctctcctgggcctctgtggaccctgggaaagaaaactaagcaccagcacctgtttcctgacacaggagacagccacgaactcaggcaagcacatgccccacagcctccacctctgaccccctggtgtccctcagcagtcagcaatcaaccccagccagtgggaaatgacgaggtgcaggtctccacaagccacagcggcctgcacgtcagtttcaagttaacaaaaacaccttagcctcaggtcattccactctgacatcaaagagagaccagagacacctgttcacggggaccctgagagcctgagactgagcactgaagatcctgctgacggcagcaccctagggtgcccagactgtccatgcagccacgtcacaaacacgtaccacctatgaaacatgccgcaaacaacgattcccacacgcatctccagccctcgcctcgccgggacccgaggtcttcgggacatctccatccatggtcatcgcactgagacccaacagctctaaactcaactcaccaccctcacctgacttatcaccggccctaccctgcctgcctcttaccgcatcgtgtgcgttcaccaccatccccttccaaagtggtccctgcctacagggctgtccccgacccaactctgctcacatccctaagttcggccacacccccgtaccccttttctgcttacctcactgcacttgagtttatgagtctgtcccttccccaactgagcaggcaaaggagcccctccccagagtgtgtaggaccgagccaccagcgcccgcagagtggtttcctctgaccctcacactgcagctgcactgacgctgcccgaaaatccgaccccctaagtctcaccttggctgagtgagggctggctcccggcggccctgccagcgctatgcccggcacgctatgaccagtcatcctcgtgactagggacaaatcaccttcctgctcgcgatcgtcagagaatacggaaggcatacggaggcccggggcacgccggctttgcaggctccgggcgtatgcttggcttcccggagagaggacccccggtggccccgcctggggggagaagggccggggaccaccgcgctcccggggagggccgggcactggggaccaccgggctcacaggaggggcgggcaccggggaccaccgggctcccgcggaggggcgggcaccggggaccaccaagctccccgaagaggggtggtcgcgcggccgagacgacttagcggcgcagaggaggagcacagccgcacagctccggcctctcttccgggctgtggcgcggcgcacacctgagccgaggtccccgcgacacccaggaccctcccagcgttcgccctgtgaccttggggaggcgcctcctgactcggcttcctccgcggccccgccaagggagccgccccaggctcttcagcccagacttccccgaggggctcttccccagcgccgccgaaggctcatccccacccgccgtttacctgaggagccgccgccacctcggccggggcgccgccttcccgcccagcaggggcccggagtgggcggagccgcgcgcgccgagcccgcccccgctgccttctggccacccgcagcctggagcgcggcagcaggtccccgcccccgagcgatctctgcacttattggtcgggggcacgtctctcacgctcgctccaccccgcccaccttcatttgcaaagcagcagtgcgcagactccgcctcacgctcggccccgcccgtctgttgagcgacagttcggccgccacggcgcaggcgcggccttcaggctcgcgacagctacgccagccccggggtgctgcagtccccgtgtccccgtcggacgcatacagccctgacgacctccgctcccagacgccggggacgcgggctcggcgcggcgttgcggccgctcgcaagcacacgcccgccctggactcgcgcggcccgcccgccctctgtctgccccggaagcgccagctggaggccgcggcacccggaggggggcaggactcgcagggccctgcgctcgttgggaaagaggcgaccagcggggtcccgggaactcgggacgcgataagagcgatgtgaggaaggaaagcgcccgccgcgcgtccaggctgggcgtcggcagaggcggaggcggcgggagcagcgcgggcaggatgtccactcctggccggagggactgggctcccgctgtggggacggcgcccgggagagcgcagtaccctttgcggatgcgggcgcggcccctgcggcggcttcccacgcgcctgtggccttgtcccctcccggtctcggtgccgcccccgcctcacgcacaccagctgccgcgcgcagcacagccccactttcactccgatcacaaacgaacgccagcccctccgccaggggcaggcctgagtctgtattttgctcccgagggctgcttacaaagccccgcacgggacggctgcccaatgaagccccgggaatggactcaggtgcaggcaacgacgcggataatcgagactgcaaagggagggtggacagagccaatggccgttctgatcctgcagtcatcacttggcttgacactcgcgggcttccagctgtgtcctgccactggtgggagcggaggtgtgccgcaggggccgcaggctcccaggctccgcagcagagcccagaggctcagccaccctgggtcgggaccacctggctccggttctagagtggccgcttcttgcagcccccaccttcgacgaactccaccctgcccccgtgcctctcaagcccttctgacacttaagcaaccaatcccacctgcttaaattgcctggcgcagtttctatttttttcctaatgaaggggtggcctgcccctccacacctgtgggtatttctagtcgggtgggacgagagactgagaaaaga

SEQ ID NO: 587633 - DNA, 4001 bp, Homo sapiens
tcaccttcttgaagaactgatttaaatcctcaccccacacttccccctccccaccctctcttttttccgtgtcactttttgccctgtaacatcatatcctttactttcctgcttctggtctcactggcaggtctccctacctggaatgtaaggcatgagggcagggtctttatctcttttgttcccagcagtatccccgacacctagaacacctggtccacgtagcaggtgctcagcaaatactggcagaatgaatggagagcttcatagcaggtgatgtatccagagccaccaccggccctgtcctgaccttggacatggcattgtgacagccctcccacctctccaggatccagtctgtcccctgtaatcatcacaccagatccagcttcccaaatgccttctggtggaccctgtgaggctctgcttccctggcccctctgcccagagcatgtctccttctcctcctttctttctgtccctttgccagggctgtaggaggatacccaccaggcttctccatcccataactgcagcagagggttggagttgcctgagaagctgcatttctgcacatctgagctttgctgtctgaagagctctagagcctccgtcctagatatcacgtgttctgacatctcctggcatctcagggccagggcagctctggggaggccctcagaccctgctctcttgaccttgagaggtcaagacacagtttaccccttctggaagccgcctccttcctgtggcctctcagaaaactagccagttccctgatcctggaaagggtgaccttccagacaaacctggctggggcccactctgggagtgggagtgaggatcccgttggagctagagcccggcttcccccaggcacagcagtggtaacagcatgggccgcaggcaccagcgaggcctgtaccttgcccctccaaacccacatcacagcccctgtggcttccagagttaaatgcatttttaaaaatagaaaaacgatgtgaacacactattagcaaacatctgcagaggagtactcttggcttagcagcaacagaagctatggcagagaagggaggcctgacaacattcaaacgtggactgcgagagccggaaatacctgagttcacaggcaggtaccaagacattcctggaacagccaccgtaggcagcgtggattgcaacagggaatcctgctctgaacccatggcttggctgtgggccccagcccgggtggacgagtgtctggacagcagaacctgctctgagtccccatagagggggcgggcagggctctgggctgggggccagacagctctgacctgcgtatcagacacaggaaggtagagatgccctttgtgtctttccaggttcctgggacactggggttccctggggaccctggaaggctgtggaggaaccttcctttattcatgtcccttaaatctctgcagaaactctggctgtggtatcatctcaattctgctgaatagaagccgaggcccagagaagcaggtgaacggtctgtccatccattcactgacccgttcacacagcctgcaggcactgttggcaacacaggccatggtccctctggccctcacacaggtgcaggctatgtgggcaaggccctcactccagtttaagcttccgccctcctgacctcctctcctccaacctgatccccactccaacccctgcaggctgctcctgggggcaggaccctccttcctcagcacaggggcccctggatggcctgcagggaggctcccctgacagatgaggaggctgagtaccggtgggggggggtcagggggtccctgctggggttgagctgacctggagttttgggacacggctgacgacactctacccgtcggggtgcagctgtatggcctttcagaacactgcctgtccatggttggggtgcagtgcagacccacaggagctcaccactaactctggcctcacgcctgtgggccggccctgtctacggcactggccctcccccgccctggcaggcctgacctcacccctgaggtcacaatggttccagtgtccacagcatcctttctagggtctgtctgtgttgtggggacagcaggtgtgcgtgtgtgcctgtgtttgtgggtgcgtgctcagacgtgggtcctcaaggggtcccgggcctgccccttccttctctgggcctcagttgtctcctgggagacccgtggatgatccggcttgggccatttgtttgctaagtccaggtccctgtgtgggtggcaggtcccggggctggagctgtgacttcccctctgggtctgagtgtgagcacgtgcgatgcgctgggctcccctctgggcgtgagagtgagcacctgcgatgtgctgggctcccctctgggcgtgagagtgagcacctgcgaggtgctgggctcccctctgggcgtgagagtgagcacctgccatgtggtgggctcccctctgggtgcgggtgcttgccgcttctgggatcctctccagccgaaggaaccaggagcggggagagcctgggagctcagcctgtggggctgggcaggctgccccgaatcaaatccagccccctctctgctgaccgcgtgcccgggaacctcgccgtgcctcgctgtgcactcctccccgtctgtaagactggagcaggaccgagggtcagagcggccgctgtgggcctggccctgctcaccgccctgggattggggtggagctcagagagggccaggagccagcggctggtcgcacagcaatcagtggtggagatgagcctcaaactcaggtccccagacccgagtctagggtgaggacgaggcccctggagcagtggcaccccctccctccccgccgcctgctccgcgacccggcccccgcgcggccggcagatggcgctgcgggcccaggcaggactcgcgcggcaggagggccgcggcctggacggggggcctgtgagaggcgcacgtgccacccagcccacgcgccctccccgccgcaccctccctccagccagggacccgcagaaagggcgtcatgggtaggggtgcctggcatcccaccgccttaggcctggggctgcgggcactacccactgggggcagtgaagccggagggcgccacgtgggtcccaccacctagactttgcctaggccgttccccctcctgctgttcgcctgcaatgaggaaggggccagactcaagggccgggcagccccctggcctcccaggctccttctctgtgtccctgcccaactccccggggttcctaggctgcagccaggtttgaggctttgtgcagtgccttcctcctggaatgcgccctgccccccactttcctagagaaactcatttttgccctttcctatttgtccttggagacccccgcccaggccacctcctcggggaagccaccctgatttctttgggctcccatagcatttattctcgaggcggtttgttcaaccttgctgggcttgactgggcggcgggatggtgggggctgtggtttgactggaggtgacaggaggggccaggtggacacccatgccccttgtccagctgggtcccacctccagctcccctggctgctgccccaaggcctgactctgtgaatttcccttcccaggagacagtggccctgtttgaccagtggacacccccacagaagacgtaaacataagacctgaagctgtaaaactcctagagggaaacaggggaaatgctgtttgacatgggtcttggcaatgattttttggatatgaagccaaaagcacaggcgaaaaagcaaaaatagacaagtgggactacaccaaactcaaaagcttctgcacagcaaaggaaacaacaaaatgaaaaggcagcctacggaatgggagggaatatttgcaaaccctctctctgataaggggttaacatccaagatatataaggaactgctgtcactcaatagcagaaaaccaaatcagccaattaaaaagtgggcaatggatt

SEQ ID NO: 587634 - DNA, 4001 bp, Homo sapiens
acgcatgggacattccaggagcagttacctaggtgcaaactccctatgcccatcctccccgctcctcgccaccccccacccccgcccccaccccctggtaatggctggagccacctaccgccagtgcctggggctccggccccgaagcacccttcagcgcccacagcagttgcaccagcacctgcccatttacacgctggttacggcttaggctgcgccagagctcggctgctaccctgagggtttggagggggctggtgtgagacaagagatgggtgggtgtccagggaatgtagggagtccccagccagggtggaggcagccagtaggactccagcaggggaggggcaggaaacccctcccatctccccccatccccaaatctcagagaaacaaatgaagggttaattgtgcagaccacaacatagcctatctcaagctgagctgcagggtggggacccactgggagtcccgttgggtcagcgacagtgaaacaaacctggcattattaaaaagaaaaaaattgccacagagaataaaaccaaagataacttctggggccaattaaccaaagagccaggggtgtccaggcacgttagccccccagcctcattcaccccactccggagccaaccccaggacggtctccaggggaggccacccgaagatagaaggtggctccaagagaggagcccagcatcagaaactctgtggcaggagtgtggggggagtttgcggagctaaaaatgaggggagcgggaatggatacggggcatgagtcatcgcggggctggaataaggaggccctgccccttttcagctccctcttctggggccagactccaccgccaagcgggaagagggaaggaagccgcgtggggaccgcagggccaggacggttgggttaccgatcggcgggcagagagcggggtagcagcgcacacaccacgtcccgcgcatgctccagggccagtgcgctcagcactcgcagggccgccctccagggcctcccctccgctaggctgggcacctgcgccagcagcccacgcaccagagcatgcacctggtggggaagggggcagacttcagcagtcaggcctcctccaccgtccattcccctctggcctgcaccccacctccacccccaccctgatcccgcctggcaggagcagcctgaagatggcagggtcaggctgcgctctccaggcccctcccaccaccttggtgcccgaaccggcaggattctgtagggcatgaagtgggtgaaggctgacctggtcctccaaccgctcgccccgggcctccagggctgaggacagggtgagcactgtcgcctgggtccctgcaaagccagcctcctccaggcaggcagccgtgtacaacgcgaggtcggcaagaactccctcctcccaggaactctggggaacctagggcaggatgggtggggcgtctgaagtgcccaaacctctcctagctctcctcctggtccctcggcctcccacctggcttcctacaaaatcccttgctcctctgttgctcaccagcctgtttcacgctgacctcccccggggccagcaccgcccccctgccaccccgccttccacctaccatccacaggacccccaggccggttcgcacaacatcccttccctcccccgtcacctggtggggcccctcaggggctggttccagggcactgttgagggagcagggctcgctgccagcttcagggacggtggccccacgtccaggctctgcctcagagggggcggtgagtgcctgggtctgtggctcagcctcaggtttgacctcccaggacttgggctgagggcctgcggaagggggtccctggggctgcccctgcctggcccggattccttcagtcagtgctgtcagggttagagcccccacgggagcctcccgggcccggctccggccccacacacccccagccatggcggcccttgcctgcagcacctgccgctgctcctcctgcgaagttgtgcccaggactgacctagaagccgccccgggcgggaccacggacgggcgtggtggcgtgcgctagcgtgagcttgcgggggctggggagccacacggacgtgcctacaatgggcctttgaggggccctcctgcctgggctgctggaggggagtggccacctgcagcctgagtgcctgtggtgtggctctacccaccagggccctgagaacaggatccccaagagctggcagatccacgaagaaagggggagaagggcccccaccctgactaccagcccctgttgaccagggagctcagggcagttgtggacagctctgaggaggtcctcgcagggtccaggagtctgggccccaccctgagtcgaggcctgattcagcccccaagcagcagtcagctccccactgggcctggggctaggggctggccccgccccctgcacgctggctccgccccctgcacgctggctctgtcagacaccttgcaacaggcatgactgggtgagcttggggcagcccggaggtgtggagggggcagtgaagacaccagaggagcggtggcccctccagagcttgtgcaggcccctctgggtcctgggtccttggccaaatctcatgttgaaacgtaatccccagtgctggaggtggggcctggtgggaagtgattggatcctgggggcaacttccccctttggtgctgttcccatgataagacttctcaagatctggttgtctggaagtgcgtggcaccgccccaccccttcctccggccatgtaagacctgcccgcttccgcttccaccaagatggtaagtttcctgaagcctccccagccatgcttcctgtacctgcagaaccacaggccaattaaacctctcttccttagaaattacccagtctcaggtatttctttacagcagtgcaagaacggaagaatacagccactctggctgggcccctcggagtgcgcgggtgccctgggggtgcctggggtgtggtgtgttctgtccaatgtgtgtgagtctgtatctctctcctagctcgtactccccggggctggctggactgggcctctgctccaagtccccaccctccaccctcagccaaccacacagtggtgctgcccaccctgaagcccggggagccaggtgagctggtctggtggaatgcctgggcagacggaagtgccccaggcggtcagcattccccccacacccttgcctgtctgtgccacctcaggctgcttcgacaagagaggcccaggcccccagcctccacttcctgccaagcctagaacctctcccccaagcagttcctcttgaagctcacgttgcccaaactggcggaaccctgagatcaggaacttgctggtgcagaggcagggccagcccagcacagccacgtgcagtgccactctggccaggtgtctggggctgagtcatctcctggagcttcaacttcttccccattcttcctctccttccgtgggctgctgggtcaggagctgtgtccctgacgccagatgccagggtggtgctgggttggcagcagcagtggcaggagacacctgagcactcccttttgacttggggagtttgagacgtcttcactgaccctgagcctggggggcagtgcctaggcaggcgtgggagcccagggccacggctggaccctcttacctggcactacccccaaccctgtcctgtccccagcctgcctctagcaaggaaaggtctgcagcaactccctcaactccaaggcagacaccaaagccctccctgcctgtggctttgtagttctagtgtgggatctgactccccacagcctacccaaagccggggaactcctcactgcccttcgggcttcagcacagggctgtctcccacgccggcagggcctgtgctttcactgggatgcaaatcttcctgctacctcgagctcagattcccgactccagcccagccgcagcccgggaggcgcagcccgtgggctgggtgaacaa

SEQ ID NO: 587635 - DNA, 4001 bp, Homo sapiens
tttctacaattaatgtcaacaatttctttgaaaaataactctattgctaaagaatttttgttttcatttctatttctggaaaagggttgttttttctaatcattctgcaaagacaaacacagtaattattccttcctggtttcctgttagcaatatgacttacgttttgttataaatatcccaaagatatatttccctttacggtatgacttttttttttttttttgtataacacataatagaatctggaggggcaatgagaagcttgtaagaaagtagaagctgtttatgaaggtcttcaaaaacatttagagattattaggtacattatattgaaagctgagtggccaactggaaactgaagacgattcaggagttcaattcctggggagagttaaatagaacaatgtagttgggaaagtacagatgggtgatgtggaataaatttcaactttaaaaagttgcctgaaataggtatctttaggttgcctcaggaatagagcattgtttttacagtcgtcatcaatgtattcaaattcttagaaaattctaggccagaaagatctccaccagatgctttctctatgcatatacacaagaggctaaacaatgctggaaaaatagaacgaggctagctggtcttattttaaatttacttatcacaacctcaaactagtctacatataagaaaaaggccagtttttgtccccatccattgtagactaatagtttgatacttagaaaaaaaaaatttttaatgaaaaaaatacaaatgctgggcgatgtcagattgctgaaaaaggttttaaaatttttattttacttcctgtatttatctcatcacagacaggcaacaaacagcccaaggaaggaaccatacttggagcggcactgagttgagagtcatcttagaccgatataacccaaactaactcctattcttccacctgaaacctggttcaatctcagccttccctatctcagttgatgacacaccctccagttggacaaaccaaaaaaccttggggtaatccttgtttcttcttttgctgttggcctatactcaatattcaggaagtcctactggctccaccttcaaacaaaacctgaccactttcaacacactccatagtatttctagcgtggcctctgcaccatcacgtctcgcctggattactgtaacaccctccaaacatattctttgcttctgtcctctactaacccctatttctgaacagtctattctcgacccagcagccagagtgctccttttgacaccaggtcagatcctgttactccgtggatcaaaaccctccaaaaggtccccattttactcagtcaaaaaacaaattattgcaagggcctacaatgccctatgtgatccaccttattacctctccgatctgctctaatcctcttccccccgcccccccaagaaagacatgaaaagggcagattgaaaagaagaggggacgagtaacagacgaacgacattaagtgcttgccagactgacgaccctcttgtgctttcccaagtcacctcttggccgagggtctcggcttccctgccgccccagcttcactacttaatctgccggaaccaacgctctccttctgccagtataatgaaccccatcaagccataagagtccgagctcacctggggcgccctagagaaactcgacatattcctctactagcaggaccgtacgtccttctcctagtagccacgccgggtcactcagccttactggcccggcgggaaacgctaacacccaagcaggacagttcctagcccgtcgagcacttgtcggcttctccctcttcctcgagtttcctccagtcttctccacggcagcaatttcgtcatgaaaggagcatataatgcagttatttagggaataactcccaaaaatatctcgcttggtggaaaaactgcggaaaaccgacggaggacataatttccagccgacctaaacgaagggaaccggaaatgcgtcatagcgcgcgtctgtttggatgtggaagccgagacctaaagttggggggtgatctctgaggagatggatcggtacctgctgctggtgatctggggggaaggaaaattcccgtcggcggccagtagggaggcagaacatgggccagaggtgtcgtcgggtgagggtactgagaatcagccgggtaagcgctgggatgagaaagagcgggaacggcttgtggagaggggaagaagtttgagttttgtgatcaagttctgctgaagagggatcaatatgtagttgtcccacgaagctgggactctatctgggatagagttaatgagggctgcaaaaatagcatcttcatggaaaaacagggacaaatttgtggatgcaagattccagcccttagaagttcttggcatagtaaatgtttaacttaataaattttctatgccttagtaatggaatttcctgctttttggaaatatatgcatttattatttctgctcctgtgtttcacatgcaaataatacggaaaggagcaagatggacaaagatcttgctgtcctacaatttacatctaatgggaggagacatcccacatataacctaagttttaaaaacaaatgatgaattttaaatgattttaattgtttgcgattgcactgctttttggtgcacccgtctagattcaatattgcattttatgtgttcatttgtttcgatcaaacaggcattttgaggagtaaatgtatgtggttgtgtataaggtattgtcacagaatttcccttctctttaaaattattcttttgaggggaattttgcattcgtgctaactgactggcatgtacagatcgggagccttttctattttctctgattgctttagattttctgtatcaaaacttgaacagatcttgagcagcgtttagtacttttatgtacaacctactggtcttgagagtctctgatggtgaaattggactaagttagattatgtaaatctagagccctttgagttagtctatcttttctttttcagacttcacagcagcaaatgtttatcacctcttgaaaagaagcattagtgcttcaattaatccagaagatagtactttccctggtaagtataataaactcctcttttctctggcacagcatttgtactggaaattaacttaattaatttggaccctaaggagtacaaggaaatacttcttgactgtgtacaaggcactgagttacagagataactaagggagtacaaaactgaaaaataaattacccctttcttctagatgcttgaatatagtaaagttatgaaaattattctaggttctcagcttgaattttgctccttttatgaaattttcttgcctatcttagttctgtataactaaggggagtgtggctttatgaggatgattttatcatgagtaaaaatatgtaaagctcccacacggatttccttaccatttatttatttatttatttctgttcttaattacctatttctgttctgattctcttaaaagtacttaataattactaaacacgatgagcttttctcagttcttatctgctttgactttttgaagtatttcgcttttttgaccaaccgtactttgtaaaaatctttcctcctttagcttctactggcattatacaaatgcatttactgactttgatagttatcttttcttttattcctgcttcttgtcctttactggagaatgtcctttaaacgttctgaaaatggagatgccaaaacagaccaatacctaaaaactgaaggaagtttctttccatgcaaggaagggtctgctccttttgataattttgtagttcccgtgactgtacaatctgcacctttctcttctttcattagagaacctcttgtctctcggtgtcaaataacaccattggggaatgatttctaatatgtgtatgctactctagcttgttttccaaggcctagtaatactcattaattttcaagttggtataattttagtcaa

SEQ ID NO: 587636 - DNA, 4001 bp, Homo sapiens
acttctcgaaatcaactcaaagctttgtcttgtgttttcctccaccaattttatttaactaaacaaaaccctcttgagtgtaacacaaacatgtaatactgcttgattttgggtaatgaaaacaaacctgtaccacctttgttccactaaaaattatttccctctctaagcatttacttcacttatttacacaaataaatctgtggaaaatttaacttactatggagctcaaagtaataatggtagttatcatttattaggtgactacagtgggccagatttttatgtatactgtctattattgctcactcttttaataaccattagagctggcattagaatctccattttgcaggtctaagtgcagtgtctgggcctcttttccttttaataatccaggcaagatttcattaccaaaaaatggttcaggggaacagtagcaaaagtttgcttcaaagtgaatttacaatttccaccaaaatttctaccaaactatttttaggtgctttttaatggaaattggggacctgtactttaaaaagcaaagcaaccttacctatgtccttcgttaaacccgtattttgggattcggatgtaaaatggagtctggcctccctcaaagcccaagcggggccgggttcctctttgcctttctcctttatggcctctgccacattttctacctcttctccgacctcttggtcttctctcctgcaaggaaaaaaaagaattttatgaatttcagatgcatttctaaaaactgcatttcagctcttcactttttgttatgctgttcattcatccagcccaccagtgctagctaacactattgtgtcaagcatgtcctagttgctcaaagctccacacactctgttagcatctttgcctctaaagacatagctaattcttgtaaccaaagtccaagtgtgtttcaaaagcaaaaagtaaaggttaggatggggataaggtttttataataggttgaaaccgaaaaaaatcctagaattaaatattcacaacattttaaatgataggcaagaatttattctgaaattaattgtaaatatgcaaatgttattcataaacctgtaattttatttgaaaactgatctgttgaagaaaatcttttccttaatttcctgtcatttcacgaaagcaatgaactgactgttaaaatgacagtacattgtcaactaacagcttttctagctctatttagtcaactgcagaagggacagctgcaattcagatctttccaatgaacataaagatacaccgggaaaacatttcattttaaatccaattttgaatgacacaaagactttgtagtttcagcgagtcggcttctccgcctggtatctttacacttgtaaacataaccttattaagaactgggtgcggccgggggcggtggctcacgcctgtaatcccagcactttgggaggccgaggcaggcggatcgcgagctcaggagttcaaaaccagcctggccaacacggtgaaaccacgtctctactaaaaatacaaaaattagccgggcgtgatggcgggcgcctgtaatcccagctaatcgggaggctgaggcaggagaattgcttctgggcgacagagcaagcctccgtctcggaaaaaaaaaaaaaaaaaaaaaaaagaactgggtgcacgtggaaagattcccctctgggcagtaagggagaacaggcatgaggcaatcctattttcatcccaacactctcctagaaagggcagttctcctaatgacagggagagaagggccgctttcatcgcccgggtccccagcgcttccccgcaccgccaccacccatttaccggtttcttggagccgggattcggctttaagttggccaggctcacacgcggcaggccccggagtaggtccagggcccgggccccaccgccctgcaagggaccggccataacccgcagatccaagaactttcaagggcgccctgagctgctcggaggccacgtggtctcgggggctgctttgtggccgtggccccgcccctgtcgcgctgcagccgcgcgcgcaagcccgggagtcgggcagaggcgtgggagtctgcaaccttgtctcggttgtccttttagttgtttggggatgtgatcttattttccgagatcctgctttgtcctcggggtcccttttaatattctgaacgtaaaaccttctctttcgccaaacgagagcatgcactaaaaacactgcgttaaataaaggatcttttttgagtcagtgttgggccttgcctgtttgtctaggccgtgtcttctctgaggtcaatgcagaacccagagtaaagcaaagtgagctgtcaattattagcttttgagcttgcgtaattatacaccgtgaggtacgaaaataaaactgagtgcacctatcaaaatgcctggctaataaccaatctttgaataagactcaaagtgtgaactctcatccgtgtgcatctgtattgttttgagtgaatcgcagttagtaaccacctattgttaatgactggcgccatactgaatgcctggtgtatgccagacgctgtattaaataagccttactcgatttacagccattctagaggtaaatggtgttactacattttacagttacaacagggaaggcttagcaaggtccgatagcttgaccaacttcttgcaacaagcggcagagccaggattcaaacgtacactgcttcctactataaaagtagtatttttagaatgtaaaattgagtatctgcatcacaaaatacgaacattattactcgaaaaataccagctcttcttttttctctcaagtgacttaaatatagaaaagactgttcctttctttttctttcttttagtagtggtttgacatttcacttgctggggagttttttctgctagctctaactagtaatcacaaataatgaaggtgagacaatttttggagggcgtctgtctctaggtataactgcgtctttttaaagttcctttaaatcaagtgtaaaataactacataaagaaaaagttgtattcattccttcaagtactatttataagtaagacactgaacttgttggaaatacacatggatgaactcaaataggatttcattcccaagttgtttgaaatctagtagggaacagtttccaaaagtgaattattattattattattttgagacagagtctcgctctgttgcttaggctagagtgcaatggttcaatctcagctcactgcaacctctgcctctctggttcaagcaattcttccgcctccgcctcctgagtagctgggattacaggcgttcaccagcacgccccgctaatttttttttgtatgtttagtagagacgggttttcgccatgttggccaggctggtctccaactcctggcctcaggtgatccccctgcctcggcctcccaaagtgctgggattacaggcgtgagccacggcgcctggcccgtgaatgttttttaaaagttaaagataaaagtaggcctcttgtagactaattagcaaaaacaaaatatgtgagttcgataaaatgatatgatggtaaagtctagactctatttagaagcacagaagaaatagaatggggtgtggggggcaatagaacctattttctgcctttaatgatttttggtttgtttgtttgaaatggaatctcactctgtcgcccaggctggagtgcagtagcgccatctcggctcactgcaggctcctcacccaggttcaagcgattctcctgcctcagcctccccagtagctgagattacaggcatgcaccacaacgtacagcttttttagtttgtttgtttggttggttttttagtagagactgggtttcaccacgttggccaggcttgtctgaaactcctaacctcaaatgatccacctgccttggcctcccaaagtgctgggattacaggtgtgagccactgagtccagcctgcctttagtgatttttaattcagtagttttcattgtgttt

SEQ ID NO: 587637 - DNA, 4001 bp, Homo sapiens
agaaatagaaaaactcctttcctatacatatatttggaagggagcactgaactctatgtttccaaccttactgcacttaactcttatggccttaccttaaggatggatctaaaatccatcccttaggtggcttcaggtcaatcatcgctattctgctagtattttatgacttctccatatatggtagaaagaataatgccccctccccctacaaagacatccacatcctaatctctagaatttgtgaatatgttaccttccgtggcaaaggagaattaactttgcaggtggaattaagattgctaatcagctgatcttaaaatagattatctagggaggccaatgtaatcacagggatctcaaaagcagaagacgggcggggggggcggggccgggcggggtcagccaggccaggtggctcacatctgtcatctgtaatcccagcactttgggaggccaacgcaggaggatcacttgaacccaggagttcaagaccagcctgggcaacatggcaaaaccccatctctacaaaaaaaaacagaaaaaacaattagcccagagtggtggtgcacacctgcggtcccagctatgaagcaggaggatcacttgagcccagggggtttagcagtgaactgagatcatgccaccacactccagcgtgggtgacagagcgagaccctgtctcaaaaaacaacaaaacaaacaaaaaaatccaaaaaacaaaaaagtagaaaacagaggcagaaaagacaggccaggaagagattctcctagaagctacggaaaagaacacaacttcaccaacaccttgattttagaccagtgagatcccgtctgacttctcacaaccctaacaacaacacatttcctgtgttttacgccactaaatttgtagtaatttgttacaacagaaaataataaactaatataccaggcttcttctagtccttggatttcagaaaaattttgacatcagtaattgctactaaaatgaccctataacccaggacactgccagtcttgtgaactgtttggtactactccctaggaagaaaaatacagaaattgagagtttatttgtatataattcaatttcatgtctgctgagtttaattattaaaaacttaggcttgtaattttatttcttccatttcatttatctataaatttatggtattttacaaaagtactggctgagacaaacggagattttactttactttttaaaaaaagaagacatttacaaaagagaggtgaagcgctgacaagttaaatcacttgcccaagttcagaaagtgattcatcacccagtcattaaattaacaaatgtttatgaagggccttctactccagacagcaagctccatgctagagctactgttcagaacaagacccagcagagccctgcctctccgtgtgagtcccattctccttagcgtcccaggaatcgccctagatcgcctccccagcagcgctccccgctggttaccttcccaccagcattcaatcccaggaaaacaagcgcagtgtggacagacccggcccagtacgcaaatgccacacaaaaggacaacgaaaggaagaaaaacaccaagcacagattctaggggccgagggctgagccacaacgcaccgcaactccggaaaactgggccccggacctcagctccccttcctaagccaggctccgcccctattcccgaccccgcccaccgcgtcgttggcgtaattcccgcgactccctctcacccgcccgggctccaccttctgtaggggctccaccttctgtagaagctccgagtgccgctccaacgcgctcgcgaaaccgcctgcgcgcgtcttaggctccttggcattggaactaccactttcggatccactctcagtgcctacaccccgaaagggcctgaagaagagaaacactcgcagaaaatggctctcggcagccacagcacgggtccgacacagcgccgccatgacttctttacctctgacctttgacctcccctccgcaagcgcgcgggtcacggggcggagctatgagaggtccgccccccggacgcagagctctggaggccaacgaggcgtgtcttcctttcatctgggagtggcgtggggaagaagagacttaagctaaaattggtgggctaaatagttggaaaggggcctggttaagttttgcgttagaagtgcgtttaacttgcaggaatttcgccttcctgggcatccgttggaccccattgtactgtaaattctgctaacgcgacgctcgttctcccgccctgccgtcccccctacatggccgccagcactcgagtttggggtcttcactcaaatatgagggtctccttgattaccctatttagaagtggaagcccaaatgcagactctctggcacctgtttttcttagtaccatgtagcactttctaatatgccacatattaatattaaatatttaataatatttagtgtctactcccaactttttaaactttgaaaagaggaactttgctgtagggtccctagcaccaggcacagattagggctcacccaacatttgccaaaccctgcatccaagtttgtcctttgccacttctgcagccagtccactcacgccacaaaaatagtttttctgaaatgttttgacacctctagatacctattatctaacttaggagttcagaagttttggaatgtccctaagtattgcaccgccgtaggcccccaccctcactctggattttctttcccttttctcctgcagtgttaattcccaaaatttacccaccctgttcaaaacagcctaacatcattcttaagtgtttattaattagttgtccgtctatctttgacccagcagtttaatattaatccacagttagttttattttgggggcacacacctttccagttcatttgcaagtacttcgagagaaagaatttttatgatcacagaccctattttaagaatgccttgactatgggttttaagcttttctgatgctctctaatggtacagatagtgttaagaacacgaagtacactgatctcagaatggtgcacaattgtatgaatcacataaaattattactagctaactgtatggtagtccttacaaattcattaaattctccaggtgagttctccctcttggcagttaaaactgtttatctcccgagactattaatggactcttgcctagaacattattttctacggatagtgctacttccactttttttcaggagaaagtgtggtaaattgtaaagagcatggccagtggtcttcaagaaccctcagtctgactgggcagggtggcttacacttgtaatcccagcactttgtgaggttgaggagggaggattgcttgagatgaggagtccgagaccagcttgggccatagcaagaaccagtctctaccaaaaaatagaaaaatcagcctggggcagtggtgcatgcctgtagtcccggctacttgggaggctgatggaggaggatcacttgagcccaggagtttgaggctgcagtgagctatgttcctgccacttcactccagcatgggtgaaaagtgcaaaactcaagtatccgtaaaaacacacccctggcgtggtggctcacacctgtaatcccagcactttgggaggccaaggagggcagatcacctgaagtcaggagttcgagatcagcctggccaacatggtgaaaccctgtctctactaaaaatacaaaaattagctgggcgtgatgacacatggctgtaatcccatccactcaggaggctgaggcaggagaatcacttgaacccaggaggtggaggttgcagtgagccaagatcacaccactgttctccagcctgggtgacagagcgagactccagctcaaaaaaaaaaaaaaaaaaaaaaaatgagtaagtttgtatcaaatgacttcaaatttggccttagttctgtctttggtagaggatcagaagcatcaaatgagagggactgtaaagaactga

SEQ ID NO: 587638 - DNA, 4001 bp, Homo sapiens
cagccacacccgccacctgtcacgatcacagttccagggaaaggggaagggtcaaggagaatccagcggaaacttcttcccatctcacgagctctcccttctctccgtggcccccaaacactcgcatttaacgaataatcccatcaagtgagttccagtccgatttaagcggtggttccacatagtctgttggctgcggaaacttctttggtgtcagagtccggtcttcccgagaccacgaatggccatgtctgtaaatcaaaaagaacgtgagatattagagagaaacgattgtctcaaaccgaaacagctctcctacgcgaaccccagatattcctgacttggagtagctaagattttatcagcattctgggaatttgcatgtcctctctctgaactaagattttcattttactggaggttgataatccgagacttgccatatccgttcacgcttcttcctggactttgcccgcaggataatttggtgaaactcatctgactttgaggttctgtcgtttagttcccttccccaacacacacacacacacacgcacacacacacacacacacacacacacacacagtcatccactccaagctccaagtaggaactgggcttggacaggatttttcccaagccgggagagctggcagatcagagagggactttccagataaatcccatctggggaaacgttactatcttccacaagcaatttttctaaaaatgcaaatgctcttttatagagctcggccttccctcctttaagaaagggcttgccgattcaaacctgcccgactcagctggattaagttgggcaagggagatttgccgtcagtctgcaacctggtggcagatggagatggaaccaagatttaccctggaagtaggatattagtcaatggctgtcactggggtacaatgttcagaacgatgcaaacagacacggagggttgattcttcttcagggaaatggctggccactcccttgatttgggagaaactaaactggccttctcgttcccagtcccagaacctccacccctttcgaattcttcccaacgggctgaccctgcccggcgcccaggagcgccctgggtatctcctggctgctctcccgaatccttgcgcgccgcgcccctaccaggttcactgggtgcacgtagccgttctcatagcggtcctcctgcaacagctgccgcaggtgagcgatgtaactggaagccagccggagcgtgtccagcttggagagcttagtgtcggggggcacccagggcaggctggtcttgagcctggagaaggctttgctcagcacgcgcatccgggcacgctcacgggcgttggccgcgttccgctgcgactgcttgcactctgcggctgagcccttggccgggaggggcttcttgccaccaccgcccgcgctaccacctgcgccgccgcccccagccacacggggccgcttcctcttgcagccttccgcgctgccggctgtgcccagagcgcagcgctcctcctcgccgtcggggtcctcctcctctgccgacgagttgtcactgggcgaggcgtagctgcgctctacgccgcggaggggcggcctcttggaggcggggaccgggtactcccgctgcagcccccgaagctccatctcctccggatcactcaccgagcccgtggacatcccgttgtcccccttgcccacacgcgtcctctttcctcccccctggccagtctcgctgtctccgccttccgctccctggcggaggcggaggccagagagcgctccaaggaagactaaaaacccaggccgggaagcgcggggtgagaaagcgaggtgggtggcgagagcgtgagcgcccctctgctgaccccggggagcgtggactacgagttggcgcccaagtccagaatccgcgcgcaccgcggtaagctgcgccttttgaaaaggctatctgtactccttggaacaaaccaccccgggcaaagaagagggggttgtaaagggggccaagaggtggggcaggggcgtggaaggggtggggaccgcttttctgcatgccgaagagcggttggtggaggcgggggaaggggacgtctctgcagagccgagatttgggctctgaagcccgacggcccttcaacatgtctgcgcaggataagtgagctttcggggagtgaaggggcacatcttgttcctaccgacggtgcttctacccccaggtaatcttagcagtggcaaagattaccagacacttagaaacgacgggattccgacctctgcttgcctgccagtctttccagtagaactcagttttcaagttaaccattcatgatgtatgattgtctacccaagccttgctggacaagagaaaaagcagaacaggcaaacaacatccaacaatgcacaagttacctctcattttcctcctccttttcttataatataccttcatggtttacaaaaatggttacaatggttcgttgccttttcaaataacatctgtaacttaatgatattatctccaatttgcagaacttgaagctgagccgcctagatagacgttaagtaaaagacccaaacttattaggctaagtagaaaaaaagattcaaaatccgcgttttgaaattctggcccgtcggtattctagtcagctccgtgcctccgggtcacacatcactggatgttgtagctggtattttccactatcttgagagttccatgcgtgatgtgattttgttttaataccacaatgcgtgtgttggaggatccggccctaaagctttgcattataatgtagggaatccttgctattgtatttaatagattgtgtattgaagagcgagctcctggaagcagaatgctaagttagcacaatcgtccattcaaagtaaaaacgacaaaggagcaccctgaatgatcatgttccattccaaacaagactaaaacatcctgctcttccacacaagaaaacacaacaattttgcagtctcattatttcctaactcgaaggtcatcgcagttcctggtcaggggataagtacgtctgtggatacgggccccagtggtcagagactgagtgcccgctgtgtgcccgtcactgtactcgcggcttgtgagcagctcactgagtaataaaacccgtatgagtttggcatatggttaccccattttacaatgatgaaactgagtcgtcacacaggcttaggtgttcacttgttcttttcctgaaagtccacaggctcccaagctgagcaaggtgcaaggggacctatgtggagtcagtccaggacagagctggcagagatagctgggccagcctggctcccgccagttcgtacagcagaacaaatgcgtccagctcgatggctgaagtgctgcaacaggtggctggcagaggctgacttcatcactcaggcatcattccaccttagtctcccaggccacgctacccttagcaggggcgttttggggccgggggaatgtttcacataacccctccggctcacccacatttgcaaaggttttctccctgtacaagttgtcttttggttgggggcagggggtgggctggttctgggacaatgtgaataaaaagatcatttgccctcagctctctctagggtagggaaatgcagggaatatttgacagagtgtagaaatctttcctggagcgtttgaacttgaacttgactctaggatcgccttgccaggtgaaggagaggagagcgacaaagaggggcaaagagatggaccgaggagagccaggctagctctctgcaacgactattgatgacttgaagctatcagtataaatatatagtctcacacattaggggcaggcgaataggtttttaaaatctgaattgtttatacaggtgcagaacaaagtctttctttagaaaagattaatggtgaggagagcgctagatttctctaaacagtcacaaaaactatacccagcctcaacgctgaggaggtcatggccagtttctttattt

SEQ ID NO: 587639 - DNA, 4001 bp, Homo sapiens
gctcaccacaacctccgcctcctgggttcatgtgattctcctgcctcagactccggagtaactgggattacaagcatgcaccaccacgcccggctaattttgtattttcagtagagacagggtttctccatgttggtcaggctggtcttgaactcccgacctcaggtaatccacctgccttggcctcccaaagtgctgggattacaggcgtgagccaccgtgcccggcccatcatattcttaaggccaactttatcttcaacatttggaataaataataagcttgtgatcctccttattatataaaataataactttgatttttgtaacagcagttgaatgtgtatataaaatgaaaattaaattaagattatttgtgaaactaacagctttatgcttaaggaacccgtctgtaagacagattttagtaagaaatggaaatatttatattgtgcctgatgtcactgatattcatccttggtagcaaagaagaaagagcatcaacttttgaatctgaaatctagatttgagtattgactgtgacatcatttagctgtgtgatcttaggcaaatattttaacttatttgaattgaactttctttagatatgtaaaatatgatcacaatataaatttaaagaattattgcgagaattaaaaataatttttgtaaattgcctggtacacagaaaaccatcaatatatgaatccctgttattttaaaatatcactttttttttaaatatgagcttttcttattttgttctcacggaatcttcatgaggtacaagtagtattttctccattttacaggttagggaactgaaatgtgtaagtaactagtcaagttactcaactagggagcaggggagctggaatttgaacacaggcagtctactcccagaagattagctcttacccactgcataaaacggctaatcactgcataaaacatctgtaatctcagttctatggtttttctataagtatttttacctggtcagtgcaaatgccaacctcccattatatgctgtgtgaatcttacttagtcttcaagattaatcagatttctagcatctccatgaagatttatttttgatagacttttttcacatagaagtaattttggcctcgcctatattttcatagtaattatctatagcattttcatactacttaaggtgctagtaattatctatagtactttcatactacttaaggtgctcaaattacattatgcctatttggggatatgttttaaatcataagattccggagcacaaaaagaactatatcttattttttgtatcctttccccacatctagttcaatgaagtgcatatagtagatacccagccaatatttgctatataatcaagggaagataataaaaggcattagattaaagccaaaaatgttccatgaaaagttatgaaaggagaataggtgaaatatgtcaaattatactttgaataaaaccagtattttaaacaaaatatgcttaattatatgaaaaaaccccattgctggttcaaactacaaagcatttagtgtatttcatatgtacttgtgaacatatatgtttttcactcatggaaaatttagcagaaatccctattttttgattatcgaaaaaaaccaaaccaaattattgctgatacaataaagcattcatctcatcatacacacacagacacacaaatatatatcacacacatgcatgcacacacacacacagagtacacacataacaatcaatagaaacaattctggaaaaaacattaaaataagcctttttttttctttacctttcgtcctaaagaaagcagcactgatttatccacttctctctctttacaattgaaacctaaaatctttatctcatagtatttcagcatctggtacatgaagaaaggaaatgacacattcctgcgttgaaaatctttcttaatgtgtttcaatagcactctcatcaatgcacaggtttgcaaaatctaaatttgtcagataactcactcttcaccccatttaggccgctttaaaaaaaaaagagaagtgaaaaggaaaagaaacaagggttgttgaaacaagcacataatttacagcagattgagctttcctttttttttggagatggagtctcgctgtctcaccagggtggagtgcagtggtgtgatctccgctcactgcaacctctgcctcccaggttctacaggcgtgtgccatcacacccggctaattttttgtattttagtagagacagggtttcgccatgttggtcaggatggtcttgatcccctgacctcatggtccgctcgccttggcctcccaaagtgctgggattacaggcgcgagccaccgtgcccagcctgatctttccttttttataagtaatctatgccttctaaaacatacattaattctcatgatctcctctttcacgttactataatgttgagtaaagactccatgtttggctaggtgtggtggctcatgcctgtaatcccagcactttgggtggccgaggtggctggatcacttgaggtcaggagctctagaacagcctggccaacatggtgaaactagtctctactaaaaatacaaaaattggccaggcatgcgcctgtaatcccagctactcgggaggctgaggctgaagaattgcttgaacccaggaggcggaggttgcagtgagcagagatcgcaccactgcactccagcctgggcaacagagtgagactccacctcaaaaaaaaaaaaaaaaaaaaagactccatgtttagagattcgagtttttttcttagatcctttttcctgtacctttatccctagcctcaaacacaaaacacgtgaagaaagaatatgatgccttagtaagaacaagtaataacctaaaagcactcactcctgttctctctataatgataatagcattaatttttagagcaccagacaagttgtttatttccagtagtatagtagagggaaggaatctcaggcatggatcagatgaaagggatgttctttcccttctgccatccatcagggttttatacaattcaactccgttatttactcacattcaagaagttcaagtatgactcacatgaaaacgttcaacattacattaatgagctaagttttacaactgatatttctgggagaaggtgtttagcttatattccgtagtcactcttttgtgcccaaacaggagaaatcatgcttcctaccaaaagatgccccaaattgctgtgcccatgggcaccatccttcagaagacaatacgtctgcaagaaagtatgcgggaacagcgcacggtctttgagagatgcaaagtaacagtattattcagttattcttaaggtaaccactaaaaggctaatagtagtagtaggacaggcatcaaagtaagctgcataatttctaaccaggcagcttgaagactagaagtacgatcacaatttgatccagcctggaccagcataaatgctattggctattcctcatcaaattcttactgacacagaactggagactacaaaactcacactctttcctttacaattatttgtacatgcttcttattttaaaatatagtccttttaggtttttttgtacaaaatctgaagtttaaaatttagatatccctgacaatgctacgtgattagaaaagtcagactctgggaataacaagacaccaatctcccaaaattctatcctaatgaggtttctttctgtcagtgtgctttattttcagtatgtctctgtaatactgtttggtgtatatccacagtgctgaccacttccctatgtgatgatttccacactcttcagccaatctaatttttcattaaaaaacttccctttttatatgtctaaataggtactatataattttatatagttttatatataataattatagattatgtaacataatattatctattaggtcttactatatgtaaaaacacctttagcagggaaccatgttaaaaatgtt

SEQ ID NO: 587640 - DNA, 4001 bp, Homo sapiens
cttgaaccagtttggaaatctgaacaagagtttttggattatttggggtttttttttttttttttttttttggtgtatgggagggcatagcaaagacacggcagtgtgtgaacgggaagtatagcacaagctgaggaagtctggcatttgaaaagtatcgcctttaaacatgcacgtataaattcctgcctgtaaaagaaagaaaaaattttaagatgcatttataagttttagataatctggttatattttataaatctatatataagtatagatgtttactaatctagatttgtttcaaaactcaatctctgcatttgaatcaaaaataaacttttacggctgagtagcaggtgaaatgatggggaaaccaggaaacagaaactgctaattcgattaataataagccagtcacacgatttctaaactgcctctaatccaaaaaacctctaccttttctaatctcatactgattattctacgagatgacaaactctcaatatgacctcctcctatcctcaacaattcttgaaggaaaagaaaaagaaacttctaaggaaattttttaaatgctgaatttctctggcattgagccatgtgtagattaaacatcacttaatcctccaacagctctaaggcagtggtttacaagctacagcgtacattacaatcacctggaggacttgttttagagattgttgggctccacccccagagtctccgattcagtaatgggggaacgcccacccaggtggtgatgctgctgctgctgcggcaggtgggggcactctgagaagcgctgcactaaggtaatattaacgtgtggccctcgttctgggaaacgcgtgctgtctgcagcagaaattgccaagattttgaaaacttttatagcagtttaccattacatggcatcgaagcacgtgaacatttttctagtatttcacccttattgtattttcccaaagtactgatgtgagaacgactagaaagttgtccaagtttgtggagcatcgctttaagctgacccagcatacggcagcccctgcccctggggacagcggggccgacctagggcacgaggggtgactaggggtgactcagccagaacactggcctgagacgcagttccacacttaaggttttcatcgtctcgtctcattccggcatttcccgggacaacactcgcaccagccccgctgcaggtgccctgggtcccggcggccggcgcagaggagacaagaaaggagggcgcaggcacagcgccgcgggcgcccgcgagcaaggccagaccccagcggcacatttcctgcccaaaacttggggccgcgacggtatgcactccgggtaagtgagaccgatgcactagattccttcagaatgcccagtttggctccagaagatgacgagccaaacaaagacaaagggacgtcagtggaccccagcgtctccccggccactgccggcgccccttcgcgcctgcgcagacccccaccccgcgacccgcccgaggccagcccacggcttccttccgggcagcgggcgcgctgccgccgggcaaaggcgcgcatgcgcagcgtcgccgcccgcgccttccgtgtggccagtgcttacccgctacaggggtctgttccttccggcccggcaaggcctcctgggggctgacgatgttcgaggccgagttgcccatcctcgggacgggaaagaggctgtggaggaggaggagctggcaagccctccgggtggccgagagcatgggagggcgccagccgaagggtggtcccgggggacggcgctaccggcagcggagccgcagccggaacggcagagagtggggtccgcggccggaaccggggggcggcaggggcgcgggcgggcgggcgcggggcgctgctggcggggctggaggccgcccgtaatcgaggttgcccaaacccggggccgtaccggctgtcaccgggggcgtgttccttccctggacagggggtgtggcccggcgagttcctgaggttctctcgggacgaagttctcggacagagaacaagtgcgctcctgtcgtacgaagtacgtgaagctgcagaggccaaaaaacacgccgagcccttggggatgcggtttgattttaaagttgctgccgtgtcgccccgacttcgcagtttagcagtgcccagtaagatagaagaggacctgccttgcagccagctagactgtcagtttttattggagacattgtcatgacggccatcagaagggttgctattcgtccaaagtgaaaactaagcacagttctcaaaatgcgcggaatagggaagatgaattcaatattaagttatgtatttacaaacatatttaagcccattttgcagcggccaaaatacgggagcaaggcaccaacagcaccattaaggcagtgtaggtggacttaatggtggtgttgtattattcttgtttctcaaatcataggagatgacatttgttcctgtgacattctcaaactaaatgtaaagtggttggagcgaggtgagtgacttgggagttcatctgtgtgagattttggcttaacacatgttctgccaaaatgggcaggtcgtctcagatgagggagggaacttcagattagcacccacagaaaggaggctttcacccagcttcttgcatggatttagttaccactttgttttcatgtggtctggactgtaaggagggcaggaggcttagcagtgctatagtgtagaatgaggtgtgttgccaggcatacaacactaaaaaggctctagctttgattttgtaatttgtatttcccctggacaaaatgatacctaaactgtttgttattgctatgaggctataccaagtcggttccacaggcctttcatgaaaacacccccaggagtcccttctaggcttgcgaaggcctggtcactattaagggtctgaaaaaatagtcattctgtcaaagacaatattttgtgtttttcagttacttctttttgatacatactgatttgtctgtgttttgtggttgattgtatgaagtttcacatgctagaaatactctgcaactaagagctgaagaatgtttagtgtgaagaaataacttacttggcatgatggctcactcctgtaatcccaacactttgagaggctgaggcaggaggattgctggaggccaggagtttgagacgccatctttaccaaaaaaaaaaaaaaaaaaggtatttaagtagttgggcatggtggtgtggtagcgcacacctgtggtcccaactacttgggaggctgcaccaggaggaacgctggagccagagaggtagaggctgcagtgagctatgatcacactgctgtgctccagcccgggcaacagagcaagaccttgtctcaaaaaaaaaaaattaattttgatgttaaatgaaaaagtaaaacaaatgcagtgtgcgtgtatacatgtagtatatatgaaaatgcatgtactcccagttgcacagccactgaacaattcgaaaaaaatgcaattttttttgttcagaatagtgggattctactgcttttcattgtctttaaactgttttaagtgttctgtattgttacaacgttctcgagtattccaatggctgttacttttataattataaaagaataagcatttttaaagaacagatatatcttatttcaaaaacaagggtttttcgtttaccagaatagctgcaagaaaagttatattagtttctttggtgttttgaggaaagaattgaacatttttgccttcagtggtgcctttttcaccactaggacttccttttcttcagacattccccctaatccagcggtcccccacctttttggcaccgtggacgagtttcgtggaagacagtttttttccacagatggggaaggggagatgggggatggtttcggggtgaaactgttccacctcagatcatcaggcattagttagcttctcatgaggtgtgtgcagcctagatccctcacatgcacagttcacg

SEQ ID NO: 587641 - DNA, 4001 bp, Homo sapiens
aagacggtcagtattaaaatgaagctcaatttaaacttgtttgctgaactttctttttgtttcatatattgttgttttttagtataagcatgaatgatcctgtaatcaattcaaaaaggaagactgcagtcaggcaaacatttccttccgagtgcctatcagcatgtctttcatgtcttggcgtccattttaggagtatcagcgacgtagtgtataaaggagcttattaaacaaaggttgtcattttggcaacacacataaatgttaagtgatttcattttacagaaaatcaaaatgttgattaattaaaaagttgaagaacatacttaagcttaactgttcaaacacctctgttagatttcatatatttttcaatcatatttatatattaaatgccattttcaggattgctgatgtgtcactataattttataaaaaacatgtgaaacaattaatcatttaaggcgcgcaataatggaaagctatagacaggtttttattgtcgaaggattaagaaatcaatgattacatactccaaacaaaagcacagatccaggggcagtcttttatactgcccaaaatgatgagtacttatgtgaatagatacaattttcctgtattctttcggcatataaaataaaaagaaaatacatgattataggaagtcataacttaatcctacaagtcaaactgtctttaaaaacagaatacttacaatcagggtgatccacagtaacacatgccttacagttaacctctcctacaataatgctgatttttaagaacagaactatcacaatccaatcataatcaggcctaataggaaagattcattgttcagaaattagatataaagtatatatctaagtaaaacaccaggtagtattaaaaagaaaatcggtaaactttctaaattttccttctacttaaaacattttgagagagccaggctacagtaatcgtttaattataaaatctaatcaaccaaaaataagaaatttttctccaagtattgcaaacacagctcaccacttcttctccaaaagatttaaatttctattctctaccattcccagccatttctgccaacatcataaaaatcacctttcatcatttccttctcacaatgagaattcactaatcgcatacatctcttagacatagacacctccccacccacctcccaaaaatggttcagagcaaagacacacaaaaaaataatgaccaagctcacatttcttgtttgcccttcaagcgaagtctggtgtcttcagcttgcctttctggtcttcagtgttgtcactaattgctgggggatgtagtttaggacagcatgaagcagcagaaataaaagctgttgctttaagaaaacgttttcttaaacacatggataaaacaacttttactctgacttcctggctgggctgcataaaatcttagaaaggctccttgaaaagttaatgtctataaatgtctaaaaataaaataaaataaaatctaaaaacttacgttctgaacacattccgaaggatgtctttctgatttgatttgaaagcaggtttgtattgatgaacaaactttattttgtagaaaattaatattccctctaattagaaatttgccttgccatcttctatattaatcctgtctctcatggtataatcatacatgcaaaaaatcaaatatagtatttcccaaatgcatggacactatggaagcttcgttttgaaaaaggcttttatttcccttaatactggtgactaaacgtcattgtatgtaccaacactttcaaatagcccaagagacttaaaaagccttctaagtttgaaaaccaaaaagttctgagtttttctgtaccccaggacggttttctttcctgaagctcaagccgagaaagcagacaaaagaagctgatttgactgagctgtgccaagtcttgcctttttttctttcctcagctctccctctgcctctctctctccctctttctctctctcactcttttgctcccagtatggcaaccttccgagcagtcttggcggaggtccaggctgtgccagtctgtctgaattcttgtctccaaaagatgtcctttgcggatcaattaatacatttgaaaacaggaaaccgtggtacggtacccaaatcctggcaccaacagcatcgacttctgccaaatcaccttacagatttcatggtatcctacctttcataattattactaacatgttcccggagcaataatggagtactagaagccattcactgctcagcaataaggaatctgttccctagaaatgtccatatgcgacatatgcacaacctgcaataaatcaaatttctcctgtgagaagagatgtatgtaactttaataagcaccacatactgtatttctttttataagacttgcttttccttgtcctgccgcaaagactcatgggagaatagaaacggaggcatgcagattaaaattaaaaccgtatgcccagaaatgtcatgctttatcctatggagaatgaatatagttttgattgatctgcaactttatttttaaggaggctctaatacaaactgtacctattcaaaattttactacagatgtacaggggagaagagttcttttgataaaacaaataacaataaaaaggaaaataaaacatctaaggtcaatttaataacagcaagtatcttttcatattttgacacctcaagttccagcatagtcacttgtttacttaattcatgttaatacaatataataagcataaataagtactgtttgcttttatttttaacataaacaccttttgaagcaaaatagccagtctgtgcttcacacacttacctggtttaagaaatcatttttacctatgatgcttgaacatagaaaagagccacattctagaatcatcgtttcatagaaagaacccagaaaagtgacttctagtccttgattctgccacgttctaatttagataactcaaggtctcaaattgctaatctatctaatctcctcagtttgctcatttaccacttatgaaaatcagtgacttcctattctttgcttccaaactactacgtttatgcacatagataccttcatcctaattgcatagtaattagttaagtttgtgtgctccgccaatcaaatgtgtcatcttcacaattaggatcatgtgtcatttatctaagaaaactcaaagtcttgcatacagccttccatatacagctgtccaacaaatctattaagtaaataagttatgggaacggatcacataaatatcaatctgaaattctattaagtaatataacagtgaaagacaaaaccacatattactgaaccataaagttgatagatcaataaaatgctacagagatatcacaagtgttgaattaaagcactgacaaaagtgtcccatgctgtcccttcaaatagggatgatgaaacgtgggcagactaacagtgaatttgtaattcaaaaccaataacctgttaatagccaaagactaaagagaatcttgaaagcagcattggagaagcgactcatcacgtgcaaggaatcctcagtaagattaacagccgatttctcattgaaaaccatggagaccagaaagcagtgggataacatagtcaaagagctgaaaggaaaataactgtcaaccaagaattctatgtcagcaaaactattctttgaaaatgaaggagacattaagacattccaaataaaaacagagttcattactagcagacctgctctacaagaaataaaggaacttttccaccaagctgaaatgaaaagacactagacagtaaatcaaatcaatgaagaaatataggagtaagtataaaggtaactgcagaagtgaatattttacaaatagtataaatgtattttaaaataaatgtaacatagtttaattttttaaatatccttaagcatttctaaaatatttaaaatgggataaatgtactcttttttctatctgatgtaaatgacaaa

SEQ ID NO: 587642 - DNA, 4001 bp, Homo sapiens
ttataccaacttgaaaattaatgagtattactaggccttggaaaacaagctagagtagcatacacatattagaaatcattccccaatggtgttatttgacaccgagagacaagaggttctctaatgaaagaagagaaaggtgcagattgtacagtcacgggaactacaaaattatcaaaaggagcagacccttccttgcatggaaagaaacttccttcagtttttaggtattggtctgttttggcatctccattttcagaacgtttaaaggacattctccagtaaaggacaagaagcaggaataaaagaaaagataactatcaaagtcagtaaatgcatttgtataatgccagtagaagctaaaggaggaaagatttttacaaagtacggttggtcaaaaaagcgaaatacttcaaaaagtcaaagcagataagaactgagaaaagctcatcgtgtttagtaattattaagtacttttaagagaatcagaacagaaataggtaattaagaacagaaataaataaataaataaatggtaaggaaatccgtgtgggagctttacatatttttactcatgataaaatcatcctcataaagccacactccccttagttatacagaactaagataggcaagaaaatttcataaaaggagcaaaattcaagctgagaacctagaataattttcataactttactatattcaagcatctagaagaaaggggtaatttatttttcagttttgtactcccttagttatctctgtaactcagtgccttgtacacagtcaagaagtatttccttgtactccttagggtccaaattaattaagttaatttccagtacaaatgctgtgccagagaaaagaggagtttattatacttaccagggaaagtactatcttctggattaattgaagcactaatgcttcttttcaagaggtgataaacatttgctgctgtgaagtctgaaaaagaaaagatagactaactcaaagggctctagatttacataatctaacttagtccaatttcaccatcagagactctcaagaccagtaggttgtacataaaagtactaaacgctgctcaagatctgttcaagttttgatacagaaaatctaaagcaatcagagaaaatagaaaaggctcccgatctgtacatgccagtcagttagcacgaatgcaaaattcccctcaaaagaataattttaaagagaagggaaattctgtgacaataccttatacacaaccacatacatttactcctcaaaatgcctgtttgatcgaaacaaatgaacacataaaatgcaatattgaatctagacgggtgcaccaaaaagcagtgcaatcgcaaacaattaaaatcatttaaaattcatcatttgtttttaaaacttaggttatatgtgggatgtctcctcccattagatgtaaattgtaggacagcaagatctttgtccatcttgctcctttccgtattatttgcatgtgaaacacaggagcagaaataataaatgcatatatttccaaaaagcaggaaattccattactaaggcatagaaaatttattaagttaaacatttactatgccaagaacttctaagggctggaatcttgcatccacaaatttgtccctgtttttccatgaagatgctatttttgcagccctcattaactctatcccagatagagtcccagcttcgtgggacaactacatattgatccctcttcagcagaacttgatcacaaaactcaaacttcttcccctctccacaagccgttcccgctctttctcatcccagcgcttacccggctgattctcagtaccctcacccgacgacacctctggcccatgttctgcctccctactggccgccgacgggaattttccttccccccagatcaccagcagcaggtaccgatccatctcctcagagatcaccccccaactttaggtctcggcttccacatccaaacagacgcgcgctatgacgcatttccggttcccttcgtttaggtcggctggaaattatgtcctccgtcggttttccgcagtttttccaccaagcgagatatttttgggagttattccctaaataactgcattatatgctcctttcatgacgaaattgctgccgtggagaagactggaggaaactcgaggaagagggagaagccgacaagtgctcgacgggctaggaactgtcctgcttgggtgttagcgtttcccgccgggccagtaaggctgagtgacccggcgtggctactaggagaaggacgtacggtcctgctagtagaggaatatgtcgagtttctctagggcgccccaggtgagctcggactcttatggcttgatggggttcattatactggcagaaggagagcgttggttccggcagattaagtagtgaagctggggcggcagggaagccgagaccctcggccaagaggtgacttgggaaagcacaagagggtcgtcagtctggcaagcacttaatgtcgttcgtctgttactcgtcccctcttcttttcaatctgcccttttcatgtctttcttgggggggcggggggaagaggattagagcagatcggagaggtaataaggtggatcacatagggcattgtaggcccttgcaataatttgttttttgactgagtaaaatggggaccttttggagggttttgatccacggagtaacaggatctgacctggtgtcaaaaggagcactctggctgctgggtcgagaatagactgttcagaaataggggttagtagaggacagaagcaaagaatatgtttggagggtgttacagtaatccaggcgagacgtgatggtgcagaggccacgctagaaatactatggagtgtgttgaaagtggtcaggttttgtttgaaggtggagccagtaggacttcctgaatattgagtataggccaacagcaaaagaagaaacaaggattaccccaaggttttttggtttgtccaactggagggtgtgtcatcaactgagatagggaaggctgagattgaaccaggtttcaggtggaagaataggagttagtttgggttatatcggtctaagatgactctcaactcagtgccgctccaagtatggttccttccttgggctgtttgttgcctgtctgtgatgagataaatacaggaagtaaaataaaaattttaaaacctttttcagcaatctgacatcgcccagcatttgtatttttttcattaaaaattttttttttctaagtatcaaactattagtctacaatggatggggacaaaaactggcctttttcttatatgtagactagtttgaggttgtgataagtaaatttaaaataagaccagctagcctcgttctatttttccagcattgtttagcctcttgtgtatatgcatagagaaagcatctggtggagatctttctggcctagaattttctaagaatttgaatacattgatgacgactgtaaaaacaatgctctattcctgaggcaacctaaagatacctatttcaggcaactttttaaagttgaaatttattccacatcacccatctgtactttcccaactacattgttctatttaactctccccaggaattgaactcctgaatcgtcttcagtttccagttggccactcagctttcaatataatgtacctaataatctctaaatgtttttgaagaccttcataaacagcttctactttcttacaagcttctcattgcccctccagattctattatgtgttatacaaaaaaaaaaaaaaaagtcataccgtaaagggaaatatatctttgggatatttataacaaaacgtaagtcatattgctaacaggaaaccaggaaggaataattactgtgtttgtctttgcagaatgattagaaaaaacaacccttttccagaaatagaaatgaaaacaaaaattctttagcaatagagttatttttcaaagaaattgttgacattaattgtagaaacgtgatgata

SEQ ID NO: 587643 - DNA, 4001 bp, Homo sapiens
caacaaaactcttgttagttggaactcaaaccccatttcctccaacaactttcctaaagccctccagtgaaatgtctcctaccctccaaacctcattaacactcagttaaaacctctttaacacctatcagtctatgcaaaattctaattatttatgaatctgtctccactactctccaacactgactctacgtgtataccttgcactgccctccaaacaccagagtgcaaatttcacatggtagggccttcgtactggcttactgaattgtactgaaaaggtgaagatcttaattcgctggatataaaaataggttaggtgctgtttctaactctgcataccctccatagtctcaatttgctcaaatgtaaaatatttttaaaaatacataaaactatgaaagatataatgggagaaccatgggaatggcaataaagaatgtaaacgtaaaacatgaaggcctaagacagacgtgatgccctctgcaacttccacacgtggcccagtaaatcggtgcctgaattcctctctcggctttcaccattctgccctgtcatctccctttactctatttcacaaatctaccacgccacagagtgtgcaacagactcgttcgttgaactcgccttagctctttctcacaggaccatacacctcaaagcgtattaggtaaccgaccccctcttgccttgctcccgttccggcctctgttggccacatttgccagaacaagaatgggcaaccatttccctttaacagtcccaactaaaatggaagcgcgtctagacctggacacctttaatcctgtgtaagccccagaatttctaggtcaccgcacttcttccactgcctactgtctcaatgtgacttgagatagacatctgtcttccgagcgcagtctttatacaacttcctaacaccaccttaaggtcccattacgctccacatgcagcctactctgcaggcctcaaggaaggatgctgtgcttattctagcggtgacggttcccaaagatggcttgacctctgggcgcctatctgaacggacccccagacctcctaacttccttcctcgaaactgggcttccccactcgtcctatacttcctgagttccccccattccccaaataacatgaccacctatcacctcctcctccacttgggagtgctgcctctcggctttcgactaagcactcttttccttcccggctggggcgcggcctcccccaagctcgagggtctccacgcccgcccttcgcccgttctctactgccgctcatcccatactcactttgggcttctcggacagtttcttccggttcttcttcttctgttcctcgctccggagattcttcagcaaggccaggtcgtcgggggccgcggccggcacggccgccgcctcctcccgcttgcggggcgggctcctccgctttttgcgggcgccggcgcaagccgcggcccagccgtagcccagcagaaacagcagcagcagcccgagcgcgccagtgcccaccaggatcacccagccggggtaccgtttcggctccagccccaggtcgaggcccagctcggtgcgcagaaagcctaggccgaccgagagcatttcccgcagccgggccgagccctcctcggcctgctgggccagctcgtcctgccagctccgtgcagccatcttccctcccgtcagagggactcgcaggatgacgccggggcgcggagacgcagtggaatagtcgagggaagcgaggaagggccgggccgggtaacctcaggccgagcgcatcgcggccgtccctcgcgccggagccggggatcggccgctgccaccgcggggagggcggaggggtctcccaggttccccgctgtcagcctcactccgccgccgccaggagacccgggaggcgggagggagtgtctccagtggcggccgctaagcggcgtctcggcgccagcgccaggccccgctgtcctccctcggcggaacaatggcggcttgggccgcgatccacgccgcgcgcggggacgaccgtgggtcacgtgggcgccagtgggcggggcgtgggcgtcacgtgggggcgggcggggtcgggtggggcaaaggcgtgtcagggaaggttggcggtggtcggttcgggcctggttaagacgcggcgttggggacccgttactgtagaccagaagctgggaggggttaattggtggacgccttcgcggggtggctggtggcgcagagttaggagacgtggcgcaacgaatgagtacagaggaggggctccgtgcaaggcgggggcgggcggggggcgggtagggctgcagcgctaggaaccgggtcaccgggtctaggtcaaagtcgccctggcaggtatagggctcttcatgcctttttctggagtgttattgaggtggaatcgctttttctccctggtggcgccagttggatccttccagaatgagctcaacggagtctgacgccgaacactgttcttccgggacctaggtttagttcacaaattgggtatttctctccagggtgtttctctccagggcaactaatacactgcgtgcctaccagttgccagcctggcgagggcacgtttgcgtcgtttggctcattcactcttgctctctgttgttagtccccagaattcaaaagttggaaagcccgtgggcggcactattcttttcctactaatttgtagctttaataacacataaggggaagcacattagattgtatttacttatggagggagctttctcgttacgttttattttaagcttttctacaacactgcaaaaggggtttgcaaaaattccatttttatatgctatgttgaccatctctgggatgcagctatagaaggaaacgaactgccttttcaaattttttttttttgagacaagagtctcgctctgtcgcccgggctggagtgcagtggcactatctccgctcactgcaaggtccgcctcctgggttcaagccattctcctgcctcagcctcccgagcagctgggactataggcacccaccaccacgcccggctaattttttgtatttttagtagagacggggtttcaccgtgttagccaggatggtcttgatctcctgacctcgtgatccgcccacctcagcctcccaaagtgctgggattacaggcgtgagccaccacgccaggccttcaggttttaattataagggaaatgcttgaaggctgccttagggttttaagattatattttgctataaggaaactctgtattttatcggtaaatgatcattagcgtgtaagcaactgtcttaagtgaactaaatacaggctttctcaaggaatacagcaggggtaatattaataaccaccaaataccaaaaatgtattttgacctattttgcaacagtgtcgtaatgcatattgtgattcatgtgtggaagggagttttgtaaataataaataataaaagcatactacacttgccaagacttatgattaaagactaaattaaattaggaggccaaaaacttagcaaatgttattgggatctgctttaactcaaagtttccaaattccatttatatttgtgaaataagatttctgcacgtgttttggttctagagatgtgaagggtcatgattttcctaagaagttccactgactattctgaccattctagataaacatctgtgaattttttattttttattttttgagatggagtctcgctgtgttgccgaggctgcagtcgccctgacttcgtgatccgcgcgcatgggcctcccaaagtgctgggattacaggcgtgagccaccgctcccggcccacctgtgaattttcaaattaaactattacaataatggctggtgctgtggctcacgcctgtaatcccagctactcaggtggctgaggcatgaaaataacttgaacccagaaggtggaggctgcagtgagctgagatcgtgctactgcactccagcctgggtgacagaaggagattctgtctcaaa

SEQ ID NO: 587644 - DNA, 4001 bp, Homo sapiens
atccatataaaacacaggatggagtcaggatataagaaatgctcaataaatgttagccattattattggttacacaaccaaatacaaaaattctgctgaattaattgctgcctacaactttatactttgtttttctgcatactggaattcagcttgttttatgctctaaattagaccaaatacttgagggtctaatcttttcttggagatctgtagttttgggaagtttgctgaaagagattttacaaaagtgaaagtttcctttcattctgcaattatttattattattattattattattttttttgagacggagtttcgcccttgttgcccaggctggagtacaacggcaccatcttggctcactgcaacctctgcctcccaggttcaagtgattctcctgcctcagcctcccgagtagctgggattacccacgcccgctactatgcccggctaattttttgtgtttttagtagagacggggtttcaccatcttggccaggctggcctcgaactccttacctcaggtgatccacccagcttcccaaagtgctgggattacaggcgtgagccactgcgctcggcccattctgcgatgattttagaaaagaagtaagtattcacaataccctgctgggataggtggtttctgttagattttggtgggaaatgggactccaaatgtgccaagttttccctcaaacctacaacattcattctctgcacggtagtcataagggcactaaattgaaagtcagaagacctcggttgtgctaccttgacaaggctgtttctggcagcagtctaacaaaagcagcagtctagcccatgatgtggggggtgggggtggggtcaataactattcttcaaataatgcttttttaaaaggctaggggtacaataagatgattcttaaggcccctatcagctctaacattttttgacgtctaagcacttcatcctacttcaaactcctgaaatcccaaattcatcctgaagcctttccacactcaataccacttaaacatcaggaagactcactttcaaatttcaccccgtcattaaaagatctttgtgcatacaactaatgtttatccttgcatttttatttacaagtgcactatcttctccacatcctttcattgctgcctacacatcttaacaattgattaactgttcatgcacgagagcagagctgggtctcatccctggatccatccttccggggactattctccactttcccagagccttgtactgctctaatgtttgcggaatggaaataaatcaatggcaagtacagttaactcacttgcttacacagtatgcaaaagcgggtaggggatgtgcagatgtgtataaaagccctgtaaggtggtaacctgaagtcttctaacaaggtcctttcatcaggaaaattacagaaaacccttaaagaaactgaagtctcttaacaattcatatatactgttctcaatgagtgcctagtgcttcgctagaaaaaggcactgaaatagagttcaagatttctacctacgaaatgctataaatgaaatcaggagagaaagggaggttatgggggcagcttcctaataaagggtctctcaatacttcccaggccattttagcccacttcagttccccaaacttgcgcaggaaggcagagccccctcctgaggcttctcacactgcgctaattagccagcatggttgagttttcactacatcagccagggaaaaacacaaaacaaaaccaatcaccctctactgggccgcgaaaacctaaaggcccttgaggccctggggcgcggtctggacgcgggtgcgccggaacctgaaccctcgccaggagcgcgatcctcgtgctggggcagctcctgctttacctgtggcgaggcctgcttcccgtagcgggtgaccccgggaccgaccaactcgctgggccgcacgtcccgtcccgccgcgccgcacgccggctcctcagcccgccctacacagcgcagccgcgctcccgggcccacgtgggccgcgcccggagtgggcgagaccatgtgccgggttacgcggggagacagcgggctacgtgctctgaaaagagccagccaggggccccggctacccttctccggctcgctattcctctgaagtcctgtggacttggagtctgaaaattcctcgagtggtagagatgcctcagctaggatgacagcgtggggacggccggcggcgtcccctgccccaggccgcggtggcggcgccgcgaccccgccctctcgcgcctgtccttccctctgctcccagcctttgctgggcgccagacccggctttgccgtccggctattagcctactgtggctagtcacccccggggtcccggccttctcgggctggggccgccgccaccgcggcaggacggggaggcgggccatggcgtcctgcgtggggagccggaccctaagcaaggatgatgtgaactacaaaatgcatttccggatgatcaacgagcagcaagtggaggacatcaccattgacttcttctaccggccgcataccatcaccctgctcagcttcaccatcgtcagcctcatgtacttcgcctttaccaggtggggcggcccagccgagcggggggcgcgtccaagggctagggaagaggcgggagggagggtggcggggaggggggcccggcatggctctgggtgaggaagtgggctggctgctccacgcacacgcactggcagcccgccgcccacgcggcccctccgcccgcccggtgtctcacagtacgctagcctgctcccctacccctcagtgccccttctccatacagcgcctccggttacacggggaacgcacgcgagtcacctagcacgatcgccccctcacccaccgcactcagcatcgctccacacaacatcacgacgcgggcccctcctctgcactgctccagccttcgtccctacccagcacaccgcatgaatcatgtcgtatgcaccactttcagcacacaccgctacacatacaaagcaccccaatccacagcgcctgcaggcaccatacacaggcccaggacacaacctagatcccttcctgtggaactccggtattcggcactatccgtaacgcacaaaaaatgcacatgtgtgctgcatacacggtctttcctgtgcagcacttcccgtatgcattgcacacaagtcatccagcataacacttcccccagcctcaaacactaccatctgtaccacggcacaaactgccactctaaacacacacctcacagcggacctttcctttccagcacagcccaatacccatcatctgtgtacatggctgcacagacaccagcccgccacacatcacgcggtgcataccctgctcactcattacctaacatacgtgctgaaatgtgatcttgtccagcaattttaatggtgcctggggtatagtaactgctgtgtgttaaatgaaacacataaacctcacacagcataacacaactctcttattccctggaaaacatacacacacattctaatatataccggttcataggagctgcccagcccaaatcttgaacacacctcatgttaactctggcactgcgcctgtggctcctcattcctaacctagagaactaattcatccttggttcataaggaggtacacaccgtggttcctacttagaatgatttatactttctgaatgaacctctttaaagaaagggaagtcacacctctctcaccattatggcttaaaaggccaacttagagtagagtagtttttgagccacacttttggtttcaaaactggctgtgtgtccttaattaagttgcataaccttgctctgagcctcaggggccacactcgtaaaatggggatgaaatatctacttatatagggttatgaaaattaaatgaatgtgtgtgaatgcatttagcagagtccctggagcacaatgtacaattcatgtcagttacttctctcccagtatttttat

SEQ ID NO: 587645 - DNA, 4001 bp, Homo sapiens
actctgtcatttaatccacaggtaacaattcttatagcagtagcaattcttacagctactttgcagacgaaggcaataactgacagagacaaatttcagattcaagtgtgtttaaatccaggacccacaatcttaccattaaactatacttcttactaaaattacaataaatagaaattataaagctttggtttttggaaatcataaataacaaaaacttcccttccttgtgcaagcaagagaaaaagaaacttttgctgtcattactaaaatgtcaatccacactatgataaaactgagctaagtgaagttcttttttttttttttttttttaaagatagggtcttgctctattctattgctcaggctggagtacagtggcacaatctcagcttactgcaacctctgcctgtcaggctcaagcaatcctcccacctcagcctcccgaatagctgggactagaggtacgtgtcaccatgcccagctaaattttttaaattttttgtagagatagggtctcactatattgcccaggatggtctcgaattcctaggctccagccatcctcctgcctctgtctcccaaagtgctgggattacaggcctgagcactgcgactggccactaagtgaaatttaaaacatagcaacatatatctgaaagatatgaaaataccaataaatttacaagtcattttcctattgcttatcctcaagctaataatctcaaaattatgcagctataaacaaagataattttatttggttctctactttttaatctccgaagaaaacagatgtaaccttggaagttggggagattcaaagttcaggcacaaaaacaaaaaagtaaaagtgcactaaaaagtatacccatattctgccaggcacagtggtccacgtctataatcccagcactctgggaggccagggtgggcagtcaggggttcaagaccagcctggccaacatagtggaaccccatctctactaaaaaatacaaaaattagctggccgtggtggtgtgagcctgtaatcccagctactcggggagctgaggcaggagaattgtttgaacctgggaggcagaggttgcagtgagccgagattgctccactgtactccagcctgggcaatacagcaagactccctgttcaaaaaaaaaaaaaagtatacccacattcaaattatgtaacctgcctgtatcttcaataaataaaatttaattctatgtcatagccatgaaaaaaaatgaatttcaaaatgtaaaacaaaatattctacaaaatgtacttggcacaatacttgctctaataatttataggtctaaacaaactttatatatcagtagaaaatacttataaaaaatgtcaaggtaaaaactaatatctctagcatagaacaatcattatagtaacttttttttcttcttatcaatagttgttatttttaagagacataacttaccttttaaacaactgtgttgtttaaacacattataacagcattcaatgttaatgattctacaacattaagagcgctgtcaagtgttggccaagcatattttatgcaatgatttttctgcttatttaagccttttcctcactaataacaaatatattgctcttaatggtcacatgaatactggtaagttttcaatgtaacccagaaagttacttccttacttcagatgctgagaaaagattcacttctatgatttaaatagaaagcaaattaaacagtacataaacatattgaattcaagatgttggtcatatatagatttatttcattttctcagaaaaaattcttaaaatatctaaatgtcgggatttaaaaaatgaattttgagcactcaccgattgcatgcttactccaacttgttgaaaaaccatcctaattaggcgcttaatccagccaagcatttatatggcaaagtctccccaaatttgcatttcaagtacttcttcaggcatacatagcagcacatggtccataaaacacactgaaaatttaaaatgcaaatactaaaatgaaatcattattatttagaatttgtactgtctacatgtctcacagagcaagcctaaaacatttttaaaacttcatgtgcagcctgaccaacatggagaaaccccatctctactaaaaatacaaaattagccgggcgtggcggtgcatgcctgtaatcccagctactcaggaggccgaggcaggagaatcgcttgaacccaggaggcggaggttgcggtgagccaagatcgcgccattgtactccagcctgggtgacagagcgagactctgtctcaaaaaaaaaaaaaccttcatgtgtaatttaagagaaaacaagatttgcttgtgatcagcttgcttaaagtaactgtaacagtataaggtgttttgttttcttttgtatttttttcagtcagtattcttagctggaagcaacaaaaacctagtatggctaatttaagtaaaaaatacatttatgaaaagatatctggtggataataatcttcagagaaactaatttataggctacacaaccaaggacgttcaaaactgcagcagacttggccctgggaaaacaccactgcatttgctactaccaccacagacagggtccacgcagttcctccttttccatgtccccaactccaaagatgctgtctgtactggtccatttgctagaccaagtccacagctcacgtgtcgtagcaaaagggaggctgacaaagcaagtacctggctattgtaacaagcaggttaagcttcccaccaaaaatcataaaggaatgaattccagaaatacagaacagaaattcagatgctgaaaggccaaaaccaatgaataaagtcttttaatattcactagcaccataacccctgccattcattctctgccccactccccatcaatctactgtatatctgacagaattacaatgttaacttgtatggtatagacgagtttactggaagtgttggtctctaacaagataaaggagtttgcaccagaacatgaatcaatacactgctctctcatcaataaaaacttgcttaaggccgggcgtggtggttcacatctgtaatcccagcactttgggatgccaagggaggcggattgcttgaggtcaggagtttgagaccagcctggccaacatgatgaaactccaactctaataaaaatacaaaagttagctgggcgtggtagcaggaacctgtaatcccagctacttgggaggctggggcaggagaatcgcttgaagccagtaggcggaggatgcaaatagcgccactgcactcaaacctgggcaacagagtgactccgtcttaaaaaaaaaaaaaaaaagaaaaaagaaaaacaaaaaaaagaaaatcttccttaaaggctgggtgcggtggctcatgtctgtaatcccagcattttggggggctgaggcgggcggatcacttgaggtcaggagtttgagaccaacctggccaacatagtaaaatcccatctctattaaaagtacaaaaaaaaaaaaaaattagctgggtgtggtggagcacgcctgtaatcccagctactcaggaggctgaggcaggaaaatcacttgatcccgggaggtgggggttgcagtgagctgagatcacgccactacactctagcctgggtgacagagcaagactccctctcaaaaaaaaaaagaaaaaaaaaaaaaagaaaatcttgctcaaaaagtcagctaaaccaaacagtatgctgtatgccatagttgatttacatagtgatgtaagccctttatctcatcatgaccagaaacagtttgtggtctacgttgtgagaagagctttatagataacaacagagaataggaagaaaaagtaaaggtgccacaaatatgccaagtgctgggtgaaaataaactgaaaagagctgggcgctaatgaaaggaggatgagcatcatgggtaaaaatgaacagcagtgggggaaaacaggatgaagtataacagggtg

SEQ ID NO: 587646 - DNA, 4001 bp, Homo sapiens
tcaaggggtcctcttgcctcggcctttgcaaagtgctcggctgagccatgcatctggccaagaataaaatttttagcacttgtatttgttgagctatgttttctcaggacatcaaatttagttgtaataatctttaacttttcaaagaacaaacatacctctctcactattgtttgtatttgtgtaaattttcaggcttttttttttccattactgatttgtggcttaacagaaataattttccacagcagttccatttattccacaactcctaggacattgttacagttaaaagagcaagaactttgcaatgacaaaggccaagagtagcattctgaattctacccccacccccatcctttcagcagtgtgacttcaggtaaattgtgacctctccaaatttctttctcctaactctaacatggggataataatacctacttcatagggttattgcaaaaattaaatgagtaggtggaaacaacttcacagtccttcatacatactaagaactcgacaaatagaaattatcaatacaattattactattcaaaagcaagagcactactgtctagattatctggtaactctgattttgaaaacctgagcacaagataatgaaactgcactgtagcagttacctaaattctggtagtacaaactaaatgagcactgtctacactttaatatgtcccttattttacttgacccctctagaaagcaaattattatatgtatgattattcatcatgacagaggcatagaaatatgtaaaataattgaaattatataatgtctgggatttgcttcaaaataacccaggatagccgggtgcgatgactcccgcctgtaatcccaacactttgggaggccaaggagggaggatcgcttaagccaaggagttcaaagatagcctgagcaacataaggagaccccatctctacaaaggggggggggggggaaagccgggcgtgatggcgcctgcctgtagtcccagctagtggggaggctgaggcgtgaggatcgctggggcccaggaggtggaggctgcagtgggtagagatcccgccactgcactccagcctgggtgacagagaccctgtctcaaaaacgcaaaataacccggattaggggagcaagactgcccacgtattgataattactgaaactgggtaatgagtacagtgaattccttatatccttcgttcaatttctccacagtttgaagatttccataataaaatgctgctgttgttaatgcccaaaggccggctttggggtttcctgcaaaccctggtcatggtcagaagatacactgggaagttctaggaggcgaaaagcgacacagcaaccacaggaagctggttaaacttcccggcggatcagccagcgcactgctcctcccggaggccggctggcggtgcacccgcgcagtccggctcctgagcccgttaagggcgcagcacccaagggagccgccgcgaagggcggtctccccaggaccgccgcctggcggccggcgcgggaaccgggggtccgaaagatggaccgaaggtcgggggagggggcaggaggtgtaggggtagattggcgggtgggcgagtctcagccttcagggcaagtcagccgacttccctcagctcctccggagcccccgacccacgcgccctcagccgaggcagtctctgcctcccggccgcggggcaaacactcaaccggcccaggatcccgccggcctccctgcgttcccgaaccgagctccttcagctcctgttctgactgtttccagggcatcccatcgccgtcaggcctgcagccgacttcatcacccgctagccaaccgcttttccgagttcccaccctactcacctcggccgcgcggcagccagcaccctctccggctcctcaggcttctagcttggctgtcccgtggcgttgctgccaatcagccaatccccgccccaagcctgagccaggctgatcaatcagctgtttcctcaggctcggaggcgggcacaagaagctcggcagaggacgcggcaaccgctccgcaagccggctgctgagagtcacagtcggtgtgcgcacgcgcggagctctgagaggggcgtgtgcttttgtgcggaccttgctttgtgccttcaccgtcctgtcctgggaagtgcttttgtcagcttcatgctttaggggtttagggacacccacattctgaatgtagccgcagatgtgtattaccttgaaaaaggctgcgagtcgtaagcttttgttaacctaacatgtggagcccatttcaccccacgctgtagggacctgtgtccacccggcagatctaatgcctatgcggacctcacatccgagatgtttctctttaggcagagcaggagtgcggggattacaaagtgcctcatggataagtattttactttaccatgttcggttccagcgtctgttcagtccgattcatttggggcacgtgctttctaaagatttgaatactctaggacactctggatttcaaataattgtcgtgaaaatatgattattacatttctagctaacttatgcagtgtagtaatgtgcgtaggcgtgatgaaagattcctatgtagggtaggaaacctgtccgtatttttgtatggcttttgaagaggctgttgctgattggctgtctctcttaccctcccattgcaattgatcccggaggtcgctgggctgtcactggatctctgatgttcttgccccgggtggcacaagtctcttcctagtgagggctttcctccttcacccagagcattaactcatttactcaacaacggcttgttgggggacaactatgacagcagaaaggttgttaaaagccttgagccacgccctaagtgagcctacaagataacgaggagataacacaaactaaacaaaaacacaaacttaatcaaatattataatggaatcgaggtgggagcctgggcgcctccataatgtctcagggaatacttcctgagaagtgagtgcttgtctgaggctgaatgaaagagcaggagctttggagccgaaagggtgggagcaatggacggtggcgattctgtcaaagggcactaatttcttcctctgagatctttccggagggtatttactgctaagctaatgaagcttgtgtttcaggcacgctggctttcgccagcctttccaaagtccatagaggaactttagcatcgagtttacgagattatatgttgtttcctacttatttattaaaaggaaaatgtcttaaagcacccctcaaagaggcatgggttaagacctgtcttttttgtttttttttttcctttccaacttcccttccttcatacttcctttcatgctagatacgctggagtggccttggacattttggggatctaggtggggaaaagagagttgaattgaacttgggccacttcgtgataagttactgctgtctttcctggtgctggattggcttcgagcaagacatgctctgccaactcactcagtgctatgatacagggatgggtcccttggcacctggccctagaagtatgtggctagtggaggagaaagaaagtttgaggccaggcgcggtggtgcatgcctgtaatcccagcaatttgggaggctgaggcaggtggatcacttgaggtcaggagtttgagactagcctagctaacatggtgaagccccgtctccgccaaaaatacaaaaaagctgaatgtggtggcacgtgcttgtaatcccagctactcaggaggctgaggcaggaggattgcatgaacccgggaggcagaggctgcagtcagcggagaccacgcacaccagcctgggcgaccaagcgagactctgtctcaaaaaaaaaaaagggctggacgcagtggctcacgcctataattccagcactttgggaggccgaaatgagcggattatttgaagtcagaagttcgagaccagcctgacgaatatggtgaaaccctgtctctgctaaaaata

SEQ ID NO: 587647 - DNA, 4001 bp, Homo sapiens
cgatccatccaacctctgtaatttcttatttttttcaccagctttatcccaaatgttaatgactcacccaattcagtaacacttcagacaattttccattttcccccaatttgtttccatttccagataaataaggatttctgacttcaagtactgcactgcttagagggtatccataaacaccaattttaagagtaagaacactgcttgcaactcaggttcacacgtgactttgtaccaggtggctttgtatatagaacagaaaaggccttgactcccccaaattcatattctctaacaaagtggcatccactgccatgtcactgtatcattcttgctatcaatatccacaacagctatcacttttacaaacggctcccttcatcatggaaggaggaagaatgcccttggcaagggcagagtccatgagttaaattcacccttctggaataaattatttagtaccacttaaactctgaaagctttgagccacctattctgtggtttgtagcattgtcttctaagtttacaatttcatgattgtgaagcgacaacttaattccctagtgcaaaatcaatacaatttaaatttactgtcggaactgacattctccagcaaactaaaagatttcttcttccaatgacatgagatcattttaatctgcttttacaaaaaggtactcaggaactattccaaaatttaggaatcaattcttgctggccataaagcaattgcccccacccctcttaaatgtgtgggatccctggaaccacctgagctatggccactctgacctagctttgacctgtcaggggcctacattttgaatggaagttcatcctgcaaaaacgcaaggagctgtggtggtagtaacaacagacagccaatagggtttttaagcatattctttcactcgtttagggtttttatcatgcagtaacgtcgatcatcattttcattctaaattagattatcagtacaactgaggaggaagatttggtacagcgatcaacgtttccaatgttaatttactggagtgatcagggaccatttgcttttgttaattagcaaaagctggtgttgttaaaacacaacagtgcgtgacgaatccgtaagctgcatccttttctctaacgaacaaaacggactggaaaaggcaagaacacaccatcattcaacctacaatgaatattgattatccgttctgtgtaaggccccttgcagctgctacgctcaggatgaggatgctgactgggaaggccgagccgggtgggcctgacaccctagatttaacaagcttccaagcgcaggagtccctctgcatttagctcgttttccttgcacctgtcaccgaaaggcttatttccctttcaactactctgagcggccaacagctaaaagagaaagcctcgtgccaggagaaagaagggttgatctacacccagttactagcagacaactgaggttccctcccgttcacccttgtgtccactgcgctcccccaaaaccaagaggtcagacccagcagcagctaaggctaggcctgggaggcagcaagagaacgaccgggctcgcaggcaccccgggatgctcaggcaatgcctgctcctccctcgcccgcggtccaggctccgccggtgcccctcaaagcagtcggcctcccgcgcgctcagcatccctcctcctcctcccccatctcctcccgtccctcctccgcccgcgctggtgtcaccaaccttgggcgtacggatgtgctccatggctggcccacgtctgcagggtcccgggcgggcgcggcctcacgcacctgcgcgcctctgcggcgcgatgggaggggcgcggggagggggcttcgcgcccgggagtgggcgggacgcggtcttggctccgcccccaggtgttccgcgcgcggcgtgcggacccggggctcccgcgcggccctagagagcccacctccgcgcctgcgcccacctgcgccgccgccgcgacgcgcctctgcctggggttgccggggcgagggctgctcgctctctcttaacaggggcagccggcggagcactatacggccactgttctccgagacacaaagagggccttgttttgggtgtggcctcctggaagagagatggggagtacaggctgctccacaccgtccctgggcttccttctagggcgtcctgggatagctaggatttcagggtggggcagaaaagaaggctgccacagacactctagacccaggacggtcttgtaggctcaatgtgtgtgtttcatcccaggcgcggccggcatagcgctcggggtgcgggtggaaataatagcagcagtgttagcgccttggtaagcgcgctcctaagtcaggcatctcacatccacctgcgacttcactgttgcaggcgacacttttcccctggcacagtgttgggtgctcatttgccctctttatttagctccaactgaactgagagatagagatacaaagcatccattatgcggtaccatttccctattgatggtattaacagtagttggtgccattgttagcgttaggcctcttgggaaaagccaaagagaggaagaacgccctccattttttttttcttgcagccctaagagtacaatgctccaccataagtgaaattttatagaattctacatagttctgttcaattttttcctcgctcttactcatctttcaggctggattgtgattttttttttttttccgtagagactctgcttaccgtttttttatctaatacctggacacattgcagccttccagcaaataattaatacggtgttgaatttatttttaaaattccagatccctctttcacaggtcttctaccatttcatcctcctactgctttgggaggcaattagaacaagtttaccattagtttacattattagaagaactactctggaaagccacagctgattcttttggaagtgaaaagaacactttcgttgttgttgtcacataaagccactgaactttaacgctgaattgagcctagcctatactatgttgaagtggaaagggaatttgagagtcaaaataatgcactgtctctacctttgtgtttgtgatttttttaaagagggagttggtaatgcctttaaagatctctagggacacctaaccataagcaagacctaaactacttgattgcaagttaccaaacgtcttctagagaattcttcttatgcaacttttatcacatagataattcagttgcaaatacttttgctaacagaattttaaaatacaaccttgattttaactgggcattttcccaaaatcctgtgatattcaatggcctgaggagatttgaattcttatcaaaaacacttgcaagactttttccagaatacttatatttctcttgaggcaaggcaaacttctgatttggcagtgagaccaaaccctgtttccttagggatggtattgctaattattacaaactcaatacgatcctattcagcgtaattaaacccaaatggaccatattataagtggaggagggaacacatctctgaataaactcagcctcatctggagtcactcagtatgatagggtcagagctgcatttggggttctgcctggcaaaaagtaaaagcggcctctcttcaggatttttatgaactcaatgatgcaatgtatcaatgtctctgttggccttgccctataacaaagatgtggaggaaaagcactcagtggattgcagtcagctctgccctttttctagcagccaaaagggaaattctagggcagcatgaaaagagtgtttactctgtgaacagtcaaggctttaaaatagcctcctcccaaaactgtgaaactgctggaataaaacataggggaaactcttcaagacattggtcttggcgaggatttttgggataagaactcaaaagcataggcagcaaaggcagaaagagacaaatgggattacattaaatttaaaagcttctatacaataaaggaaacga

SEQ ID NO: 587648 - DNA, 4001 bp, Homo sapiens
gctttcatcatgttggtcaggctggtctcaaactcctaacctcaggtgatccgctcaccttggcctcccaaagtgctgggattacaggcgtgagccaccgtgccgggcccactgaagactttatacagcaaaaggtggcttgaggagactaataagagccccctgctcatatcaatcaatcaatctaccatggcttcacccaaactgcctgcaattctaccattagaaatttttattttaggccaggcgcagtggctcacgcctgtaatcccagaactgtgggaggcctaggcgggaggattgcgaggtcaggagttcaagaccagcctggtcaatatggtgaaaccccatctctactaaaaaatacaaaaattagccgggtgtggtggcgcgtgcctgtaatcccagctactcgggaggctgagacagaagaatcgctagaacctgggaggtggaggttacagtgagccgagattggccaccgcactccagcctgggcaatacagtgagatttcgtctccaaaaaaaaaaaaaaaaaaaaaagaaagaaagaaagagattattattttaaggcatatcctctgtacgaatcttcctaatatccaaattatcctgtgaggcaatagaaaatgttgtcgtcattcatttatacttctgtgtaaaacggataatcagtttgccctctcctggctagcgagtagccactaaggagatgggaattttgaatgcagatgaaagtttaactttttgacttcgaggcactgccttggaaagataaagtctggagtacaaaaagaaaaaagaggttaactggtccatgcctttccttgagagccaaccctgttctttcagcaagcagaattgagtaaagatgaagagaagacatcagaatctcccttagtgagaattaaattttgatgacccagaaggtaagaaataatatgatacactgaacatttttcagaaattaaaaaaatggttctgtagcatgtagacactcataactttataatctgtttagttttcctcagaaatggtaaagactttacctaaatcacatccaatcacttcatgaacggtgactgacaataccaattcaaggaatacgatggggcaagaagaagaagaaatttataaagacaatgccgaaaatccacccaaatggtgttacgaaccagaaatgatcatcaggatggtaccagccacacgataaccctgagaactccatccaggtttaatggaaaccgggtcctccatctggacgggtttcagcttggtaaatcctgattctaggccacagagggctcatcttgccggctagctgggcggcaggctgcgcggaaaacgccaggaagtatttcccggggcgcccacaagggacccccggctccctgcggagctggggtggggcgggcactcaccgcttgtcgatggcgtcgatgtttgaatggaggagccacagctcctccgtattgtcctgccgggaggacaggatcaagtggtggcccgtcaggcacagggtgccctcgacagccgggtagaaaggccggtgcagcaccacattgtccacccgcggggtcttaatcagctccgcaaactccatgctcccccgcggccggagccagggaaccgagcccggtaggtgcgaggcggttaccccgccgcagggaagtagcggaaacacccggcgcggggctggcccgtggggcggggcgggccgggcggtgaggctgggcccgccccaggctgggtgggcgcggcgaggcctacagccgccggcaccggccgcggggagacaggggctggggctggacgaggcccaagcgcctctcccgcaccgcgcggttcaccaggcctaggactcggccacagagaacccctctccacaggcccaaggaccgccgctgccgttgggctccgggtcccgcgttggcaagcggagggcagtaggagaaagccgcctcagaatccgcttccacgccctggccgctagggactcctagcggaagtggctactcgctgctggagcccacaacaactccgggcggaagcagcaggtctcgaaactcggaagacgcggaagtcgcagccggaagttggtcctcgctaggtcctctggaaatgcctccggaaacacagccagaccagaagatgtgtgttcctacgagaaaaaaagcttgtctttgccttcacgccctcccgctgcctttcttaaccacctacaaatattccttatcagaagaggtccgggaagagggaggaggtccctgtcttgccttcctccgcttgagtagtatcccctccagaagctcttcagagcgtggggctgctgtaaattgtgataattgttatgcattagccctgaagacatggcaagtaggggatggaggcggtgactgtgaccttacggaatcctccaggggtcagggagggacacagggccactccacaggctctccgagagcgccgcgccacgaggtgtaacctggagcaagaaagaggaaaaacaggaatacctgtgagaggaacccaagtacatgcagtgcacagaagagcaagtcacttgacttgctggcggccaccccgttaatctgcagcagagcctggacttcagtctgcatctgtgaaacccagcgcatgggtgcgttggtcaccaccgcacagcctccccgtcagacacccacgtttcgccaaaaatttattcaaataattactcctttgcttgttcctttcccaccgcccacttctgacatttttattcaaaagtaggaaatagaagagaaatatgtttgagtgctggtctgctgtgacttcattgaccttttaaatcctcaccatctagtacctaagcacagcgagttggacaaactctcacagtattcacaaagtaaattgccacaacctcatcagctcatccaacacttgtccatgcttttgattttgtccttcttaaaatgtacccttcttaaaataaaccactttatagacttgttttaagtgagatacgtaaatgcctaccaactttccttggtgtctttgttgcatagttactgtagactgaataatagttgccattttttatatttttgcagtttaattgctttcgtccaaatagatggaatcacttcctttgtaatatatgaagtgttttaattcatttttataactagcattcctgacagcacaggtatccaccccctgaagttcccattctatagaacaaaatagcaaataagtattttttttttgttccataatggacacccagtatacacccagtatacacagggacaccgcatacagggaatcagctttattttacaacagagcttcactttacccctctggcaattaatagattctgggtatttattaagaactttaaatttaatgcaaagactgttaaataccaccagctcagctctggcaaaggactgttggctttgtttatctcctatcttcatccagatacactgccatccctatcccagcccgatcttgggtccttgaaaaaaatgacctatcattccaactaccagggaggaactccctttgaattaatgaatctggatgacttataagacttcaaaagtatggaaatgacaaaggttaaaatgacaggatgagcagtaaaccctctccagtccaatcagagcaacctttttgagggtgcattcccacagaaacccattaggggcccaacatcaacatacacagagctaaaattccagatgccactttgtattgaaagaagccaaaattctgttcaggtcgtgggaacttgaagtcttcaatgcaaccacaccccagaaattaaccctcacacaatcatgtaagctatgcaattaaccaaactgcatcgtttagaaaacctgtatgcttttcatggaaaccatccctagttaagggcactttaaaggatgcacagtctaagtactgtgaaggtgggcccactagctgggttgacattttcgcttggccactttagtaggaaacttaac

SEQ ID NO: 587649 - DNA, 4001 bp, Homo sapiens
tgacaaaaggcacgagagctgtagaaagatttcaaaatggacaaaaccaggacagaggcagcttgataaagttcaccctgggtgaggtggcagttggttctgaaaggtggaagcaggccatgacagctgagcattccttcccaaagaccatctccgaggcacgaagcctctctaaaccttacacttcatcagacaaaagctcctccaggcgcccaggcagcggctgaagaggggctgtccacacccactcggtgcacagctttccaaacctgcccactcgttttggaagcgagcttttaattaaacaccacctccccggatctggatctgttgaggcaaactggggctgggccagagccaaagagaagctccctaaatacacattaaaaaaataatttcccccaccgctcccaattcccacctccagccagctcgcgcggctggttttatttcctctggatgaataacacggggccctggtctatctctaggcaccagaaaatccacatccgaggatcaggttatccccagtcccaccctttgcaggaaaaaaccagggtgttgttccccgcccccacgcgcgcgcgcgcacacacacatgcacgcgcgcacacacacaccatcttcacaacccttccaagagaaaacctagagtgtgtgtccgtttgggtctgggagggcaggatacagttatttcgggggccccaatcttgcctttaggctcagctgggagaaggcggggcccctgcaaggctgcccgggaacttcggccccgcgccccgcgggagggctaagagagggcacgcacacctttaccagcttcggaacggcccaattaataactaatttgctcagataccccactccaagtagacctgacagccaaggagggactggctttccctctcagtctcctaggctaggggactccttcctgcgagcgggcagagcccccacttcctccccaccaccgcgccaggcgcccccaccccgtgcccggaggaatcaggtgtcctcccgggcatccagcccccgcgggtcccagacacttacttcagggacagacaatgggaaaacttgcagccagtgccttgagcccccgagggaaagaaatggtgccgccccctgggacaatgagcgggggagatggcgtgggacagcagacaccccccagagaagccacccgcccagtgaccccgcagagcccggagcagcgccccgggtgagcaggtgacactccggccgggagctcccgcaggtggccggtggccacactgcagggaagggccgggtgcccggcccggggtggaggcgaagcgcggcggcgaggtcagagcgcggcggccggcgccgcagccgcacccccggcgtcctaccttcatgtcgctgatgatggtctggaagaggcctccgagcgcgctgcattccttctcaatcacagcctccattttcccggctccggcagggcgagggcacacacgcggggccgctggactgcgcgcggggccggggctcgctcaccccagaaggaatttcaccttccgagagacccacctcggactcgcagcctcttctgcagcgaggacggggtgcaccagaccgactgttctctgcccaaaataataacagtaatttaaaaagccaaaccgctctgtagggtattcgcctacaagcagcgctcggctcctggccttaaaaatgccgggagaagactgacaatcaggccaccactggtgcccactacggaaacggcaaagcccatcttgatgcagagaaaatcgcccgctgacccggggccagcgccattgaaaaacgcaagattttccaatttaataaatttttctgcaattaaaaaaaaatcgcccaacagcagagcgggtcagctcgcggcgtccggatctgttgctcgcagctgcggccgccgcctccttttcactcctgcgcgcccggccccggcgctcgctctggctgggctcccggggacgttcggaggggcgcacgcgcgctcgcggccgtgcccgccaagcggaggcgcgctctcgcggccgtgcggccgccgcacgcgggcggggctgggagcgcgcgcccgagaggcgcgtggggcacccgccgcaaagaggagcctgctggtctgctggcgggcaggcggcgctgggccggagcctctccctccggtgcgcacagcgcaccctctcctcccccggccgcccgtcgcagcgcggagagggcgtgtcggcaccctgcctggcgagcgcccacccctacaatggctgcgagcgcgcgggacggagggtgcaccgccgctccccggggacttgcacgggtggcgcgcctagcccagagcccgcttgtagtgagcgctcagtagggcgggaaagctgctgccgctactgcggccttctgagaagacgcccattctctgatgtcaggactgcatcgccgagtcctgattgcaaatagcgaaatatataattaaggagagttcgggggcgtatcctgcaatgggatgccgagttcgataaagttgcaggatgctgggaaagtggattgatttgctgttgctaaatgaatggaaacagcgttagagcttctgtccacgatccatcagtctatcgagattgctgattgcctatgacttggacggttgatggttttcaggcccactgagagcagccagcgttggtataaccgcagggagccctcctgggaggttgaacctgcagagcgcaaatgtgcccaggttgatttggggcctagtggtccattttcacagctccactgcctatctgcataaccaggagccctcattcagatgaacgccaaatgggccagagggaggagaatcaaatgagcaacttttaaaagatattaagacataggcacctaactccggacagttcctttaacccttgagctaaccatttgaagcacaaaacataacaaaagaaaagactggggggagtggggccaaaagaaaccaagtgcaaaattctgtacacttgtgtcagattcactccgtaatgggaaaaggtctggctttgaaaactttatggatcaaagggatgcatggagttacacagcacagctgcagaagataatgttcccctggatcactctgcccaactcttaactgcaacccaccttccccatccgtctccccgaaatcacccggaagggtgttaccttcaggaagtaactgatctcttgatcacccctgctggatcctgtccccaagggcgttcgaatgcatccgactcatcttcaccttgccaataacgggtgcttgacacatcgtttgctgccaatcattattgtgattttaatactattggtattctaactatcaagatgactgcttgtagagccagattgcctggattcaaactccagttcacaacctactaactgtatgcctttaggtatgttacttaacctttctgggcctcagtttcctcatccatctgtaaatggggataatgatggcttctacctgatagggctgttctgaacattacatgagctgatcgatgaaagcacttcaagtggtacctggcatctcgtaagtaatcattcgataaatcttatcaacagaagaagcagggatgaggccaaggctcaggtccagccctggccccatttcacttctgtaacattggtgtgctgtcccaggcacattgctgagggtctactgtgtgcattctgggcattttatacgtattatgtctacttgaaggaaattatcattctggtccttgttgcactgttggaaggaatccaaccctggttttctgacttccatgccccaggtctctcttttacccagcctcctgaactcctgggataaggggccttagcccagtggacacttggtctagctttcctgccacatgcttaaatttcaatgccccaaataccccaactttagcaatgtttgccaaagcatacctctcttgtggcctttttccctgggcctgaccaccaggcccttgtctctcatgaga

SEQ ID NO: 587650 - DNA, 4001 bp, Homo sapiens
gaaaacaactagatttctttggtgttcaaatcatctgtaatcaaagaaattgaagtttaaatatagagaaagcactgttcacctataaacctgggaagaattttttttttttccctttaaggatgattctacatgttgacaagaatacggtaacaccagtattctcacagagagctggtgggaacataatttggttaaacattttttggaaagcaaatggtcaatatgtatgaggagatcttccaaccatcaactgtatttcaagggcactaaggatattaaccctgcacataaagttttaaaaacgtatttgttgcaaaagtatatttagtaagtggaaataaatgaaaaccagtttgatacatctatgtaatgtaatattaagtagccactaagatttctgaagatttcatgacatggaaaatttttcatgatacattaatcaggaaaaaacctccacgcaatagtatatttagataaactatataactataaaaaatttttctatatattaacaagtattttcttaaatattaactgtgattatctttgctgaaattgcttaactcacttttctcaatctacctatttttatacagcaagcacggattacttttgaaatcaaaacaaacagggttaacagaacagggctattaagtaacaggctttttaaatgcttgagtgtaataactgcaggttagtttccaaaaaatataagatattatctagaatcttataatcctattatactccaaaatgtaaccttgacttattgacataattaaaaggtcttgttccaagcatgattttctaccaagcagatttaccaagaattattttctcttcataaacctgattttaaaaagaacaggtgaaaaaacgtggtgcaagttacataaataactacatattattttaaactaaattccacttctaaggttttttagctttggttttaaggataagcatgtagttctaatcttttctttgtatagctttcctaatggaatatattgcctatgaaaaaaaaaaaatctgtaacagcactttctacactgtaaagcactgtactaacaggacatcaccattttaagttgtgtatcatttcctgccctaaccatccctgaaaaagcaaactgtctacagaattgcaattccgtttatgcaattccttttaaagttgtccatgcactgttatcttgtatataccctccttaaagaggtcactggttcccaggaagcaatgactctcttttttaatcccctccctcctgcattgcctcccttcctcctgaaattcactggtaacacccctactcccaccctccagccccagcgctgtgatttagtgatgattgactttcgatcacctgcacctggcaaaacttgaaagcttccacgcaccgttttgcctaagactttggtttcattgaaacaaacaaaacacactggatttcctttcttagaacactgactacttcaaacaaacagtatttaacagagtatgtgtaactacgcaggctaaatgaattaacctcttccttcctagtcccaaattactccaagtcaaaaatcaacaaacaacttggtagaaaggagtacgtcttcaaaaaagaacaaaaacgttcctcagtgaacacctaagtccactaagcactatagagtagtcaataaggtcaccttaattaagatgagatttttctagagcgtgaaaaagtgcaaacaagctgcagaaagtagcgaggcgccacgaggggtctttgggacctgcagcaaccctattccacccgctttctcggccccgcttgcttctgctgagaaggggccctgcgagaaggctgggaccgccgggcccgggtgggcggcgtaaggagtccacagtcaagcccctcggtcactttcaaggtgacagcgacgagatccgcatccgtcccttccgcaggctctgcgctggcccacgtgagacccgcctccgctccgccggcgctgccgccccctttagccctcagcttcggcccccaggcccctggaacgccccctcccctccccgaggaccggtcccgtcaccctgggcggcgcgctcgcctgtcccctccccaccccggccgccgggcagcgggaacagattccagcgcgcacttacccgcagctccttcaagcgctccgggagcaaagacgcagaggcggggagggctggcgccctttgcaccactggcggggtcgccgagaacccgccccggaggtctcgggggcggcgtctgcacctgggggcgcgcggcgcggcaccaccccacgcctgcggcggctaccaggcgggacccggagccccggcctccccgcctccccgcctccggggccgccagggggtggagcagggcggggagttcgggaaacttgtaaatagccgaactcgggcctcccgccccaacccggggcggctccttccgaaggctccactccagcggctcgctgcgggagaccaaggccagccgccgtcccaggggacggccctcggggaacctgaatgacgtgcgaggccgtacctcggggcgctggactccgctcgggcgctcccgctctccgctcccgctctcgggtcccaatcccgacgctccgcgcgctcccggactaagtgcggacgcgccccacgccccccggcgccagcccgggacagcgctgcacctgttgccacgtgcgacgcggcgctcagcggctgccactgccgccggcgcacctggctgcaccgcgcgtcccgggaccacgctcgtccccgcaggagcccggggctccgccgcacccagcgctagggcccaggccgggccgcggtaggtgggggatctgactcctgcttgcctctggccacctgcaggccgaggggcctcgcaccgcggggcgtatagaaggtgggaaggttgcagaattatcagggcggaagcttgcaaggaaggagtcgtgattgtctcttagaagggctgattcgcagtctgtattatcttcatgcttctagcaagtttactagcaagtgtgtattaaaggttaaagaaagtagctttccagctattagagcttgagatacaacgtggaaaggagtctagaaccccagggagataaactaggctcgacctacttttctctaaacacaaacacagtccttgctgtttgctaaactgagcaaatttcatcgacagctgtcttctaggtccgtaaaatattttcttctataaagcatatttttaatagaaaacttgtccgaagatgctattctgcctgtgagagatgtcacattgctgaaccgtgaaatgtcagacaacctgagaacaaaattttaatatttcctttttaattacctggattgtggtttgctaaaagcttttaaagagaagtgaacttttttggagaatagacgtaaggactctgtatttcacagttttctataccatgaatattagaataactgacagatgtcttgccattgatagttgtaaagacttttcatatgtacaatgatccattatttcctgactacaaaacccaggggtatataggtcagattatctccattattcaaatgaggaattgaagctcagaaaggtcaagtgactagcgcaaggtcacacagccagtgagggcaagtgcaaacccagccagcctaactcctaatcttctcttttaattccattacataatgacacctctcatttgcttcagaaatccctgttgtaaagatagatgcaactagcatgatccgtgttgttaggaaaggcatgtgattaattttaaatagatatagtatttaacaccaccagatgagtctccctctgaaaaagcacacaaaaacaaaacaaaacgctgacatagtttccgcaagtcacgaggcaattatgctaattagcaacaagcctccatccctaagcagaatagttcttgtgtgaaacatatcatttaatctttataaccctgatgtgacctagatgatttggtctaaaccccacaatcctatt

SEQ ID NO: 587651 - DNA, 4001 bp, Homo sapiens
ataatcccagctacttgggaggttcagacaggagaattgcttgaacccgggaggcagaggttgcagtgagctgagatcatgccactgcactccagcctgggcgacaagagcgaaactccatctaaaaaaaaaaaaaacaaaaaacaaaaaacaaactaaggtgggtccaaggttagtgcccttttctgcatgttacaccccactcagccagggctgtcagtgaaggtgaagggaaagaacactccatttcttttattcagtctccttctgttccttccatttccaggagaatgcaaatagctttggtctgcacctcttacatttcccctaccatctggctctcaaatataaacatggttttgtggccaaagtggaagaggaagtaatgtctttggaccttactttcctgctaacatcgcaaagttatacactctcccaagacccccttctaaattgcacaatagtccccaaatcttcaactctgttcatgacatacaatatatcatttatttttacccagttactttaatgatcttaaaaactggatattaggtatctgagtgtgaaagaccttataatctttaacctctataaatgagcacatttggtatagaaaccattgtgaaatgttttacactaatatccaaaaggatcaagatcgtaactttgaaattttctacacttaaaagaacacacacaaagaacctgctaaaattcccaaataagaacaatttattgccttacgtattttgatttggtcatttaaaaaatttagtaacattatttctataggatcccaaagttccgagaacccagtgctaattttacaacagcactgtgttatatcagaagttcttaaatgatgccactaaagatatcacatcacaaagaaacaagcagacaaagcgagaaaccaatatttgttaaagggattcaaatacttaagccagtataaatcagaacactgatcaaaagaggaagttaattcttaacatgaccacccattatcagaaacaggaaattttcagcgcgagatgattttttcatgttttgaggtagcctttaaaagtatacatgtttaatactttcagttacaacttaggaaaataaagatgtgatgtttccattttaattttagaaaagtatttttctacacttgcacaactaccagctacatacacacaaaaactagttatttcataagaaattaaaccatcaaaaagtctttgataataggataatttcatgtgccagaacattaacgatgctgctgaattatattaagagtgcaaaacacataaaagagacaacaaaattggtcctacacagaagcattcacatcttaaatatacatacaaaatgcccccaaatactaccattaccataaattacaagttacaaaaacagaagtcaagagatcctaaatcaatttattgaataaaaatttaagcatgcttacaaagaaaagaaaccagaaatcgtcgacctactttttttcccagtaaacgtggctaacaaaggaattatacaaaggctgtacgatcccacgaccagcagtgtcaataaggtagcatcatagtgcctctctgaaccagccggtggggtgagtgtagaattgataaagatttttgaagaaatatcagtttctgtacaactgcgaaatcctcctggtacagtcatttaaaaggatcaaagcaagcttaagcaggaaaaactgcagccatgttcactctcatatccctcatgcttgctcttagtgaattcgaatggagggaaaaaaaaaaaaatgcgtaagctccaaggcactacacaaaacagattaaaccagctagcaaatcaaactaagaaagagactcactgatttgaatgcttaatccgcaacaggaacacatcgccactagacaggctctgtgggtgtatggtaaacccctttgttaaaagacaaaaaggaatggacaaaagcactttacagcctccttaggagcatcagacacagtactgaaacggtggccaagtcaacatggatgtcgatggaaaacacggggctgtggcactacagactgtgtctgcttcaagtgccacaaattctgttgccacaacagtttttctagagcatgttggtgattctgttttggcagtttgtctttaaaattgctttgcaagacaaagagagcttaaaataatacacgtgtgaattaccttttcaaattcagagttccctcttacatgcaagcctgattttgtgccacaccttcaaaattccaacagtaaagctggtaacaatcctgtttaattgcaagtcacatatcccagtattcctgaagtgccagggtatgcagctacttactctcatatgagtccagctactgctgctaggtgacccgtcggaaatgtgctcattaattcggtcattaattcaatgccttctctacaaaaaatgcattctcaattccctcacatagctgctgtgtgattttagaccagtgacaacatctctgagcctcaatcaccttctatataaatatcagggtaacagcagaagttacctgagagaaaaaaataaaagcaaatatggacatcctaaagtactgctccacacccagaggagcctcatgagcattattacactttgtccccaactcctcacccaaaagaagaaactgatctgtcaaactgaagagatcagttcgccactcctctccacacccttgtgtctggttttattggtattctcatcatccatgaaaataccttctttttctcctcaactattttttagaataagggccatttcttttatatcctgtgctcctcactgcgcctatcatggtgtctgtgcacagcgggcactccaagatggtttaaatttatgaattatttcgtggggaagtataaaaaaggaaatgagaaaataagaaccaagtccaaatacatctttggaatgaaagaggtatctcagtaaattcactcatttatacacagaaaatagaactcacgttaactgaaaactttaacaaaattctcctgagtttcaattttttagaattaggattcaagttatattagtcctattacacaaaatctagcatccaaagattccacaggagatagtcttttgcaaagtaaatgaaactgaaataatctttttttctgattccagttagagtccaaatcccctgggttgctactcttaaacctccaaaacaccatcacttcagacgatgcactttcgaatccttcatgcaaaaatatactttaacacataattatttcaagagtgtttttcaaagaattttttttctgccaaactttcagagcaactccaaggaagcagtatgcctatttttcctgaaaccccagaaacaaaaattctaattatttgcagagcattagtttttcttgtaatgactgtttccacaacccccgaagtgtgatataaagtcgacttacaattgttgctgtaagtgctcagctcactgtgggtgctggctattgagggggtgcttcctgtcctccgcagcgcaggacttttcaaagatgctttggatttaggaagtggtctaggcaaattcacccatgacgactgtgcagttttcaaggatgtaggctttccttggggtttaaaaaaaacaaaaagtttccagtgctattcatcccgaaagctggcactttttaagcctgtaaactcaaacttctgcactaacaacaaagtcaaaacacaaaatgaatgttcacaatcatgtaacttcagatgaaagatgaaagcttcacgcagacatgtttatttttgatcatttagaggcaagagagcagaaatgatgaggcaattaggatatgagaagtgtaggagtaaccctgtctcctaaagtaattaactcacacatgttctctgaaggagatgatcaatcagaataatcatgagaaagcagcttttggcaaaactgaaataaaaaaataaacaaattgatacgaccccccatactggtgactaaaaaaaaaat

SEQ ID NO: 587652 - DNA, 4001 bp, Homo sapiens
tggttttgtggccaaagtggaagaggaagtaatgtctttggaccttactttcctgctaacatcgcaaagttatacactctcccaagacccccttctaaattgcacaatagtccccaaatcttcaactctgttcatgacatacaatatatcatttatttttacccagttactttaatgatcttaaaaactggatattaggtatctgagtgtgaaagaccttataatctttaacctctataaatgagcacatttggtatagaaaccattgtgaaatgttttacactaatatccaaaaggatcaagatcgtaactttgaaattttctacacttaaaagaacacacacaaagaacctgctaaaattcccaaataagaacaatttattgccttacgtattttgatttggtcatttaaaaaatttagtaacattatttctataggatcccaaagttccgagaacccagtgctaattttacaacagcactgtgttatatcagaagttcttaaatgatgccactaaagatatcacatcacaaagaaacaagcagacaaagcgagaaaccaatatttgttaaagggattcaaatacttaagccagtataaatcagaacactgatcaaaagaggaagttaattcttaacatgaccacccattatcagaaacaggaaattttcagcgcgagatgattttttcatgttttgaggtagcctttaaaagtatacatgtttaatactttcagttacaacttaggaaaataaagatgtgatgtttccattttaattttagaaaagtatttttctacacttgcacaactaccagctacatacacacaaaaactagttatttcataagaaattaaaccatcaaaaagtctttgataataggataatttcatgtgccagaacattaacgatgctgctgaattatattaagagtgcaaaacacataaaagagacaacaaaattggtcctacacagaagcattcacatcttaaatatacatacaaaatgcccccaaatactaccattaccataaattacaagttacaaaaacagaagtcaagagatcctaaatcaatttattgaataaaaatttaagcatgcttacaaagaaaagaaaccagaaatcgtcgacctactttttttcccagtaaacgtggctaacaaaggaattatacaaaggctgtacgatcccacgaccagcagtgtcaataaggtagcatcatagtgcctctctgaaccagccggtggggtgagtgtagaattgataaagatttttgaagaaatatcagtttctgtacaactgcgaaatcctcctggtacagtcatttaaaaggatcaaagcaagcttaagcaggaaaaactgcagccatgttcactctcatatccctcatgcttgctcttagtgaattcgaatggagggaaaaaaaaaaaaatgcgtaagctccaaggcactacacaaaacagattaaaccagctagcaaatcaaactaagaaagagactcactgatttgaatgcttaatccgcaacaggaacacatcgccactagacaggctctgtgggtgtatggtaaacccctttgttaaaagacaaaaaggaatggacaaaagcactttacagcctccttaggagcatcagacacagtactgaaacggtggccaagtcaacatggatgtcgatggaaaacacggggctgtggcactacagactgtgtctgcttcaagtgccacaaattctgttgccacaacagtttttctagagcatgttggtgattctgttttggcagtttgtctttaaaattgctttgcaagacaaagagagcttaaaataatacacgtgtgaattaccttttcaaattcagagttccctcttacatgcaagcctgattttgtgccacaccttcaaaattccaacagtaaagctggtaacaatcctgtttaattgcaagtcacatatcccagtattcctgaagtgccagggtatgcagctacttactctcatatgagtccagctactgctgctaggtgacccgtcggaaatgtgctcattaattcggtcattaattcaatgccttctctacaaaaaatgcattctcaattccctcacatagctgctgtgtgattttagaccagtgacaacatctctgagcctcaatcaccttctatataaatatcagggtaacagcagaagttacctgagagaaaaaaataaaagcaaatatggacatcctaaagtactgctccacacccagaggagcctcatgagcattattacactttgtccccaactcctcacccaaaagaagaaactgatctgtcaaactgaagagatcagttcgccactcctctccacacccttgtgtctggttttattggtattctcatcatccatgaaaataccttctttttctcctcaactattttttagaataagggccatttcttttatatcctgtgctcctcactgcgcctatcatggtgtctgtgcacagcgggcactccaagatggtttaaatttatgaattatttcgtggggaagtataaaaaaggaaatgagaaaataagaaccaagtccaaatacatctttggaatgaaagaggtatctcagtaaattcactcatttatacacagaaaatagaactcacgttaactgaaaactttaacaaaattctcctgagtttcaattttttagaattaggattcaagttatattagtcctattacacaaaatctagcatccaaagattccacaggagatagtcttttgcaaagtaaatgaaactgaaataatctttttttctgattccagttagagtccaaatcccctgggttgctactcttaaacctccaaaacaccatcacttcagacgatgcactttcgaatccttcatgcaaaaatatactttaacacataattatttcaagagtgtttttcaaagaattttttttctgccaaactttcagagcaactccaaggaagcagtatgcctatttttcctgaaaccccagaaacaaaaattctaattatttgcagagcattagtttttcttgtaatgactgtttccacaacccccgaagtgtgatataaagtcgacttacaattgttgctgtaagtgctcagctcactgtgggtgctggctattgagggggtgcttcctgtcctccgcagcgcaggacttttcaaagatgctttggatttaggaagtggtctaggcaaattcacccatgacgactgtgcagttttcaaggatgtaggctttccttggggtttaaaaaaaacaaaaagtttccagtgctattcatcccgaaagctggcactttttaagcctgtaaactcaaacttctgcactaacaacaaagtcaaaacacaaaatgaatgttcacaatcatgtaacttcagatgaaagatgaaagcttcacgcagacatgtttatttttgatcatttagaggcaagagagcagaaatgatgaggcaattaggatatgagaagtgtaggagtaaccctgtctcctaaagtaattaactcacacatgttctctgaaggagatgatcaatcagaataatcatgagaaagcagcttttggcaaaactgaaataaaaaaataaacaaattgatacgaccccccatactggtgactaaaaaaaaaataatccattaggacaataggctatcatataagaaataaataagaaccaagtccaaatacatctttggaatgaaagagagatctcaggaaattcactcatttatacacagaaaacagaactcacgttaactgaaaactttaacaaaattctcctgagtggaaaattttaaaatcacccaaacaggaagaaaaatgcaatttgataagcaaaaatttcatttgaaaaatgcctaatgttctaacaccaggtggtgctatactattaagatttttttttttaatctcaccttttcttctttactccccacacagtttatttgccaaacttaaatgatcttcactccaacttgcaactc

SEQ ID NO: 587653 - DNA, 4001 bp, Homo sapiens
aaatctaaaacacattaactttaaaaaggtatagaatatatagtacgcttttatttctgtataacaaaaaagaataaaaaagacctgcatagatttacatgtgactggaaacgtgcaagaacactatgcaagcagctgagagcggctgtctccacggagagcagacagggactctgggtaagagagaggcttgcctaggactgcacaaccttccatactgtttgatttttaacttggagcgtggattacagtatttttaaaagaactctttaaaattaaaagctatttggagctactttagatcagacaaattattgcaaatatagggcaccctttgttatttttcccccctattaatttgttcagttggaagggctgcagcggccctgagctgggagaggagggccactgctgacctcctcctcgctgcctccccccatttaccgtcagctcagactgaaagggagaggctggcaaaatcaaatgacaggtcaaggggagttatgaaacacgagagagaggtgctggaaaaaatgagaattctcccacagagaagggagatgcctctgggaaaactaaaaatagtcagctgaaaacaaatcaccagggacagagatgagccacgtggaaaataagaaacacgaggggtcacgtgcacatgaagcagaaacaaaaatctatttacatcctcatcaaacattcctgtgacacctaacgctattcagcccaaaacaaatataaaaacaccccagctaacatattttacagaataaaactgatttaatttactgtagctgtaaaatcatctaggacaaaagtagcaacataggccaacccaatgccctaaaagtgagcagacaggtcaccacgtgcctaaaatatatactaaatttattttcatcttaggcaccgaaaataataagcagatacaaacataaacctcaggggaagtattttgagactgcacacacttttattatgaagattggaaaactagatttgtgattcacttactacttccccataaccattaggatgttttctgtcagaagtgtttagtatacagaaatcttttagcatattaaaattaactgtcaaatctgactgagaaactatccaatgaaaaacgatgggaaccttctcatctacacaggcgaacaggaaatattcttctaaatttacctgtgtcctatttcccaaacactggaactaaaatataatttaacaggtgctgattttcacacatttggctggtgatggagaaaagagctagggaacaccaaggcaacaattctgccttccatcaacacaaacaacacaatctgctgccaaaagtaaaagtactatgcacttgtgctgaagcaacagaaaacaatttttaaattaagcctcatctctcattagagagagcttttttcctccaattatctgtctccttggaaaaacctctgataaacatctgcaaattaatgaagacatcccccgtgcaacactaaacagagatctatgcgagacagacctgtgtggaaaacaacagtgcttctcctaaaccctgaaggaagtcgaaggtttcgaagcaatcctttggccgtcagtcgtatgtgaatggtggataaggagaatttgggagacaacaacatgtcttcggagcaggtggcgagatttcacagaagaggcaatttccatggactgtcacatactgtctttttaaactcagtactcttcaaggccaagaaatacagtcagaggaaagatgcctacacagcaaatgtcattccaccagagaggcatagaagaaaaaaatcccccagggctggccaagtgtttctggcttccgttttcactttcagatgttgccaaaatgatgctcttcctctgaatacaatctccctcctgcaggtctagaagctgcctctgaaccacatcacactgtgcatgcttgtggagttgttatggttttcatccgagatggtaaaggggaggagaaagtgggtggtctcaggagctttacagaacaaccaataatgtcacagatcctgtaaccacttgaaagatcgctaggggaaattaactacttcaagtgcctaatgtttctttcataattagaaaaaaattaggatttcctgaaagtaaactgtgtcctgattttaacatttttcactccttatattcacaatgataacatgagcattttttctctagatattttacatgtaaactacatttaaacctggtattttggaaaagttttttttttaaagacttcaggcaataaatgttctcaactacaatatttaagaaaatttctattctaatatattaatgacagattgtcaaaaggttaaagttcaactttaattcccacatgctgaggacctcacaaataatcaacagtaaaagattaatacggtttctctatcagatgtaatatcagagttccagaagaatagtccatcagataggcatattctaaagactacatttattgcatgagtaattgcatttatagaacatcatgtggtctcttatagtggtctttcaagactaggagtgtgaggagggcacagttatgaatatcttttgccagttatctactaatttttatttcagtagagtggcttgtaaaagtatgttaaaacatgatagcaaaaccaaaagaacttgaaaaacaaagatatggttataagaattaacaacaacaatatgcccacttaagctaattccattaaaccacgaatagcctgagctcttaacatttttaaaaatgttataaacaaaacaatgttttaaaaatgtcctatgcctgtttccaagatttcctagaaaataagactcagaaataaatgcagaattgttaccataaataacactattaagtgctattaaaactagcaggaagcagttcttttagaaattctatagagtagggtatgaagcagggaagagagagggaggaagagaaaatttaaataagttctcttccctcaagccccctccctcttcactcaagcccccaacttgccattttagaggttgtcagcaagagagacagacccaataacctgtccagggttcctgtgagaaagatacacctagttcatacactgacgaaaaacctgctacatacattgcaccacagcaactgaagctaaatgatcaaggaattaaaatcaaggccagctgcttctaggtgttgccttttacttcatcccagtttattattaaaaaacctgaacaccttttccttccagattctacatactaaaaatataccagaaccttttcctctacctcccaaaaccttgtaaaaaccaagaaaccaatcagcattaaaaacaaacagaagaacagagtcaaattttgccatgattaaaaacagacatgccaccactccatatagtaggaggtggtttttctttcttttggttgtgtttgttgtttcttcagtaacagcaaattctaaattatccttttttgtttgtttttgtttgttttttgagatggagtttcactcttgttgcccaggctggagtgtaatggcgcagtctctgctcactgcaatctctgcctcccgggttcaagtgattctcctgcctcagcctccgtagatgggattacaggtgcccgccaccatgcctggctaatttttgtatttttagtagagatgagttttcaccatgttggccaggctcgtctcgaactcctgacctcaggtgatccacacacctcggcctcccaagtgctgggattacaggggtgagccaccacgcccagccttaaattatccttgttaaaagggaagttctttagactccctaaaagaagaaattaccatctaatcatcgattaatcagattcattaacatttttacttgaattacattaagctataaccacacatattgaaaataaacattgttaatgatatctcttaacagcagagcaagaagctgcaggaataaactaaattcagttctttcccaaacatagtctgcctcctg

SEQ ID NO: 587654 - DNA, 4001 bp, Homo sapiens
tcacacattaataaacttgttattgagttaacatattcaattgtcatcttatttttaaatttttttatatttaaaaattcaaaaagcctaaaccagtacttcggcaatcataattacaagagctttaaatatctatcttttctgaagattgatgttaattgggtccttgaagttctagaagggtggttctttcctgggtgattttgtcccccaaaagatatttggcaatgtctggagacatttttactgtcatgactgagggaagtggagtgttactatctctactgggtagaagccagcgatgctgctaaacatctccccattacaaagaattatctggtccaagatgtcaatagtgcaaaggctgaaaacagttttagaggggtctgtgtacacatttatttcatctcaagagtttgtcctataacttacttcaaaactaataagcttacagagacttaaggatttctgcagaagcatcctgcacacagcagatgcttaacagaaaactaaggaaaaaacaattatgtatagttactgccaatttttagcagaactctgcaatgaatgacccccattactaaatttcaacttaggaaatacatctctagttaagattttggggctgtggatctagataaataaatatttggaaatcctgccaaacatcttttcaggtttatttgataatgctgaaaatcggaagacatcctatatttttgttatctaagcaattactccacataatttatgagtagctgctgtaatggcatgtaaacgaaaattagatgcataaattcatcctagcacattttccaggcaaaggtggaaaaaagtgccttacctctgtggaacacttaggtacggtcagagccaaacacagacactcaaaatattaagtgaatcaaacacattgttttatttcaagatcaagctactagttgttactactagttgttactatgtgacatggtcccaagagaggatattaaaatatacatatatacataaagctgagcatatgggtataggaattacagaaaacatcaaaaaagtcctctcagctattccccagaggattttccacaacgtttcaagatagccaagttggcagaggggtggccgcccaggttcaccgcggagttcctattttgactgtaccgtcattcagaaaagagtcgcccgaacaccattttcaagtcctcccggcaggacacagtcagttttctctgcgtagcggactccctaaaagcgctcgacttacctggcaagaaacctgcctcgaagaagtggcagcatgaggtcagaaatctggacgcgcattacggggagagtcaccgagaaacctgggcatctcttacgtcccgcgcctcaaacaccctggtccccaactctccacacgtcgcagctgccctccggtcatcgaggccaagcggccgcggggacgcgggaagaaaaacctctgccctcgccagggagggccttatggcgggagggggcagcgggataggaaagagaatctgagccgagacggcgccgacaggcctgggcgaaaggggtgccacccacctgcgcgacctcttcgccatccttcaagtaccgcataggagcaggctgggcggggacgcgggtcagcctcctccagcctccggcgaatgctccttctccccgatcctctagccgcttccctcgctccctctggaggcggccgagtgcggaacgcacgtcctcgacagggcaggacggagggacagcgggggcggaccgcgacccgaccccgaccccggcccgcagcgccgctcttagccccggcccggcccggccagggatacccccaacatgtcaggaggcgcgatcccgccctccgccggcttctcccgccgcttgtcagcctccctgccctggccccagcccggctccgccacaggcgcccgacccctgccctctcccccgcagctagcagttctgcagggctcgcagtctcctgcagggttttgtccgcaccgccgaatctcgcgcccagcctccctcaagagccgccgtttgaatctgcgcacgcggccctgaacctcattggctgtgggggccgcacgcgaagaagcgagggcggggaggggagagcgcgcgcggctgagggcggggctggggagctggaagctgggactggaactcgcgggagtcggggaaggagccgggagccagggggtggggccgcgggtggggccgtaggtggcgcatgcgagccgagctgtcataggacccggaacgcgccgagaggcgcaccgcgcggggcctgctgggagagcgagttcctgcgctcgccgaggagtgggtccggaagcggcgccggagcgggtccggaagcgggcggtggagaagtccagttgccccaaaattcttagggtgagcgaaccgagtttctggcggggtgggtggtcccgcggcccaccaagggaacgtctccgcagcctcgcctcggcgacagctcctggctccttaggtgtcttccgcctcactagttaggatgcgcggtcttcagacttgagacaaatctaaccataaatttgcgcggccgttattttttaagcaaaaatgtgagctatttttacccagacatcatagttacgagagtgacgaagactctggcaggaaaccaaatatcacctgttttcctcaaaaagcagcagaagagtgacaagtgaaaaaagttcctagcgggagacgtgcttggaaccggagataatctgtgtctaccgctggtcttcaaggtgcttaatttcgtgcccgctctacaggaaataacgtgcgcggcggaggagccctgtcctggagaataacgcgtgaagaagacagtggactgggcatttcgtccagatgaatgagcatggtagttaagtgtagaaggtgaccttcttccctctggagagaccagggaggggggaaccaccggaggagtttctagcggttgcagctacttgaggttccagtctaataactacgaactgttcatttcaagtagcattaaagtagatttgctacagtaacaattacacttggctaaggaaaatttgcaaggcaacatggtctattgcatagagcactgagccacatgttaacactgtaacaaacacttgctattttgaaattttacgcttcatcttttgcaaatcagatgcaggtgcagagtgaattaagaggagctgaattaagagagaagcttgcatgcactgctgtcaaaacctaaacacactggcttttttttttttaacagttccttttttcaaggtatagattctgggaaggtaagggaagataaaacagcttttctttttctctcctgtttttttttttgttgttttttttttgagactaggtctcactctattccccatgctggagtgcagtggcacaatcatagcttacagtagcctcgaacagcgatcctcttgcctcagcctccaaagtagctgggactacaggcgcgcgccacaacacctggccaagcgtttcttccagatcattccttactgggttgctggttcagtaaaaataaaaaaataaaaaataatttagaaatgagttcccaaatttcattatgttcccaatgtcatttggaatcactgtttcactgttttcttatttacccctgggtcgtacattacttcacttatttatatctaacaggaagcagagcttctgctatattttaggctgtattcagttttatacagaataccttttttagagcttgaagacaaatgttttagattttgacagtaaaacaaatttccctcatttttacatatagagaaaagcaattcccagaaagataacattgtgaaattactgaaatcagttataaaactcagggcaaagtgtggaattaaagtggttcacagtcatttgaatacacatactcagatgtattctaaactaagatgagtttttttttaagcaaacgtttagagattttattcagagtatataaagaactctcaaaa

SEQ ID NO: 587655 - DNA, 4001 bp, Homo sapiens
ggacagtcccctgctatctcggagacgcacttagtgaaccagcggcttggtgcccgccgagcccccgctcccccgggagcccggagcgcaaagcccgggagtcggccccgcagcggcagaggaatcgaaatcggccctggcgcccttaagaagccgcgggaggtggcggtgaggaaaacaatttgccaaaatccaaggcacaaagttttgcgccacctgaaggagaaggcgagaggcgcctgggcgctagcggctgcgtgaaccccgctccgcgccggggcccctccgctgcggctgttcccactcgcgccctagccgctctcctacccccgccggcaccgcagcccctcccaaccttccctctccaccgcccccgtccccacccccagtaccgcccccgtccaacactccttttgccagcttttcttctttctctcgccggctggagtggcgagctcagccgcgggctttaacacccctccataaatacaaggggggtgtcaaataataataggggcacctcccttcgcactcaatacggagatgcaactgcgccagagaccccgctgcgatacctcccccggagccaccccaccaagggtagcagctgttctggaaccgcccagagccccgctcctcgcagttcctccgcatctcgggcgcgaggacacccgagggcggccgcggcaggggagtcagggctgggtgcggagattcgccctggtttttccaagtcaacgattccaggagaatcggacacatcctcgcctcccttttcccctgcctgcgcctacccaacaccacgtcctaacacctctagagacccaggttttaaattgtattattgctttttaaaaagccaaatgccaacttcttaaaaggatcagggcgggttggaatcgccgcggggacaggcgggcgggacgcgccgcagtgtccgtctccggctgtcagaaatgcggtgagccgaaatttaaatgccctcccggagacggggacaagtcagcggctgcggagcgatctggctcacacaggcgatatgcggtccctactccaaggagctcaggatgcaaggggctttctgcccaccgcaaagcaacccccagccccccaaaacccagagagcaattaacacaataaagcaggaatgtccgaccggccgggagtcagcgtgaatatattcataaggcagaaatctcgaaagggtagtcttaaaaaccattcccgttttccctctgccttctcctctcccatcttgacaagtcactttaccccgatccagttctggattaccccccaccccagccccagttaccataactactctgagaaaagtgtcaatagcgcaggaatgggagaaaagacaccctatttaggcattcgactcatctcagcattaaagtgataaaaaaataaattaaaaggcaagtggacttcggtgcttacctggttttccactacccgaaaaaaatccagcgtctaagcagctgcaaggagagcctttcagagaagcgggtcctggcagcggcggggaagtgtccccaaatgggcagaatagcctccccgcgtcgggagagtcgcgtccttgctcgggtgttgtaagttccagtgcaaagtgcccgcccgctgctatgggcaaagtttcgtggatgcggcaagggttgcggaccgctggctgggggatcagcgggagggctgggccagaggcgaagccccctattcgctccggatctcccttcccaggacgcccgcagcgcagctctgctcgcccggctcttccaccctagccggccgcccgctcgctccctctgcctctcgctggaattactacagcgagttagataaagccccgaaaaccggcttttatactcagcgcgatccctccctccgttctttttcccgccaagcctctgagaagccctgcccttctcgaggcaggaggggagccagggacggccggggcccggcggtggcggccgcgagcagcacagctcgggggtcctcagccgtccagaccctcgcattataaagggccggtgggcggagattagcgagagaggatcttttttcttttcccccacgccctctgctttgggaacccgggaggggcgcttatggggagggtggggagggtggggaaggtggggaggagactcagccgggcagccgagcactctagctctaggatgtaaacagagtaagagagccgcatgaattaactacgcgcgcctaccattttcttttgctccctctcaaaccctctccctttctctgctgctcctccgtagcagtactgtttgacaaaccgcatccttgtcctgtgagtataaatcatcgcaggcggaacagctgccctccacaccgagaacgcactgcgcgcccaccgccacgccacgcgcgtaccaggctgcagggcgcctcgctaaggctggggaaagggccgcgctttgatcaagagtcccagggagagtggaggaaagaagggtattaatgggcgcgcgttcagagcgtgggatgttagtgtagatagggaggaatgatagaggcataaggaggaaaacgatgcctagaatgattaaaataacccagcaacgcattgccacgtatacttggagagcgcgttatgaataaactcccattgcatttgttggggggagtcatgtattatgcattatgtatgcacagctatctggattggataccttccacccagactgagtcccccaatttgctgccaaagcagcagataccgcccctcctgccccgcctgctcaggcttccgtggggccccgtgcgggaggcgtctgtttagccctgagatgtgtctgcctgttccagagctgggctagggcgagagggaggttgcctgctctctgccagtctgtaccccaccgtcccacccccacgcctcccacacggagttcccaatttctcagccaggtttcagaagagacaaatcccctttgcgccctgtggcgccggtttgcaacagtctcgggctgccgggtttgggagaaatcaaaggtgctagacgggagaatatgggaggggcagggggtacccgaaccgcgggaccggacttcctaaaaggggcaagtggagagcttgtggaccgagccgggggagtcagcagagacccttgtgaaaaaaaccgttaactctttcctccccggacaaaccggacgtttaattcctttccaggtcctctttccccttttattattggaaatgcggtcatgcacaaaaaatgcatcgattctgatcaaagaagaggagaggagtattacttccgtgcctttttttgggggggggggagtcttgagctaattaaaatttggctgccttccaggcattaatttcctagttcactgactcacaattttttctgaatactagtgaaagtgcactgtatgtaacccgcaaacgtgtattcacattttatttacgcttcgacttagctagttgcccagccccacacatgatttgtttgctccctgaaatgatctatatttaatatataatgtatattccctcgggattttttattttgtgttattccacggcatgaaaaacaaaaaacattcttctcatccttggtccctcacccaaaggcattttaagtaaacttttctctccctccaccacctccaaaagagaaaacaattcgggggaaaggggtgcgtgtatagcatgtacgctgttcaagatgggttattacccgttgagtttgcagctcagcgttcaagtgttaagtgaatatagtagcttccaaatccgatgcactgcacaattcagctttaaggattgcaaattactcctgcctccaggcctttgccgcaaacgcggggagcaaccaatcgctatgctggattttgctgcaaagcgtctttccctccgccccctctctgggcagcacccgcgttcaggtttgcgaaagtaaagtaagtgtgccctctactggcagcagagatcatcgcgcctggatgtcaacgagggcgggg

SEQ ID NO: 587656 - DNA, 4001 bp, Homo sapiens
aactcaaatccagaaattggatacttgagatgctcatgtaagcatttcctttgagagtcataccagcgctcacaaagtttcagaatttagagcattctggatttctgatcttcagatttggaatgatcaacctgtactatttatgacactataaagaaaatgacaggacctgggccgatcagctccccaatgtccctctactgtctacatagaaagctgttttcctttttaaggaactatctcagacatgtgttaaataccccctacacacaccaaccaaaaaaaaaaaaaagaaaaaagaaagagagagagaaagaaagcagcttttcctcgcagggtagtttttgatgtgagtccctggggctcaggcgcattgggaggctgagactccagtggggacctgctgaccttcagctcaggggcctccacctgctctgctgtaaaacagggggctgagtgaggtggcagctaacagtcccccagcttggacagcctgtgtgtagataatcctggcgccacgctgtactgttagcacagaccgtccccagggaaatatgacttgcccgggtcaccggtagggccacggccgaacccaggcgccagctgactctcctgacagcgtccagcccactttccaccacagcccagctccccggccactcccggaatgctcctgacacgtttaggaatcatgacaccaggatgaaacgcgagcctctcctccagtgcaggggaccacgtgtctgatatccccatcctaattccttcctgcaaacaacgtgtggagcccattcctcatgtcaccaggatgggttttaatttgcaaaaatgtttgaagtacaaaacattgacttccacttaatgaaggaaattgtttgtacagttaaaaatgtcaaagtcaataaatacaccaaattaaagctttctagaggggaaagggactcccagacacgcagcgttggcctgtgccacaagtggctaagcccttggctcccaagacaagttttagcttgggacttggtttattaaataacgccttaaattatctttgttccacgctttctttgagtcctgttttacttctacttagtaagaaaggaatgtgaaatggagaattagaaaaggccaggtgttcccagtgatggcaaaccccttccttccgtttgcctccggtgccttccacgtgcaaccacccagccccactgtctttctccagcaggttgcatttcaagagcacgccctgagaaggcacagcctctatcagcggagtggagctgaagaagtctgaagggtcacaacacacccaacagcacaaagaagaaaacagccgtaagaacgctgtcatttttgggcaaaaacttgcaagtcctgacaaggattgttctctttcccataccgtggataatataggctaggtctaagctgaatgaccctcgactcttttttcccttaagaaaatatccagttttattatttcacacctttataagtcagccctctcctcgggggaggctttcgtttctgagaatctcatgaaacttgcagacatcagtccactgactggggggccccctggggccacgatgagaccagggctaaaacccaaagcacacgccgcagggtgctaaacggcacttagcaaagaccacggctgtgggaaataaaatgttagttgagcataaaacctcgtcaaagaaatacagatcccagaactaattgctctgttttccacagtaaagggtgcctgcgacggggtgcactggctctctcttcttgaccctgaagtagaggtacttagaaaatgtgagtgcagaagttaccggtcctccccttaaagccacaaattagaaaaggcaagaagagaaagacacttacccagacagaaaggaaaattgcaaggaggagagagaattcctgaccaccggctcaccaagccacccacactccagccgaggaaggcagagctgactcctgcaaagcaagcgcctgtgcctccctcccgtttaaggtctgaggagctactatatatagacgcctgggcctgcctctccccacatcaatacccacatcgtaaatcaccagcctgacctcaggaggaaaagcttcttgttcaaactgagggcgggggaaatcacgattcaaaactggaacgtgtcctttctgagtcccaaactgcacttttcccaggaaaccgggtgtgacacttcagcccccgacccagaaagagagggcagggcactgacttcccacgctccctccccgcaactctcctccatgagttctaatccttacgtgtgaattctcagacatatcttcaatcctttcgagctacaggttccctggctcacaaattgcaactcctgaatgagtctttaataatgacatggatttcagtgagcatttgtgccattcgcaggcctggacacccgagttgaggtcggctgtggagggagggaggtgcacaagcccctgggtttgtgagcgtgtgtgtgcatgttcgtgtgtttgttcgtttttttttttttatttcaagaacgactcaggtcttcactcgattgtatcttagggctattttagcaagaactgcctacccaaaagaggagcggtgcctagtcggcaagtcggggcttatttatagccattaccacagacgtacactgcgtctacaccacacggataattgcagggtgcccgtcgtttcgcacagcgtgtgtccaaatatagataacacacacctggcacggtcctgggctgcagcctggccaagaggcggggcctcaaggggatgcccccatctgaggacccggagaatcacactccagctgcacctcaccacaggggctgaggacttcggccagctgctcagcccacgggggctatgctccccagctctaaaacgcatggaataacaactttcctgtaagtttgttgtgacaagtagagaaaatatgataagagaattgccttaagaaactccacgttctcacactggggtatcagaggcacagccaaggaccagcgagcaggtggatggaggcgaagatcagatacgagaaagacgcgagcacagcctcttgctgggccccagagcgttctggatgctggatcaggaggcgagtgtttctgtcttcttccccttcgtattctgatggcctagcatttaatttaattagtgtttgttgagtgatttcttagtctattcaggctgctttagcaaaacaccatagaccgtgtagcttataaaacacaggagcttctttcccacagttctggggactggaagtccaagatccaggtaccagcagacactgcctggggagagccttctggttctgggacggcgcggtccctgagtcctcaccaagtcaaggggccaggccgctcttggggcctctgtatgaggatactgatcccactcgggaggttccacctccatgaccttgtcacttccctaaggccccacctcctcacaccatcgttttgggggttagggttttaacccacatattttgggggggttgcaaacagcaagaccagagcaagcaatgtttacttccggtttatcagcatctccttctctagcgaatccatttctcagggacctgggggacttcccttcagcccttctgcccccctgcctctgagtgtggccgacactggaggggcagtgatggtgcctcgtcccctcaggtggcatctcagtcctctgagtcccagtcctggcatctcagtcgcctgggtcccagtcctagcatctcaggaggggacaatctcatcccggggaggggcctctcctgagagaaggaagggccagcacactcctcctccttttctgacatttcacggtggctgtgccctccttctgtgatatagaaatccagtgctgcgtctaagaaagcctggatctttcagccacaccacccagagagcagagtgtgacccgggacacagataggctcctgatggggacagagcttcgccttctgctggggacaggagac

SEQ ID NO: 587657 - DNA, 4001 bp, Homo sapiens
agtacctcactgtccttccctgcccattcccaaaccccggggatctcccaccaggcacacctcctccccgggaaactcactgggctgcagcagctcggaagaccttgcggatctcctgagcctgctgtagcaggtcaccactgtccagcctcacgcccactgcccggtagcccagctctcccagggccagggcgactgctaggaagttggggagaccactcctgcagaaatagataagggagtcagaggctgctgaggttctgctgagcccacccctaaagtgcccgggctcacctccacacgctgtaggtgtccaggaggccctggaaggcccggggaaaagccaaggcataggccacaaaggctgcccgctcgcctggatgcggctcctgcacccccagccccaggtgggcacacacctgctccagccacacctgggctttggccgccaggtccaccccagggccctcaccagctgctggcgccaacatctgtggaacagagtcggtgaagaatgggggccaggaatgcaggatgaggcctgggagcagccagggacaccctagtttgagagcaaaggtaatgcagcccgtgccagcttcctgggacagcactggggtgacctgcctgggtggcacacctctcgccagggcaagggctggcttggggcctgtcgcctggagacagcagggtttagaggagggactgaccgggtcagggggcacctcgctgcctgaaaaggaagtgacgaaggagtgggccagggtcccggccaccggcacacctcgcagctggcccgctagcacgttgctgctgctgtcgaagcctggggaggaaggcggtgggattgggggacctcgggccaagatggggctcctccttcccggcccttgccttgccccgcaccagacactcaccgcccaggtagctgtaggtggaggctgtcaggcccccatcggggccctgagcccgcctcaggcccatctctagcagccgcttctctggccctgcgatcaagcgaagccgcgctgcgttggtggccaccaggctgtggggagccaagagtcagggggtcccagggtgaggatcactaggccacccaagacggcggttacctggggcctggaacttccaacctgggagctccaccctcacccagcccctccttacaccctgaagagtgggggcgggaggccagtcctgggacccctgggcagccagccccgccgccacagtccagcacggagccccggcgctgggggcccatcccatgcccacgctccctgccagtggcccgcagcccacctggcgtagctgaccaggcagagcagcggtgtctccagcagctgcaccaccaggagcggcccggacacctgcaggagcggcacctgcggggagagaagtcagctccgcgctcggcccagcaccccgtggccgccgcgccgcccgcttacccctactcactccggggaaggcgagggagccctcgggcagggctcgcaccgtcacctcggagcagtcgagggcccgaaggtgctcgaagaacgcaggatccgtgtctgggggcagcaccgaggccaggaactgcacgtctggaaacgaggtaactgcgctgagaccagcgcggggacagaccggtcgtgggacatggggggttccacggggggacaaggacttccaccggccataggtgggggtttctgccgggcgtggggggctcgtcgcgcggacgggggactaccggcgtcccgcaggcggaaggcgcgcaggaagcgcacacagtcgcgcaagccggcggccaaggcgaaggcgccgccgaacgggcagcggcggaagaagagctcgaactcggcggcgtcccgcgcccggcccgcgcgccaatagcccaacgccatggtggcctggtagaggtcagtgagcagcggccgcgccgccgcgcgcgcctcggggtcctgctccgccgccatcctgctcccgacgtccggactccgccccgccccgaccccgtgacgcgccccggcctatggcgcactccctgtggggcttatcgtgccgtttgggagcggcacgggactcgatggaggacgggtggggctaatagtatcggcgcgccgagaggggctgaaacagctggacccgggatggggtgggggatgtcacccaactcctctcggaccccccaaccccactccaggcccaacggcctctttggagcgcagcccggtcttggtcaccagaggtgcccccagtcgctcgtgtctctgccctttggccgggcaatgaggtgcagctcaggacttgccaggcggcggaaagggtggaggacagaccagccagactccacccccaccgacccagaagacaaccgctggccagcagccagctcctgccctgggcctggggagggaggccagaggctgccttagttagagcttgagcagccaggctaggacgaggcagcccagatggacgcaaatgtcgcttggaaagagcttggcacccaggaaagggcggcgtggggcaggggggcgcatgcccactgtcggctggcaccaaaagaccttttgtggctatgaaggcccagtgtccctcagtggtggcttttatggggtcctgcagtccaagccccacaggaaactttctaaaggtttgagggcaaagtcaggggccactacccagggagaatccattcccctgtggcttggggccccgaggacagagtctgaccagaagtaatcaagtaattacaccccatcctctttcaccccaatgcaaacacgggtggtccaggggagggagtgtggccacccatgctgaccacatacggctgtcaggatgctgaggcacagctccacagagcccaggcagccacgttctggccaccccagaacatcatgggaggggcacagtccctggagcaaggggcagggattccaggaatgaatgaggtgaggggagggccgggacagcacatgacaaagggcatggcagcagggccgggtgctactgggacttctttcctggacaattccaggcttgcacgcttgctcccatggggacaatgccaacaggaggcagagtggtggggtggtggcctctccagatagtgacctaacagtttctgtttctggctttttaaaccccctgaactggacttgcttttgcaatggaaagaagagggagggccagagctttgggagggagtggccaggagatggagggacaggcggaggtctgctgggggcaaggtgacatggccacagagggtggcagcagccaggatgactgtgtgggaacagcagggcagagatggggctgagacagggagggagacaggccaggtacgagcaggaaatgaccaggacggagccagagggccggtctcagtctttaatcgtggcagggcctcacgcacgcgcgcacgtacacacactcaggcttcagatcttgttgaaagctgcgatatcgacactctgcacctgaggagaggcggagggtgacggtcagggctgttcccctacagcccactcggagccaggagcctcctctgaggtggggttcactctgggactcgctccccactgccgtggggtggagtgcagggtatgggccagggtccccagtctcctctcccctcctctccccggccggctcactcacgtgctcctcaaacttggtgatctcctcctccagcaagtctgtccccaccttgtcgtcctccaccacacactgaatctgtagcttccggataccgtagcccacgggcaccagcttggaagccccccagaccagcccgtccagctggatagagcgcacacaggcctccagctgggccatgtccgtctcatcatcccactgtggggaaaggggaggaaaagctggggtcagccaccctcagaacacccaggaagtacctgcatgcaccctaccctcaaccactgtgtgtccacaattctgtttccttaaagggcccacagaaaacaatccaaattcacaccttc

SEQ ID NO: 587658 - DNA, 4001 bp, Homo sapiens
tctttttctttattgctaaagaaacctgtattctttctcttaaaaaagttataaacaagagcccaacatagaagaattaaaagcagtttaacccagaggtagtctgcctatgagatagggctgtaaggccttaaggctacaatcagcacaagtacaattgtggactgagataaaatcatctacgcctgctgcatagatttctggcattaatgattagaagaattacaaggagagccaatgagtggcttttctttctgtgttttttcttttcttttcttttcttttcttttcctattccttctcttttcttttgcctctaccaccatgaaagaagggcatggaatcccactaaattgacactacaacctagccccctcctaagccagctcactgggcctctggatgaaaaggggttgctggactagccgcacccaaagaccatcattcaacagttgttcttgtccagaaggccactcactgctcccatttaatgccgactggggccaggcaggtggtgggggttacttgcaccaggccagaaaagcaaatctaaagaaaaacagctgctactgctgaagacagcaagggccagacaaaataagtctctgggcagcgtgcaggtagaaagttgacagttaaaaagttccttttgaggaggaaggtggtgtcacctgttttgtgtttcaagcattcaagagcaaacagtatgtctgattttttgtttgtttgtttcttaattaggaaagagcaaacaagtataccattgtagtgggcctcatgtcagggcatgggagcagcatccagggtagaaagcctgttgggccctcagctcctggggctgtctgtctaggccagtctcctctcttctgtggaattctgcaagtccatgttcagggggtgatgctctcggtctgacggtgaaggagttaaatttttttgtcattcatacctcctggagaccctctccagtaagtgtccttcggccataataaaacttcgtccctagtgtggtggctcacgcctgtaatcccagcactttgggaggccgaggcaggtggatcacttgaggtcaggagttcgagatgagcctagccaagacggtgaaaccccatcgctactaaaaatacaaaaattaaccccatctctactaaaaatagaaaaattagccaggcatggtggcgggtgcctgtaatcacagctactcaggaggctgaggcaggagaatcacttgaactcaggaggaggaggatgcactaagctgagatcacgccactgcactccagcctgggcaatggggcaaggctctgcctcaaaaaaacaaaaacttccctctggaattcccataggcattgcaaacaacagaattcaatcttcctggacatccaggatcattaggggctttttatcagctagtgcaagaggagcaggaattattacgagcttgctgcctgtaggattaactgggtcctttgggacacacaccactggggacagaggagggtgagcgtcactgttacaagtaaccaagagggaaatcctgttgagaaagttgccttaaacacattagttatcttttaatacacgtatgtaatcctcacaacaagtcctttaagtaagcagtactcgtagctccattttactgaaaaagaaactgagttttagggaaactaagtgactaggccaagttctcacagctataaagtggctgtgactgtaaacccaacagtttgaatcaaggacctgtaactgtcaccactaagctgtggagtagtgacagcattagcttccaagtatgtgccagccacactttctgagcaaccttatacttgaaatgtagacatcgtgtagaacctactctcctgtactcacagttgagataggattaaaccccaatttcaaagccccttacagagttccacttaccaggttatttcagccggcaaccaggaactagactgaatgcaatcctcccacatccaaggtctatgaggaagtgctctcacttccaaagtctgcaggggaagtgctctcattggatgtccaactggccccgcccccagagtcacattagggttaccccaggggcccctgggaaatgtagttgcagggactcaggttgctcctgtggaccccttattcatatcttaccataaaaaagggtggagagttgtattgtccgattatccccatgccaccggctgggaggactgtgctcttatatttcacctggttcctgctctctgggagcctgacactagatgtcccatgtgtgatgtggaacgtgagagcttggaacaggtccaggaaaagcagaactggtaacctagaggaggcaaaagaggaagatggaaggctttaatcacactccaagtttatggtatactttcttcatcagttcccattagacttcttttaaaaatttttcttcccttcatccatcatcctcattcccactggcctctctacctgaaggcactgggcaatgtgtctgaaagagccccatgtgtgtggtatgagggtgatatatgtcatatggctttgtttatgctggtgttttttatttacattcatggtattgatctacaactcttgctgtttcttatgcatttttctctatacaacataatttttgtttctttattgacccaatatacatgtttacagggtacaatgtggtgttcttatacatacatacattgtgtaatgatcaaatcatgataattagcacatctatcacttcaaacatttatcatttctttgttttgagaacattccaccagtgagtgtttccttgtgctgtgccttcggcacctactgttctagaacatgcctctggcgtcctgccacgtgaactcgggactctatgcgaaggctttctcttggcatgtcctcaggcaggctagatagacttgaaaactatgggtctgggaccactattcagcccaggatgttgggagttggaggccacatatctttgtgctgtacctggtcaggtggaattacccttaggcttgtataacactgcctcctggtgttgtccagtggaattatgctccctttgttcacaggtagcttgccaatgatgcaccctttattgattgtcaaactgccctggtctcactgtcccgcgacaactcctgcactggtacgtccttaaatcatcttccaaataatctacctgaatgcaaatctttgttttagggtctggcggaaggccactttagttaggtggttgtgaagtggactggaacttggattcctcctgctgaggtagcagatttccctctgacccggggcgggggtctaaatgctccctctgtggcctccagcctagaatcaagggccttggaggctctgcccagtgctgtgttccactgcagtggggtcagcactagcctccaatgcaaaatcccacactaacattccttttacttcctaaggaggtagactctgtcttcacactgtgccgcctgggctcgtgaggatatttgttgaacttgatgtccctgcaggggaatgagtactggaaggttctatttggccaccttgttccaccctctattttattctttttgatgctattatgatggattgtgttttcctgatttctttttcagatagatcattactggtgtaaagaaatgcaactgatttttgtatgttgattctgtatcctgctactttactggatttaacaatttttatgacgtgttttgagttttctctatgtaggatcacgtcatcggcaaatagaaaaaattttactttttccttttaggcttattttttacttcctttttttttgtttctgtttctgtttattttaagccctggggtacatgtgtaggatgtgcaggtttattacgtaggtcaatgtgtgccatggtggtttgctgcacctatcaacctatcatctaagtattaagcccatcatgcattagctatttttcctgatgcgctccctccccatacccccaccctcctcaccccaacgggcccca

SEQ ID NO: 587659 - DNA, 4001 bp, Homo sapiens
acaataacttttattaaataatgactttgtaccaaaaacattactgacgttattacttgatccatataacaaataattttgggagtttagttccgccactaaactgtaaaagcattattcccattttatgcctgaggagtcagagctacagatctaaaaagtaattcgcccagtgtccacaggatttcaactcagatctacacaagaaaagctcatgttcattcttgtatggcaaagtgtgcaaggaagtaaagtaatttaagagacaagaaagatgagaggaagagagcatcgaggaaaaattatgtagcaccataatatcctaagtcttccaaaaaaccactttttttcaaattatattagccaacaatgttttaatatactttatagacaataagtttttttacaatattttatttactcatctaccaataaaacttttctaggaattcaacaataaaccaacattaaaagctttctagcataaatcaccaatttccaagataaccacaggccatctttaaaatacattttttattattattattattattatttgaaaaggtttgtggttatgtttctttaaaaagctgtttaattatatatgatgacatttttataggtgaaatgatttgatgtctaggattttcttcaaaataaggtaagggtacagaagatacatgataggtcgtcagttgataactggtgagctggatgacaaatagacaagattgttttactccttattctaaatagtaaaaaatctatcaccatgtttgggcacaagctttctctgcaaggaaatattaaatatatttttcagcactttttctatttcttcctcactcagagtcttgaactctattagatctgtattgtccttataattgaatctcctatgggtgagggtgaagcccaccaaacagtgaaccccatctggggtctgcaaggaacaaaatgatttactagtaaacacagatgatggagatgtctgcaggtatgtattcatagactcaaaatcttcaattgttcgaggcttaagagtaaaggagtagatttttcggtatttgctgtcttctaggagatcagaatgaagaaattcttcatttggaatgtactgttcccttctgatttggtctagataccagaatccattctcttccgtcaaacggaagacacaaggcacctgaggctgatccttcccagaaattaactccagaggctgccacatctggtatgagcgtccaaacccagcatcgacaatgtagttcctgccatcaatggtcacctgcaggagaaggtgaatcatgccagtgctgtattttttggctggagtgctgtaaacataccctcccaacatcgtggtctcaaaaccaatagtggtcagagcccagtacagaagatgattgacctggagacaccatccaccccgatttcttctcacaacttgatcaaaaatggcctctaagcctaagtccatggcatccccacaatggatgttaaggttctcaaagggaacagctcggatctggtgttgaagaatgtcagttaatgtttccaagtccaatttgttcctagacttcttatagccaattctttcaagatatgcttcaatgtccatgatcccctaagcaaggaaaacaaaacgaaagcaaatcattttacttttacacttggatttgagtaggctaattatggctatattttaaacatgtaaaaatacaatggttataagtataataattatttctagtgctttcattgtatgaattccttttacacacataagttcagttaatagtcccagaatcctgtgagaaatgtattatgtcttctttcaagtgtgagaagctggaaatcaagattaaatgatgagtcaaatgataaacagcttgttcatggttctcttggtgattaataaaagagagattccaactggtatcctttaaaataggcttataaacgtcttctgatgtaggcaggagaatcatgcaatagagtgtatagtatccgtggtacctgacccactcaatttcccttttagctgagccttatacaaagtttcccgctcaaagaactgtattgattcactcatccattgattgattaactcaagaaatagttcactgaatagctataatgtgtttcctactgttctagtgcttgcttactctcaaaaatcttatattttagtgggagttggagtgacatatataggaaattgaatacatggataaaacatgcaatctgttagattgtagtaagtgccctgggaaaactaaagtaaagaaaggacccagtaagtacagagggagagctccaattttaaattagttggtttaaaaaaaaaaaaaaacacaccaaaaaaaaaacactcgctaagatttgaaggatgccagagaataaggcctaaggatatgcgtgaggaggattgttccaagtaggaaaacagaaaataacaaggccttaagctggaaactgccttgagcgttcaaaaaacattcaggaagcaagggtaattggagcacatgagtaagaaggagagtggactgagatgagatctgacaggcaactgcagccttggagctaagactggcattttggtttttactgtaagtgaaatgagaaatgtaaatgagagaggcctgagagaagggttgtaattgagcaatgtttgccacaatcaaagtgatgtttctggatactgtgtagagaacaggctgcccatattgcgccttatggatagtcacatggactaggtgggaccaatttgaacacatatgctctaggaccagtgcttggctcatggataacatatgatctaagtagatctgagactttactgaggaacttttgctgaaacctaagcgtgtacattctgctacaaggtagaagctggtggggtattcattcaaagctattggtgagtagaagctggtggggtattcattcaaagctattggtgagaacctactgaagaacaacactaacaaagagttcaccaagtttaccaagagatgaaaaacaacagaaggtagaatgaggaaagacctgaatgaagccgaaagctatcttttaactttcaggtaatgtgaaccaaaaaaaaataaatgccccttattttgttaaatattttagaaaaggttttttaaacctgccatcatagagccttaaccttttgagactatgattgtaacagtgctgtacagacctcaggtataactcttttgtatgtggtatggcctgaggatgaccttgtacaaagggacctgccccgagatgaatggtgataagtggagcatctcttattttcccttctcataacatttcttctatattctcctatttttcctttctgacccagctatcctccccatattgccagtttccaactttctctgttcttggtgtctacaacatcatttctccaaatctattagattgcatttcttctcatcctaacttccaccagcaccctttcgtaacatttggtcaagctctaaagttctaccactcagagagagaacaagatgtatttagtcagacaatgccaacccctctctgccccctcacctagaatttgtactgagtatgtaaagaagagagagaagccgatctaaaaggacgaaggcggtttatacatacctggatatttgattcttgcttagaatatcattccttcttttaagaaattactttatatctcttttatttggtttaacttgtttacaagcatttgttttcctctttttctttttttgcctcttgtaccctctctgttcccctccctccacccttcccctccttttctgtttttaagataaagtgttgatttggaattcagcaactgcaagtccatttgaaagaagtcagttttgttagaggcctggatagagcaatatgttgtaaccaaatcacacgtgaacattctgtggctgaacataagaaattgtgcattattaacgttgtgcttcaaggtggaatgctgaaagcacttggaa

SEQ ID NO: 587660 - DNA, 4001 bp, Homo sapiens
gacaaattatatggtggacagggatggagaaagaatcaacccagctagtgatcagaaggtcactggtgactttcccagcaggcgttttgatgaagcagtgtgatcagaagtcagtttgaaaagctaaagttgaggaaagtggcatgtcgggaggtagaagcagttaaatgtcaacagtcttataaaacatgtggagcttaaaagtttctattgtaacagcatacactgcctgctattctcttcttctagtgtttggcttaagacccattaacacaaagcattaactcccgattagctaatggagaatcttataaatcaacacaagtggttgttacttgtgacgctacactcacacaagggcagttttcactgttgtccttagaggtagtagagcaggaggattaagtatatttcagtgttttaaatgatgcttagaagacaaaagaagaatttcataagatgttagtctgtttgctgaaagacagtgagttagaatggaattcaagaggctttccatagcatgtggaacatgcaagaaaaatttttccctaaactacctcagagaagatcgctaccagtttggcaaccactgctacttacttttaagtaattaggttatggcttagctactgggtctaattgcaggctataagttaatactgtttcagtccctaaaggaaatactccttgttgcgtttctagctcagaatgttccacaatgtttctaaataaactctgcagtctggtttgtccttttgtctgcagaattgtgtaacagaccaatcaggtgtggttttttttgttttgttttgttttcttttggaggtttttttgttttgtttgtgcagaaataccttagctattaggaattaaatgtaagaggttttcaacaattcctcctagctctttctggcaaaaaggtaattgagccaaaaggttaacagattcagaaacttgaggtaaaaacatgtaggaagcaaaacagggttaattcggtcaaactgcacccctctttcttcatgtccttagtctgttgcttaagctttttgtttgccttttgcaaagaaatcttttaaggaggcaatttggattaatttagtcttttgcgtgcctcccagtaccaattaaaaaatacatcccagtattttgggggggtggttctgatctctgttttttctgaatatgcctcacaagtaaacaattctgtccaaattaaatgtcaccactgtggccactttaattttagattacctttagaaaggctaactctacctatctacagagcccagttgagttctgtctgacccagtcagactgaggcctccctgtaggactgggtcctgtttctgtcatgattctcaaatgctctctcaagcacaaaaccctggattcaaatgccgaaaagatcaaaattacctaccccaaggcctttaactggatccaatctagttaactgttgaatccaatttgattttgaaccctgttcagactctaacttaatcagatgcctggcctcttaagtgaaatccaattcagtaaaacaggagaaaaaagaaagaaaaaaaaaaggagagagagaaaaaggaacaaaggtcgctgagataaacgtggagagctcagaacacaaaataagtggaagttagaatcccagagagaggctcacccagcaattcaggcccagaaaagagatccctgggctcaatgggccctggagggcacttacacagttgctttctgttcctgggatggtcactggaagttcagatcctgtcgactgggtcaatctgttaaagaaaagtccaagttaaattaaatttaacaaactttatttgagcaagaaaaggattctagaaccaagcagccctctacactgaagatggttcagaatgcccccacctccgatgaggtgagctacatttataaccagagaacaagcaatgacataaagagactacctgatttgtgcagtttggcctaggctttatttgagcagaatgtgttagttttcagcctgggatcacttggttacaaaggtaaactcctaggttaggttacaacttgtttacacatcaactaaggtaaagttcacaaagtaaggagaccaacaggggacaaaccgtattaccccagtacaaaggacactttgagccaaacttaaatctaacactgtatttaacccactgaaaacatcaccaaggaaaaaagaaaccaacactttagctggtgtggtagtgtgcacccatagtcccagctgctccggaggctggggtgggaggatcacttgagcccaggagttcaacactgcagtcagttagctatgattgcaccactgtactccagcctgggccacagagcaagacactatctctaaaaactgaaaaattgtaaaaatgtattccttctgtctaattgagactttgtaccctttgaccaccatcttcccattcccccaacatcccgtgccagcatcttttgatcaccatcctactctgtttatttgatgttgattgttttaaattatacaaataagtgagaatttgctatttgtatttctgtttctggcttatttcacttagtgttctccaattccatctatgttgtcgcggcctttccttttaaggctcaataatattccattgtgtctacataccacattttctttaactatttttatctgctggtggacatttaggttgatgacataacttggtgaatgtgaacagtgctccaatgaacttggcagtggtggacatctctttgataaactgattttaatcttctgggtaaatacccagcagtgggattagtggatcaaatactagttctatttttagttgtgtgtgcttttttaggaaactccatataattttccataatggctgtattaatttacatttcccccaacagcatataaaggtttcttctccacttcctcaccaacacttaactttcatcttttttataatagtgattctgacaggtgtgaggtgctatctccttgtggttttaacttgcatcttcttaatattagtgatgttgagcattattttgtatatcttctgtgggccattttatgtcttcttttgagaaatgtctattcaggtcccttgctcattttaaaattggattatttgttttctttcaatagagttgctttagttacttatataatttggatattaacttctatcagatttttggcttacaaatattttctgccaattcatagcttgttgcttcaccctgttgtttccttttttgtgcaaaagatttttagtttgatgtaatcttatttgtctacatttgcttttgttgcctgtacttctggggtcaaaactaaaaaatcattgcctggaccaatgtcatgtaatttccccactatgttttcttctggaggttttatagttttagtcttatttttcagtgttgaatctattgtgagtttatttttatatatggcatgagataagggtccaatttcattcttctgcatatgcatatacagttttcctaacactattgattgaagagattgtcctttacccactgtgtgtgtgtgcgtgtgtgtgtgtgtgtgtgtattttttttttttttttttttgagacagagtctcactctgttgcccagactggagtgcagtggtgcaatcttggctcactgcaggctctgcctcccagattcaagtgattctcctgcctcagccacccaagtagatgggattacaggcatgcacaaccgcgcccagataatttttgtatttttagtagagacagggttttgccatgttgcctaggctggtctcgaactcttgagctcaagcaatctgcccatctcagcttcccaaagtactgggattaaagacatgagccaccacgcccagccaacacattgtatattcttggcacatttgttgaaaatcaactaacagtacatgtgagagtacatttctgggcttttccttctattccattggtcagtgagtctatttttatactattgc

SEQ ID NO: 587661 - DNA, 4001 bp, Homo sapiens
ctctatctaaacacctctaacttaaatctccccaaagctattaccttggcttttagtatgtgaaacttgttttaaatttcaaagtggggactgaagaaaatcaaaatattttaccctcaaatatatttctttgacatatttaaaaatggtttccactggccaacaagcagaagtggcattgcaaaactgtcttaactgaggaaaatttgcgtctgtggacaatgtccattaatgcagccataccctctcctgtttctaagcctttcccaggatccagagcgattgagagtctgacacctttaaagatctggatagaaacatttaccatcttttgcttctgagaaaaggttcgtctacataacaaggccacctttgctagccgagcttcttccttcctctctctcttaacctgtgttgccactaaaactaatttacctgtttctggccatgctttgagtctccactctttactgtggcctcggaataatacatgagtttctgtaacttactgggaagttgggtcttcattctcaagtttcccaagtgtggtggttaatattgagtgtcaacttgattggattgaaggattcaaagtattgttcctgggtgtgtctgtgagggtgttgccaaaggaaattaacatttgaatcagtggactgagaaagggaggcccaccctcaatccgggtgggcaccatctaatcagctgccagcacagccagaatgaaagtaggcagaagaatgtggaaagactagactggcttagtctcccagcctacatctttctcctgtgctggatgcttcctgccctcaaacatcaaactccaagttcttcagcctttggactcctggacctttgaccacagactgaaggctgcactgtcggcttccctacttttgaggttttgggactcggactggcttccttgctcctcagcttgcagacggcctactgtgggacgtcaccttgtgatcatgtgactcactactccttaataaactcccctttatgtatacatctatcctattagttctggccctctaaagggtcctggctaatagaccatgtatatacattaaataaatttgtactccctttcccctattaatcaacctgtcacatgacagtgacttttagtgaagctttagggggccaacagcctatggcccccacataaggtatacattggctctgcctgaaaatcagacatattgaagtaggagagcttacaggacaaaggtggattcaaagattttgtgattggcaatttgttgaagagttaagttttgtctaaagacttgcggtcagtacaattaaatgcttgagttaaaagggcttatgggaaccatggtttatgtcatgtagatgaaacctccagctagcagccttagagaaaacagatggtaaatatctcttttcagatttttaaggtgtcagactctcatttattctctcctcaatcagagcagagccagaaaccagcaaatttccccataaaagatggttttgcaagaccatttcaatatgtgtcaaagaaatatattttggggattaaatatattgatttccttcagggtctgctattgtcatgtgatgctaaaccagagtcagattggaatttggtatcttattcccacaaacagtccattttgacagtcttatgatcactgtttcaatgttaatgctggtcagttgtgcctgaactccaaaagggagtgtgtataatgaggcgtgtctgacctccctttccattatggcctggaatttagttttccaggtttctctggggtcgcctaggacaagaggggatccattcagtcagtagggggacttgattttatttttaatttataccccactttcaaagtacactgcaaattacttacaaagttctacttactttggccagcaaccaggaactaggctgaatgcaatcctcttgcttccaaggtctgtaataaagtgctctcccttccaaagtctgcaagggaagtgatctcactggaattccgtatcaccctgacaccagagtctagttaggatcacctcagggatctctgggaaatgtagttgcagggcctcaggttgcctctgtgaatctcttacgcaaatctttttgttaaaaatggtgtggataattatattatctgatgatacccatgccacaggctaggagagctgtgcccttgtatttcacctagttcttgctctctggaagtctgatgccagacttcccatgtgtgatatagaaggtgagagcttgaaacaggtcaaggaacagcagaaccaataacttagaagcggcagaagaggaagatgaaaggttttagtcatactctcagtttatggcacactttcatcacttcctataaggcctctctttttcttctgcctcttttcatctctcatcctcactctcattcacttctctacccaaaggtaacacacaatgtgtctgaaataactctatgcatgtggtataagtgtcacatgtatcatatggctttgtttctgcttttttgacattaacattaatgtaaatttttatttctcctagcctgtggcatgggtatcatcagataatataattatccacaccatatttaatgaaaagatttgtgtaaatttttatttacattaatattaatataaaatataaacattgtatataatgttttttgacacataacaattgtatatatttatttggtagtgtgtgatgttctgatacatgcagacattgtgtaaagatcaaatcatggtaattagcatgtctgtcacctcaaacatttatcatctctttgtcatgagaacattcaaaatccttccttctagctttttttctagcttccataccctcttttctctccagtaacaactcttaactttctactactctaactattctactcttaacttctatgagctaaattacttttagattccacatatgagtgagatgtgcagttttcatgatgtaattgttgcctttagcacctactgttccagtacatacctctggcatgctgccacatgaactcgggactctgtgggaaggctttcttttggcctgtgcttgggcagatggactacaaattaaagcacctgggaccaccactcagcccacatgatgggaactggagactaaatatccttgtgttctacatgctaaggtgggattactcttaggcatgtacaaaactgcctcctggtgttgtctactgggattatgctccctttctttgcaggcagcctgccaacaatgcacctttttattgatctcaaggtgtcttgggttcactgttatactcccgcactggtgattccttaaatcatctcctaaatcaaaataagccactggaatacaaatctttgtcttgtggcctggttttagagaaacccaacctaagtctctttaacttaccagttccacttgtgaaggacatttgattgcctcctactcctggttattataaacactgatgtgatgaatgcgtttctagacatcctctgcagattagcagaactcgctgggatatatgtattaggaatgggatctgcggaggggcagatcatagatgtactttttcttttggcactgccagatttctgtcctcttgtatagaagaattcctactttcctcatatcctgattgacatttggtgttagccaccttcaaatgtttgacagttttgtgtatctaagatgatagctcagtgttcttttcattttcacttctctgattcccagtgaatacgggtgaataggttcttcacatacctattgacccttcacatttccatttgtgaattaaatggcaaggttttaagaaagaattccttctgccaaattagtcgggacacacaggcgaagagagatggattaaaattcagatcttgctagaaaatctttggccaaggtggggtgagagagaagcagaggaaataattccagcatgtaggactgtgatctggaccatttttgactgagtgtgggagag

SEQ ID NO: 587662 - DNA, 4001 bp, Homo sapiens
tgatttcaacccccttactggaaactagtgaaataaaattagtaacataccaggttggttacagaaaagttagcagttaacacagcatgatttcggctgatcgactgatcattttcaatcagaatggcacagtttttccttccaacaacgtactcaacgccagtcaaaagtctgtatggttctcctgagataaatttttttttaaaaaaagataagttgatagacacatacacatgtacacgaacacacacatacatgtaagtgtatatgatataggtatgacaaatattaaataaaacacctttgttattcaaatgttagtcaactttacatatgtcaaacttgtgttttcagtaaagcctcactgaaggctatcaaaggttatctaactatggtgtttcaggagtaacaacaacaaaatttaaaatacaataaaaaagagaaaaagaaaaaaaggttatctaaacagatagaaggctacatcatttttctaaagggaaagcaatgctgaaaggagtcaatgttccctcaaattaacttaaaaacttaatgtattacctagcaacaatcacaatattatgtttggaacttgataaacaaaaatatcaggaaactataaaaaaagatgctcaagcctgtaatcccagctacttgggaggctgaagcaagagaactgcttgaacccaggggatggaggttgcagtgagccgacacagtgccactgcactccagcctcggtgacagagtgagactccgtctcaaaaaaaaaaaaaaatcaagaaaaatgtgaataatataataggagcttgccctaccagatggcaaaatatgccataaaactaaaagtatggtactggaccatgagtaaacaacacagaccaatgcaacaaagtccagactaagatgcacgtgtacattttttgaaaatttgtttttatcttaaagataacatctccaatcagtgggaaagggttatcagtttcttttaaaattgctgtaaatcataagttgttggagtaacagtatatatattggagacatgcggagttgagtctgggagcataatttcattacccgagtggcagggagattagggcagataaagagtagggagtccagaagagccaggtctccagggacgccttgacctgtgagtcttcacagtataaaatttatttagtttggcgctctccatactctcttaccctgccagtccatttagtctctacatagatctttgccaatcatcatgtaaacttcccgaggacaagacccttcacacccaccacgggcaaccaattaacatgtgatcacatttcacaccgctggaaatgaatgggaaaaaatcgacttttcccattgttctgatgacattgtggaaaaggagtctgaaacaaaactgaaagtaagccttttcgtggtagtcatttccccaaactgtccagtagttcttcacaagtcatgtgtggcccccgtgtggtccgcccatgctaacttcctgccgggggttcccactaggcgcctgctgccgcttacccgcaggccatccagccctagcgctgcaacggcgcgggggtgaggctgggagggagggggagtcaggggaggggcgcggaggactgccaccagggggcgccgcaatcaccccaccgcccgcgctgaattccagctcacagccgccgtgctgcccgggaagaatatgcgcttgccatacagcgtactcgccgcttctgcgaccgcttccgcagcgtccccgggcaggaacggacgcgacgcaggaatcacccgcaggccctcccccgaggcagtcgctaccgggaaaataggccccgaggcttcccttctgcccttacctcctgccgggcccgcggcgggcagcagtttccacatcggtccggctcctcagggctggggccgacgtgcaaccgcgtaaccggggctgctagacgagcgcggatacggcgcctgcggtcggcatgggctccgggacgtgcgcgctcccgggagccacgcaggctgccttggatgaggcgggagtgcgacttgggcgcttgcccgccacctggtggttggaaaaggaacagcacaatctgtattgaaatgtgctgcgttaaaagggtatgtttctaaggtgtcgctgaatgtaaggttactacctttcctgattatgaacgaaaagaattttaaaaactaactccaaagcaacataaggaaaatttttaattaaatgcattaaaatacttaccagttatgtagtttcgtgcgtttgcagtttcttaaattgcaggtattcctttggaatctagtaatggtgataataatgatgaagataaggatttcacctcgaagtaaactcattatttttactcttttctaagttcaaatcaacttgtcttaacgtctttatttcataatgccacactttcagctaatcacatgctaaatactgggcagtctcctgtatttaatacccttcctttccacttccacctgtctcaagctggttcaagctctcctcctaattccagtagcttcccaacccatcaccacccacgtcccacataatgtagtctacatcctgcgcactactaaataaacatctgagagcacactcctgatcacatacattttggctttcaaaagcattctgtaataggggggaaaagtcactttaaaaaggcttgtttaggcccagcaccatggctcgctcctttaatcccagcagtctgggaggccaagatgggaggatcacttgaggccaggagttcaagatcagcatgggcaacatggcaagaccctgtctttataaaaaattttaaagttagcagggcttggtgccatgctcctgtattcccagctactcaggaggctgaggcagaaggatcacttgagcccaggagttcgatgctgcagtgagccatgatcatgccactgcactctagcctgggcgatagagcaagaccctgtctcaaaaaaaaaaaaaaaaaaaggctggtttaccaatctcttatcatcatagatgcaaactcctaagcacaatattagcaaattgaatcaagtagtagtataaaaagaataatcataactaagtgagatttatccagaaacaaaagggtgggttaacattgggggaaaaaataaatgtaattcatcataataattttaaataggagaaaaatcatgattatcttgatagtagcaaagaaattgataaaattaagcacccatttaggataaaaacctctctgcaaagtaggaatagagaaaacatccatgatctgataaaggacatttacaaaaaaaactacagtttacgttatacttaaggtaaattattgaacatttccccatgacatcagtaatgaaacaaggatgtacacgctcttaccacttattttcagcatggctttagatgctctagccaatgcaataaaggagaaagagtaacaaaagacattcagattggaaaggaagaaataacagtcattattcacaaattacacgattgcctatattgaaaatcaaaaaaactgttggcaaactattttaattaataaatgaatttaataaggttatagatacaatatctagatacaaaatttaattgtatacctttattccagaaaataaatagaaaattacatgtttaattataatggcaccaaaataatcgagtgcttggtaatacatcgatcaaactatgtaatacaaaacatgattgactacataacattattgacagaaagtttaaaaagtcctaaataaatgcaaggataatggatcatgttcacagattgttaagatgtcatttcccccaaaattgttctatagattcaatgtaacttcagcaatctcaaatgctttttttgagtagaaatggatgagcagattctaacatttatatggaaatgcaaatgcctagaatagccaaggcaattttgaagaacaaagctggaatatttaaattatgaaatactaagatctattataaagttacagtt

SEQ ID NO: 587663 - DNA, 4001 bp, Homo sapiens
tcctgaaaaccacagaaaacctctaaaggaaattaagcagaatgactggcttagatttttgtttttggaatgagtgtccacagtttggagaatggactggagtaagacggtcctgattgggaacaacaagctcaaaagcaattggaacaattcaggcaagaagtgctgagaatatgaactaagtcagtgacagcaggaactgagagaagagggcgtatagcaacaacaacaaaaataataagagctcacatttatgcagcacttacaacaaggcatgatgcttagtgctttctgggtattaactcattttatcttcacagtaaccctgagatagctttgttatctattatcaacctcatgcctcacatcagaaaacacagtagaggttaagtaaggaccccaagatccaggagctattgacgaatgagccacagctcaaacccggctgtctggctgcagagcccacactcctaatgtccatattggcaactctcctaatacagttacagacagagggtctacaggactggacactgaatggttgagacaggggagactccaggacaatttccagagatctggcttgggtaggtaaacatgtgaatttcagtttcttgagcctcctccccagatctgtccttgccccgctaccgcaagtacccacactcccaccatcacaccacaccccctctcctttgtagtctgcatcaaggcctttggccataaaacacggggatctcccaattggagtgaaaaacctcacaagcatttccacttaggtctgagaaacccctgacagcaaactctgctcttggtaatacagtggcttaggtctgttattttcaaatcagccagaagtaggaaaactttgagcgagcttgtgtggtttccttctgagagagtgagaccttggctgcctacttctgtgtttcaccgtagctgccctacggaacagaacatagaccttcttgcggggctagcgtgtaagcacagcagcacaccagccgcctcgcctgcggcctccgacagacccgcaggaagaaactgaccctggcaggagctctgcagagccaaatggcattctttctccatgcacaaaagttaaagcaagcatctgcagcattagaaaaaaaaaaaaaaaacttgtgtatttcctgcggacagggagacctcctgcccctcccgggctgatacaacccactttgcacatcctgcttctctgggagctaaaaataaatcggtatgcactgaaaaacactcaaacacatctccccagcacacccttcccaagtcctcgagcgcaagggacacgaatctttcaggtcctgagtccaaaatgcagaccacttcctcgtccgtgttcaaccagcgcctttcggcctctcccttggccccctccccagacgcccacgccccgcactcgcctcctgtggcctttccgggcagactccgcaggcccgggatccagcgggtgccccggcccccggccccggccccggcccccggggcgggatgctccagaggtccccgggccgccaggctcaccaacgcccccttctgcccagcgcgccccatcccgccggccccacgcgcctctgcgcggccctctgcaaagttgctctctccttttctgccgcccaccctcaaggtctgtaattttgttttgttttccctcagaggcactgggggaatgacagaggaattgacagggtgaactgcacccaggagggagctgctggaaccaggttcccagaaccgcgcgctcctcgaacccacccctgcgcccgcggcgcaccgagcgcacgggtcccccccagcagccgcccccggcacacccgccccggctgcaactccgactccgctctggctcccgagaagcggagggaaggcgctgcgactcaccgcctcggccgctcccagcgtctgtgtcgcttcgggcgaggcggcggcagcagcggcagcgccttccctccgcccgcctccccctggacagcaccgtcgccagccgcgcccccctccccagcctggctcgccgcctccctcctcgcggccgcagaccccctctccactgcagccccgcaggcagcctctccggcgtgggcttcaccgcggggttgcaggggggccaagatgaggcgcgggatttgcaggtgcagtggacgccccccccctcccccgcttgccctggtgcagcctccgggcgtgtccccacggtgccccatagtcctagctcaccgcccaggcctctagccagcctgcactgctactttccaaggggtgccatctgcttgcctcctcgggtcctgggaggtcagattcagcctagagcacctccttccaagcttcgatttgagggggggtctggggtccctgctctaccgcagtgaagttcaagggagccttggaaggcagttgaaaagcttctcaggtggtgtcctctggactcttcatgcccacaaggtgggaggggggctgcttttgtctaactagtgctttctctacccaaagccttctgtaaactgtctaggaaaagcttaacaaaaaatccggaggaagacatctaaggggcccctctcctgcccctccttcctcccctcaaatttttcatctcgtgtggagataatgagaagcaaaatgtcttgtcaattcattcacccaatatttatcgagtacctgctggctgccagcacctgtttcctgtcttgctgtgtcgtccactcatggcctctcaaaaagccactgtaactaactccttgtgcttgtcaaccctggtgacatttccagaacccgcagaaggtctcaagagcaactcaaattcatcaatttaaaaagttgctgcttaaaaataacaaggctgcaaaggcaccgtgacctggccttcctcgttgtaatgtttgcaaaatcttttaacatgactggttatagaaaggacagttacattgaggtccagacagctgccaactctgatttaaacaccaagtaaaagtttcatctaatcaaaagcaccctttcctagctctaccggttgccttcaattgtaaaacaaaaattatctaggaggctgttaaaccatcatcaaatactaaaacctttgcttgcattgggttagcaggttagcccagcatttcccttcctggacacacaggaggagaaatgctggactaatctgctaatccaatgcaagcaaaaatttgcattggaaagttggattttttggtttttggttttttcttttttcttaatactaggcccgaccccgagagaatctaatctaattgttaaaaaaaaaaaaaatccggggttcaggggtgtccagctttgtatgggtatttttttcacatgggccccaggagactctgatgtgtggccagggttggaaaccaccataggattagccaatcatcaagcagggcctaagggaacgtcccgttgatacagcaaaaggtctgcacaggtgttgcaaactcaaatgtccctgaaggataaaagcaggtgacaaagaagtaacttaagtggttatacagggacaaactgagaagggcacaatggccctgaaaaaggcagcctcatttttctacgtgggaaaagagggtccagtgtggccatcaagtcggggtattttattttattttggtttggttccccctgcccccaagagaagccagaagttcacgtttaatgtgaactcttctaatttaaaaatattagtaacttattttttaaatattttaaaaaattttaaatattttttaaatatttctctataagccaagaaaataagaatttgtaggccacaagtggtcccctggtcatcggttcgtcacctgtagtctggacagattctgtgcataggaagcagttaggaaggtgcttggggtgggattcctcagagagagaggtgattttaaagtccactttatctacttttctttattgatgtgatttttctttaatgatctctactgttaaaaaaaaaacagttttgctgaggtataattcac

SEQ ID NO: 587664 - DNA, 4001 bp, Homo sapiens
gagatctggcttgggtaggtaaacatgtgaatttcagtttcttgagcctcctccccagatctgtccttgccccgctaccgcaagtacccacactcccaccatcacaccacaccccctctcctttgtagtctgcatcaaggcctttggccataaaacacggggatctcccaattggagtgaaaaacctcacaagcatttccacttaggtctgagaaacccctgacagcaaactctgctcttggtaatacagtggcttaggtctgttattttcaaatcagccagaagtaggaaaactttgagcgagcttgtgtggtttccttctgagagagtgagaccttggctgcctacttctgtgtttcaccgtagctgccctacggaacagaacatagaccttcttgcggggctagcgtgtaagcacagcagcacaccagccgcctcgcctgcggcctccgacagacccgcaggaagaaactgaccctggcaggagctctgcagagccaaatggcattctttctccatgcacaaaagttaaagcaagcatctgcagcattagaaaaaaaaaaaaaaaacttgtgtatttcctgcggacagggagacctcctgcccctcccgggctgatacaacccactttgcacatcctgcttctctgggagctaaaaataaatcggtatgcactgaaaaacactcaaacacatctccccagcacacccttcccaagtcctcgagcgcaagggacacgaatctttcaggtcctgagtccaaaatgcagaccacttcctcgtccgtgttcaaccagcgcctttcggcctctcccttggccccctccccagacgcccacgccccgcactcgcctcctgtggcctttccgggcagactccgcaggcccgggatccagcgggtgccccggcccccggccccggccccggcccccggggcgggatgctccagaggtccccgggccgccaggctcaccaacgcccccttctgcccagcgcgccccatcccgccggccccacgcgcctctgcgcggccctctgcaaagttgctctctccttttctgccgcccaccctcaaggtctgtaattttgttttgttttccctcagaggcactgggggaatgacagaggaattgacagggtgaactgcacccaggagggagctgctggaaccaggttcccagaaccgcgcgctcctcgaacccacccctgcgcccgcggcgcaccgagcgcacgggtcccccccagcagccgcccccggcacacccgccccggctgcaactccgactccgctctggctcccgagaagcggagggaaggcgctgcgactcaccgcctcggccgctcccagcgtctgtgtcgcttcgggcgaggcggcggcagcagcggcagcgccttccctccgcccgcctccccctggacagcaccgtcgccagccgcgcccccctccccagcctggctcgccgcctccctcctcgcggccgcagaccccctctccactgcagccccgcaggcagcctctccggcgtgggcttcaccgcggggttgcaggggggccaagatgaggcgcgggatttgcaggtgcagtggacgccccccccctcccccgcttgccctggtgcagcctccgggcgtgtccccacggtgccccatagtcctagctcaccgcccaggcctctagccagcctgcactgctactttccaaggggtgccatctgcttgcctcctcgggtcctgggaggtcagattcagcctagagcacctccttccaagcttcgatttgagggggggtctggggtccctgctctaccgcagtgaagttcaagggagccttggaaggcagttgaaaagcttctcaggtggtgtcctctggactcttcatgcccacaaggtgggaggggggctgcttttgtctaactagtgctttctctacccaaagccttctgtaaactgtctaggaaaagcttaacaaaaaatccggaggaagacatctaaggggcccctctcctgcccctccttcctcccctcaaatttttcatctcgtgtggagataatgagaagcaaaatgtcttgtcaattcattcacccaatatttatcgagtacctgctggctgccagcacctgtttcctgtcttgctgtgtcgtccactcatggcctctcaaaaagccactgtaactaactccttgtgcttgtcaaccctggtgacatttccagaacccgcagaaggtctcaagagcaactcaaattcatcaatttaaaaagttgctgcttaaaaataacaaggctgcaaaggcaccgtgacctggccttcctcgttgtaatgtttgcaaaatcttttaacatgactggttatagaaaggacagttacattgaggtccagacagctgccaactctgatttaaacaccaagtaaaagtttcatctaatcaaaagcaccctttcctagctctaccggttgccttcaattgtaaaacaaaaattatctaggaggctgttaaaccatcatcaaatactaaaacctttgcttgcattgggttagcaggttagcccagcatttcccttcctggacacacaggaggagaaatgctggactaatctgctaatccaatgcaagcaaaaatttgcattggaaagttggattttttggtttttggttttttcttttttcttaatactaggcccgaccccgagagaatctaatctaattgttaaaaaaaaaaaaaatccggggttcaggggtgtccagctttgtatgggtatttttttcacatgggccccaggagactctgatgtgtggccagggttggaaaccaccataggattagccaatcatcaagcagggcctaagggaacgtcccgttgatacagcaaaaggtctgcacaggtgttgcaaactcaaatgtccctgaaggataaaagcaggtgacaaagaagtaacttaagtggttatacagggacaaactgagaagggcacaatggccctgaaaaaggcagcctcatttttctacgtgggaaaagagggtccagtgtggccatcaagtcggggtattttattttattttggtttggttccccctgcccccaagagaagccagaagttcacgtttaatgtgaactcttctaatttaaaaatattagtaacttattttttaaatattttaaaaaattttaaatattttttaaatatttctctataagccaagaaaataagaatttgtaggccacaagtggtcccctggtcatcggttcgtcacctgtagtctggacagattctgtgcataggaagcagttaggaaggtgcttggggtgggattcctcagagagagaggtgattttaaagtccactttatctacttttctttattgatgtgatttttctttaatgatctctactgttaaaaaaaaaacagttttgctgaggtataattcacacatcatactattcactcaaaatatgcaatttaatattttttgcatatgcagttagttgtacaaactattaccatagccaattttagaactgattttcatcaccccataaagaaatcccacacctattagcactcattcccttctttccccaacccccaacttccagtgaccacttatctattttctctctatgtagatttgccaattctggacattttatataaatggaatcatacaatttgaggactttgtgactggcttctttcactcagcttaatgttatcaaggctgtctcatgttgtagcatgcatcagtactttgttcctctttatgaacaaacgatgtcattgtatagctctatcacattttgattatccatttatcagttgacagacatttaggttgtttcacttttttactattgtggataatgctactatgaacatttctgttcgagtttttgtgtggatgtacattttcatttttcttgggtatatatataaattgccagatcacatggtaactccacgttgaacattttgagaaattgccataccttttcccaaaccagc

SEQ ID NO: 587665 - DNA, 4001 bp, Homo sapiens
tggtcttatctgtgctcaactgaaatgttacatataaattatcatttttctaggggtgttaagaatatggcctctgggttattataattttgagatcaattaagtgatgagattatgtctcagtagatgtgcctggaatgaaagcacattagacttttggaaaatcctccacggagaccctgaccaaaaacagacatgtcaaatgccagcaagttaaatgaatattcactcattgaaagctactgagaaattattgatatacccacagttattcacttattactgtagctaaatactgttcaaaatttttcacctccaagagtaaaataaatgctattagaattctgaaactaataaagaacataaaaattaaaacaatatattcttgcactaaattacgatataattcacacactgtgaatatatggtattcatatatacagttaaaccagtttcttctactaattaaaatactagctgtattacatgtagtgctctaaaatttgcccctttttctgttaaacttgtaagatttagacacctggttataaatctagactttggctaacttcagtactacaggtattctttaaattagaagctccaaaacaattcaacctgtatgtcatgaaagaaaatctgaaattactaaacttgggaaggaaaggaactacaatacaaagaaaacaatttgtagtaaatagtattataggaataaagagataaaaattcttattaatcacagttatcaaattattcatttaagatccagagcaaattgtgagtgactacttctatctgtgtttgagttaaagtagaacttgtgtcaatgatacttttcattttagggctattgtttttttctttaggtaattatgacgatttttaaaaataacaacagcttacatgactccttagtaaagaccacctcatgccattctcttcacagctgaattttcaggggaggatactggaaatatgcactttgctctaacaaccaaaaagcaattgcatgcacacatgtaaaaggttccaccccaacttccttggcatattcccgattatttctctctaaacaggaaactgttgacaatttttcctggtactttcagaataccaaaggttttacttacaagcaaaatcccaacttttgtttcagttataatgttatttcccgtggttcctattgttgctaaatatgaatgctgcaaacaagatagaaaccaaattccaaactattttaggctgattcagaattgagtagcaattgtaaaaagaaaagttagaaacacattgcaaggctatgctggagtttttaaacccaaaacaatactgaagggaggattcctggaattcaagagagaatatttggctcaagctgcaaaatccgtatgtctaaataatgttatgttagcaagtgttgagcaagcaagacgattatattttaacctacttcacaaaacattaatccaaatttaaccaaattccagagaacctgcctgaaattcacaactagaagctgcttcacattttccccttggtacaacaataattgctcatgaatacaaacttgtaggaggtaagagagaggggaaaaccacaatgagctataaaaacatctaactattgtatataaagcaaactaattacctcactcagaagaagtgcaagatttaacagtccatgctctgcagcccctggaaacagcagtagcagcagcagcaaggtccagcatccaccagattctcacaagcctttgactgtgtggactcagccacagactctgcctctagctgacgtcaaagtccctgtcacatggccagatgaaagccaagagatcattggttgtcgtagcaaccacagaccggctctgaaattatttcaataggtcatctgtcactgtggtgtgtgtgtgtgagagagagagtatgtgtgtacgcacacaccatagaaccatcacggacagctccttgacaacctcaacccccgaagttgtgactccagaatgcctacaactttcctctttaaggctttggtgtcttttctctacagttacttgcaggaaaatatatgccaccctgaagttctcatttgtttcactaccatcagcatgaagcatgtctctctctctctctttctctataacaaaaggaaagaaactgaaaaattctggagtagttttcttagccaattaaacttatttgcaagcaaatatataaaaacagaagctcagggggaggggttggaagaaaatgtattttaaaaactatatcagagtctacatggatatactgagaccatgcttgtgatggaaagaaaaataaaaaacagtggcttgggttcatgacagtggcttatgactcagagacaggtaagacagtctaatgatcctgacaccaagtaggatgtagacatcagataacataaattcaggattcctgtactgtaaaatgtctaggtaaaaatgaggaccgaaggagtttcaaaacagtgttactttaaaataaccatgtgagtaagctgaaaactgtgctttggggccatacgggtgccaaatgctcccctcttgagtcctctcatccacacccctttgctgagactcaacattgagtaaacagggccagtgttccacaaacacaaagtgtaatgaaagcccagagccatagaatgaaagggttatctcacatgttttctaacatcagctttatttcctttacgacgaccctagcttacttttaactctgcacacgtgcctatttcccagttaattctctttcttaattaatgggaagccgattaaacaaaatcaatgaaactcacaagaaggtactctgaaaaagacattcagaaaatgtatgcccaaacaaaggacaaggagttaaaaggcaggggagaagagactgccctcaaaaccctaaggacctttatatgctaggcttataacgacttctattctgtttcttaaaataaataaataaataaaaaagagtagctctggggtgctacaaaatataaatggaacctaagtcagccaggcagattacatttgtgtcactgtaaaagaatgaaatttctttagtagaatcagaaattgcttctttaataataagactaatgttcaaatcacttggtcatagaatcgtcctactccatcctccttttcatcttcctttatttctgtcccagccccaattgggagaaaagatagatttttatttaaaaagttattttcctgatgcgattagctgtggcactgcaaaaccgaaatcaaactataaggaactttcctcctttaatttcagattaatgacagctgggaatttacctgtttgaacaaggacaatggaatccaatgtctacctaaagcctcactaggggcagatttcaccaacagccacaattcataaactgacaatttgttccaattattgttctgcttttatgttcagaaatgcacatcatacaaatgagggaaccggaagaggcagagaaacatacccttctagctttccctggacccacgttctctgagctgcttaatttaccatctctctggctctaatccatagctgcctaattaattcttcctcctctttatgcagctttagcatttaagagagaaaaactgcagtgccacattctgctaataggtgatgtcttctgaaataagaagttctcagttctaaaaaaaaaaaaaaatgcctaaaattcaggactttaaatggattaatttgaaaattagcaaaaaaccaacacttttactttgactggtttagcatttttaagactaagtatactttatactgccttgggcagtattaaaatattcagtgaactattaaaatattcagtgaactggctgggcatggtggctcacgcctgtaataccagcactttgggaggctgaggccggtggatcacaaggtcaggagatcaagaccatcctggctaacacggtgaaaccccgtctctattaaaaatacaaaaaattagccaggcat

SEQ ID NO: 587666 - DNA, 4001 bp, Homo sapiens
tgtcttctgtgacccttagcatgtaaaccggacgctgaggtccaggacatgatcactacagcatatgccattttagaaaccggcctcggtgagttactgccacatcctaaagtggctttagacttcgtcgtgtctaagacaacgtctatttcggtacgaaagacatacaggacctcgagtgcctcggcagcctctgcgggtcggagcccctataagtgacacaaccccagaaatcaaggagcgggtgactcggggatggacaagagtagctggctctcagcgtctccatgactcccccgccccgcatgcaactctgctctaactggtcaggagaaaccccgcccccttccttcctccggtccgcacgattggctcaccgacacccggcaggtcagctccctgccttcgattggctcactgccccatcagtcagacgcaccgagattcgggtcggtgggaggggaaggcgtcggaggaggtggagagggagtgggattagaggacgaggtggcggaggaaggtgttcaggctcggtctctggtttgggaaagtttcccctaccagtgacggacccagaacgcgggaggcccagtccagctccgggccagcggaagggggctccagtccccgattcccgcccctcggtcccgcaggccccggaaaccactagagggaggggaagagggaggggccatctaaccagggaccgacccacccccggtctcggaagaggcgcctctgggactcccccgaggggaggaggcggggagcgcagccggcagcgacgaccccggccccctcccccagcaccccccaggggcccgagagggccgggtccccgtgcccggggcgtgaccgtcgcgaggcggccacagggcccctcccgcttcccgcctggggccccgagggcctgtcccttcaggggcggagagaagggggcgagaaaagggggcgctggcgagccaacccggaacctcccggtccgcctcccgcccccggccccggccccagcgcgcctcctgcatacacgcccgcacccagaaagttcagtcaggggcgagcccggctcggcgccgccggggcccggcccccggctccccgcccccaccacggcccggcctgctcggccccagcgcgccgcccgccccgcccgccgcagctccttcccgtccgcccgcggtgctcggcgcccctcgccccccacccccggggctgacacgggcccgggccacccgccgggccgcggctccccttccccgccccgcgctgcagctcgccggccgccccgacaccccgcttcaccttcacacacccccagcacttcccgagtcctgcctcccctcgcccggctcccactctccgctgcagccgctccgcgcttccattaaagaatgcaccttcccaggattcaccttctcggctctgccgcgctgcccccgaggggttagagcctcggtctccgccgaccccgcaccgggctgggcaatgggcactcgctcctcggggcgggggccgcgcccgcacccccggccgcgcctcggcgctcacctctcgcccgcgccgcgggctgcagcctccgcccgcctcgcgctccgggactcgtctcctgagctctcgcaaggcgctggagcgcctcctttctctcccggggactccgcgtctccccgtcgcttcccgccctccccacccccaagccccaactccccagcgtcgctgcgcctccgggatgcaactcccgttttccgcgcactccggcggcggtccccgcacacaaaaacagcctctcggaggcgcacggctctgtcggagctcggcgcaggaagggcagtcgcggccgggggtggggacgcggcgccccccgcctgccgcccgccccccgcccgccctcgcggccccgggggaaggcgcggttaccggctcgggtcggtcacgccgtcaggtgccggctgccgtcggcgctgaccttcgccgccgaagctgtagccgaggctgcggccgccatgttcccgtgttaataactgctgcctggttgtttatttcaatggagatcctcccccaactccctcctcctcctcctcctcctcctcctcctccgcgtctccgcacttgcggagagacagacagcgcgagctcgcgagcaggggagggggctcgggagccaggccgtccctccctctgcctccccggcagtggccgccgccaagtcctgtcaccgggaaaaggacggggcggaaacttgcctctcgcgcccccgaggaaggggcaaaggtggacgcagggttgtccggggagcagcccctggccgcggggtccgcagcatctccgtcggcagagtcctctgagaaggcggcccggggagaggtgaagaagagtaaggggacaggggacaaaatgggtgactgtggtagagggagggtgacctagaggtgactggaactgaagagagagtcaacagaggactgcatgggagggcaaagggcaatgccaaaaagaaaactagcgactgggacgggcctgggccgctgagttagaggcagtggggcctgggggctgcagacggcagggacggtgccccaggacgaagatcggggagagccgagttccagggtcgccagcagaggaccctcgcgcccgtccggccggacccttcggccagcaccctgcaccccctcgggcgcacctcaccctacccaactcccggtcctgccgctgctccccggaggcgccccgcatccgtcaagtcccctacggctccaacagggagaggcttctcccattgcagtcctagctccagaggggatggagaggcgcgactgtgggagctggaaggggcaccacccggcaattgcgggataaagcaaatgctgcacacagagtgtgaaacttaacctggttgagaattttcggcacatcatgaaatcataagtttgtattggaaagtccattctctagacatccgtgaacaaagtactgaggggacgtaggagattggcactgaaaatgcgagaacccccatttaagtgttacttagaccaatctgttttacgctttggaaaagcaagttttttttccaacttatacggtaattagttgaaaaaaaaaacttttgtttaatggcagttatcaaactatgagaggaacatattccctgattttaatcttataatgagaaaggtcacttgcggtagacaataagagtgtttattgaacacttactgtgaatctgactgtgctaggtgatgtatatatgctataggccttaatcctcaaaccttccgaagtcattgccgcttttcacttcacacaaaaaattgaagcttaaagtaatttgcccagggtcacagccagtagttggagaggatgtgagcccagttctggtgagctccaaagcccatgcttttaaacatgtcttcatcctaaaatttgtgggtgtaccgccaattttatttgggaaaagaataaaaaaaatgtgtggggtgtgtgtgtctgtgtttgtttgtggatagaaaatgcttggaagcctataacaacaaatgttagcgctggggagtgtaagaagtgggtgatgaggcacttccactttttattttgcacacctatctaatgtttgaaatgtttgcattgactatgtattaatgtatatttttaaaggttttttttttttttttttttttttttttttagctagctggaataatagaattatgttcccaaagcgttgagaggaaatggagagtttgtttatggcctatcttctgctaataccagtctgtagcttgtctacaatggggtagtagtcacctgaggtttgtcacaattctgaactcccgatttgctttcctgtcctcacccccaactgtgagttatcaggagttgtgataataaataaataaataaataaaaatttaaaaaaaagattctccttcttgcttgctatccctcccattttggcagaagtccagagtctatcagtcctctgcaatcgtagatttcacactttt

SEQ ID NO: 587667 - DNA, 4001 bp, Homo sapiens
agggcagggcaggcaaatcctcctccttgcccagatgcagtgggagacacggtcccacaaagctaagaagtcacaggtcaggggaacacccagttttccatccacaccaaaaccctctctctcccttacaccttccttcatccccgacactgtgccaccccagcctggggctggctctgccgccacacacaccacacagaaccggtctgcgtctccagccgtgtgtcttccccaccagaaggcagcccttccaagaaaggcgctggggtttgccccctctgtaccttgcttatttcaatcacatttgtgaaactcaataagaacgccagaatttctcaacaggaagagtctagactgaaaaattcgccttgaaactacatttctgcagcaagaacagggggtttgtatttagatatgttcttttgaggcagcttaggagaaggtcccgtgcagctgatgggtattataaggatgtctaccgccctcctgcctggccactggctgacttctgaatattagatatttcccagtagcttaaagaaaccaaacaaactgaagtgcccccagcgtccgtgaggaaggggtgttcttggatgggcataagataaccaagggccctgcctcccccacccactgccaggcatctcccacttccaagccacagaggcgtgctgttcaggacccccagggacagcagggacaacaggcgggggatatgggggaggggtgggtaaggaaccgacccactaaatcccagctccagctactaatttgacagaggcgtgacagcgtgtttcccccagaaccagccgcattccccaagcccagcccgaaatctcctcccgaggctgaatcagagaccgcggcggatcccccaggaacgtcgaagtaattccagctgttttcccccgtggagggcaggagcggccagcaccagaggcaggggaggggaggaaagcgggggagggtgggcggaggcgaaaatgacgccactcctagctccagccagctcaaggggccgccaaatgtccgcgagacccctctcgcccaggtcacttctcccacgccgccgatgcgccaatcccgggttcctccgggggcgcaccctgcccagtggcgctcgcagacacttgctccggctcgcgtgttgcactgtgacacaccctggaccctccccccacacacacgcttacactcacacatgcacaccgccctgtgtgtgctacgggactgaagcgccaccagcctctcggatccacacccgttcccgacccagtctgcaagccagacacacccacgcccccctctccagcctccttgccagcgccactcacctctaccaacccctcatctacacactcgcgcgcaatctctccgttcccagacacagacacacacacacacacacacacacacacacacacacactcacctagtcccttctgcacccacgtccagcgcgcacccctgccagcggcgccagctgggattcggagacgacgccaggaaacgctatcctggtattttttcggaccgtctcatcgcccccttcccgacctccagaaccccaatccccagctaggggggagatgaatgggaccctgtctttttttcctccctttccgtaattgaaccccccacttcagcggtgtctgcacccaaagccccctcgcgcccgcgccccggggtgaccgcgcacttgcagctccggggcgcttactcctggagtacgcggggctacaaagggcggtcctggcgctccagcggcaccgcacgggcggcccctttctgctccgcgtcgcgcctgggagaagagggcgcgggcttacctaacgcgagggagaaaggaaaggacggtgccgaggctggcggcccagcgccccgcggaagccgagggcggatggtgaactgacgagcttcagcaccagctgggagccaggcgaggtttgtttacgtccgggcggagggcgactttataggcgccgcggccccgcccccgcgcctcgcccctcccagaccctcgcagtcccagcacgcagccgggacacaccccttccccgctccctgctccctcctcccgggcgcgccgggctgggctgggctccggcagcgcgcggcgggcgcccactggagccgccgcctgttgcgcaagcagtcgtaggggcgcggccgggaggggcatcggggcccgggttgtgggtcggctctgcagtcccctccgagtccagggcctcggcctgtgcagcgggcgcgtgtgccctgcccggaggaggcgtttgtgtgcttgtgcgtgttcatgtgcgcgctcgtgcgtgtgcatgtggacttccttgtgtctccgtatgggcggaggccccccatctctgcctcagagtttcttctaagagtctcgttgcgccacgccctgagcgactcccttcacttcctgtaggtctcaccagctcggctctccagccggattcggctgcctgcccagcagccgccttcgctttcgcccgacaggctccctccgattctcagccttccgtgtcgccaaagctctcgctgaaatcctcgctcccgtttaatctcgtccatcttgcccaccgccgcccagcgcttacccttcccctcatcttcccagttctaagcacactcactggaccttgcccactgggctcttctctcctgccccacaagcccagatgagaggattctcaccccttcctattctgatttcctgaactttcatgactcaccctttccaaccttagcaccgtcctgctctgctgctctgtttgtgcgtaactattggcctgcatgttcccatctggccaaagaaaccagcaattctcaacccctactgcatatgagaagtcccagaggagccgccaaattaaaaaataaataaatagatagataataaaaagagagagatggactccagaacagtttaatcagaatctcagggggtgcaaaccaactgggcattggggtttttacaaagctacccaggtggctcctgacgtgcagccaggttgagaagcactgcatggaggaacatgattttatgaataaaggaagtctgactcacagctggcaccgtcattgtcctcaggccacctgcccagcgttgaatttgccactgagcccaggaccagacccagggcaagctcaggtgaccctccctgcgcctccacagacacacacgcgcgcacgcacaacacttcctgctgaattgtaaacctcttttctgtgccaacccatgctgtccccaaggcaggggccatggctttcccctctgattattagggccagttttggagaagggttttctggaacaaaagaaatatggagaggggcaaacagcacctctaggacccaggacatctgtgtttcaggcctgtctttgacactatcgatcacaaatcaacaaatctgggcttcagaattctcactggcaaagggagaggattagattcaatgatctttcagaacctatctagtgctaaagctctgttattctattacaaatgaccagtgtgaagaacagagttccagtgtcatgggttttgctgctagaagagtttggctaaactacaaagtttggctattagctatgaagtttggctaaactacaaagtttggctacattcaagaatgccttgaatgtaggagcacattcccccaccctagaaaatttaacatctagaattaataagtgaatgaatgaccactgggcagtcttccattctttatggatttgaactagttcaactgcagcattcccagtgagggaaaatttttcttatttcaaataaaatgttgtgtccaggtagagtggcttacacctgtaatcccagcactttgggaggccaatgcagaagcctctcttgagtccaggagtttgagaccagccttcacaacatagtgatgtcccatctctacaaaaaagatgaaagctagccaggcctggtggcaagtacctgtagtcccagctacttcagaggcagaggtgggag

SEQ ID NO: 587668 - DNA, 4001 bp, Homo sapiens
gcagcctcagcctcctggagtgaagtgatcctcccgcctcagcctcgcagtagctgggaccacaggctgtgccaccaagcccagctaatttttttattttttgtagcaacagcatcccgctatgttgcccaggctggtctcaaactcctggcatcaagcaacccttctgcctaggcttcccaaaatgctgagattacaggtgtaagccattcctccagccttaaatatttgtaaatccacagactatccctggaaaaatagataagaaatttttaaaagtgattatctctgcaaagttatgacactagcggctattgggtggtatactctggcaacttaaagtttttatcatcaaaatataacaacttaaatatataaaaataatgcaatcttttcacaattttggcttttacaattttttttggcttttacaattcttaatgcctgatttccattactgctatcttgtttctcttacaagtaatcaacaaataaggtaggaaataaataatttttgtttttgttgtttttgagactgtcgcccaggctagagtgcagtggagcgatcttggttcactgcaacctccacctcccaggctgaagcgatcctcccacgtcagcctctggagcagccgggaccacaagcgcgggacacaacgcccaactaattttttatttttttgtagggatggggtttcgccatgttggccagactggtctcagacacctgggctcaaacaacccaccggtctcagcctcctaaagtgcggagattacaggcgtgtagccaccgcggccggcccacaatttttaaaagggattataaacaaaacactgaaatgcatgcattttgttgtgttatgctgcttttctctaaaatggaattaaaaaaaaaacggttttacttgcatgatcaacttcaaggtagtttagtcattcaagtacttttggtaagtccttgagaccaagtacttcaagaccttaccccagtctttcaaatgagacatagcagaagggcagaggggctaagccactggtctcagcagtcaggcctggattcccaggggtccctgccgcatgaaccaggtgacctgattgatccaacccacctccacaaatgattaaggagcgacacccaagtgccaggccttcccagcactacgcccgacaaacaaaacacttcagggctctgactttatgaggctattcttgtgaacctgtggcaaattctctaatcactataaaacccagtttccttgtctgttaaatgagataataatgacttccactcactgtgcccttactatatgccaggaattgttctaaatgctttataactcacaaccttaaatgataggtctacatttgtccgtcgcaacttgtaatgaagactaattactcgtaatctgctttgcataatgccaggcacacagaaagaactcaaagttggctaccgttgtggttaaaactaatagacgttctgtgaataacaaaggttattcatgcaaaaacgctgaattcggctaaaattaaggttcagataaggcgacaagcgtgggcagtcgaaggaattttgccataattttgtgacccatgtgaatgttcctgtgggcccgctgcctccgcacacccgcacccgacgcccactagaacgcacacccagaggggcacgaggaaggcgccggtccgctcgctcaaacgtcaggccagacgcgaggcgcagccgctcccaccccgggaccccgcttcccgccgcgccagggaaggtcgtgctcgctcaccgcagcagctccaggcagtagtggtcagtgccccaggcgcccggtccgctggccgcagccacgctccgcccagacacctccggcccgggcagccgccgcatgcgcgcgtacagacccagaggcggccggcggcagcacaggccggggatgccaagccgcaacggcccccagacagagccgtgcgcggaggccgccatgacgccggcactgcgtgcccttcgaccccccgccgtcggcgcgcagctacgccccggccacgcccctgcaggttcccctatgctcctttgagtcgcgggaaggcagcctctggacgccgctcaaagaagagccaggtgtcgctgtggtcctctgcatctgggccgccgccgcgactctttggccttcgttccaggaaagacccgcccaagtccgtccgacccctcctgggctcttccccttcccccacgtgcatccacaggcgacctcagagcacctacaagaagtgatgggtgctgctggtgaaggaagtagctgccaaaatcacgccccgccgcccctataccccaaatccaccatgagaacagaacaccttgcactgtttctcaacaggggctgccttggcactttgggcgcaatagcgctgtcccgcacgttgctggaagtttgcaataggtgaatgcccagtcttggtgaccaccaaacgcccacacaccaccaaaggcctctggaaatgtcgccctgtttgggaaccactggccacctaacacctccagcagaaaagcacacacatctctcagagaagccacacagtaggccattatcaaccactacctatagctaacctgcttgctgacttttttctcccagtatcctctgggttccatacgggcagtgccattattttgtttcctgctttaccccaatggctgtcacttgaaaattgtagaagctgaagtgcctcagttcacataaatagtaagtagtcgggtaagatccaaacattcaaaatatctgtgttattccacaatcttatttggacagggaaaggaagtgaagacggccataggccagagcctgcttgtctgggcctccaaggtccagcatggaactccaaggagtcaaaattttcaatgtaaacctgacctttcaggtccttaggaagatgtatttatcaaggcaggaagacagagcttttaacagtttactaacttgatttataacttttttttttttttttgagacagagtctcactctgttgccaggctggagtgctgtggcttgatcttggctcactgcaacctccgcctcccgggttcaagcgattctcccgcctcagcctcccgagtagctgggactacaggtgcacgccaccacgtccagctaatttttgtctttttagtagagatgaggtttcaccatgttggccaggatggtctcgatctgacctcatgatccgcccacctcagtctcccatagtgctgggattaactttgaatatttgttcacatggtatgttggcttcctttggtactcttactttcagggccctcaaatattagaggtgggtctagctgctaccaactagctgatcccagccagcagctgcctacacttgaatccctcttgcctccagatttgcctagacttttcttgctatggccagactggttctttctaaaatgtccatctgatcatggcgtttccctacttgacagcatttactgtgtgttatatgcagtccgtccatgatgtggcctcaatttacctttctgcctcaactctggccacttgcctttgtgactccaagttaatgtttttgtttaaacccaaggtaaagcaccttgtcctctggccctaagaactctaaccaattcatgcaactttggtttttactctctgaaattacctttcttcatcctgtgtagtagcagaaccccggtggtgggtgttaccctttcatcaccagtgactggtccaggacagtgcatatttccctgatctggccaattagacttgagaacaagtccactgtggtgcttctgggaaagttgcttcactaataaaaggaaacataaaattcaatatactacatatgaaatattcttggcaaaaaggcttaacataaagttaattaagcttctaaatctaattttaaagtttataagaaaaagacaagaaacaagataaatcgacaccacagggaaacaaatcagaaaaattcgaaagaaaaacccaatgtc

SEQ ID NO: 587669 - DNA, 4001 bp, Homo sapiens
cctctgcctcccaggttcaagcggttcttctgcctcagcctcatgagtagctgggattacaggcacccaccaccacgcctggctaatttttgtatttttagtagagacgcggtttcacatgtaggccaggctgttgaactcctggcctcaggtgatccactcacctcagcctcccaaagtactgggattataggcgtgagccatcatgcccagccaacagtcgtgatctaacaagcaattcgaactacagctctagagacaaatgagcgcaggtggtgacagcactaaatgaggctgcccgagtacatacaacaacacagtatgcctaggatggaaccacagagaacagcacaatgagggcaaatggaggaagaaattaaggcaaggattgagaaagaatgtcagatctaaaaaatgctgagccataactgtcatagtagctagtttatatcattttcctctagaactatggactttagtattcccagctatagttcagtattgcttgaattctttttttcatgtttaactttttttgacacataattattgtacctatttatggggtacatgtgatattttaatacatccatataatgtataatgatcaaatcagggtaatttggatattcatcacctcaaacatttaccatttgtgttgggatacctgaatccctgatggctcaacttccttcatcatcgatttgtttacatgtccattttccccactaatccgtgagctgctgctgctcaaaaatggatttactaacatttatatatttagcatagagcatagaatctgaattgcaaattctgtcaaatcaataaataaataaggaaaactcaaggaagaaactaacaatcccatcacattgtacttggccatcttcctgccaaatcaagagaagtatgtcagtgattttctaatagtcacatatatgcaatctgggcttcgagggtaccctctgtaattcttccaggcctactccattttccatagagtttttttcccagaaggccttcttataaaactacgtttggagagtcgtaagactggagtggaggcgaggcactcacacatcttgggttgttagcccaccctgcaatgaatttaggtgattaaaatctacacattttaacactatgttctcagactagtctcagacggatagaggtcgaaagagaattatgtaagaggtgaaaaagatgtaaaggtaatgaaaaggactagatgaagctaaaaagagaaaagctaatgggaggggtgggagaatgatgatgctttggagaaagacctaaattttaaccctggctcagacacttagaaactctatcaccttgcgcaagttaccagctgtgctcatcttcttatctgtaaaataagcttaagataattcctaactcctagagttttgcagactgaagaaaataatgcatagtttattgctgttaatattggaaaggagaagatcgtgaagaaaacgattgagcgagcgctggacccatgacaattacaattttaggcactttcctttatttcacttaattttcctgcgaccctctgcgctggtcgtgcgtccgttttactaaacaaaaagctgacgcccagacccgacaagcaactctacaaggtctcccggccataagtggcgaagcctggatttgaacccgggtctaccataggattctgtgaagcgagaggccaccttccaattccgttcccgaagtccttgaacctccaggtacccaggggcctctccacctccatggggccccgagggtcacctccccgagtcctgggtccccatcccttacctctggacgcaccacgactcgaggtggcgtagcgcccgcttataaagccgcaacaccttttgctgatgggtcaggtagggtcccgacgccaagaacgccattacggcgctgaccttccccggccgcgcggagagccgggaaactgcacgcctgctgcgggtgactgagcggggccagccggaagggcggagttgccggcggccacttccgcttccgctggggaggtcctccatgcgcagtcatgagtcgcttcaagtttatcggtaagaggagcgttttccacgcccttgggtctttctgacttgtcccgggcgtcggtcaccaaggtcacaggacccaggaattgcgccctccggcattgtaagggttgaaagggccgctcagtggaggagggcgcggggaggtttctgggtgctggtaatgctctggttcttgatctaggttctggattcacgagggtgtatttatttgtaaaaattaacaagccgtacagttatgatttttgtgctgttttcaacatctgtaatgtattcagttttttaagaagaaaactccaaaaaggccaatcactatgtttccattcatcccacgtgcacctcccggcccttcccctctgccttggcggagaggctgaccgcttctggggaccaattcactcaagcattcattcgttcatatcatagttagtgagcgcctcaagtgggcctggcactggcctaggaacacagggcacaaagctcccagttgtactgtcatcaccatctggtggagaaactagaaaacacaagtaatggggagaaaaacaaactgtacttggcaagtacaatgatccagtcggcatcagtagaacgagagggagaatgctgcgggatttaaatgggcatgatcctcgttttgtggggtttccagctacctgaaggtgggaaatgacagtgatcacacctctgctttagcaaggtaatcctgatagctattatgtaggttttgtgggaaatagggagaggtagggaagcatttcaagagcttaaactagggtaatggaaaagagagagaaatggaagagatgtgtgcagcatttagcagctgagtgttcatggccggtagtagagagtgaacaaagatgactcagggtttggaaaagtacttaaatatgaaatggaagcatgactagtttggcggtgaagagaggtacccaggtccatttggattaggttaagtttgagataattataggacatccaggtagagatatctgggcaattgggaatgtggtctggcaatcaagagattaggattatacatttagatctgagagttatttaagcagtatttttttttttcaaagacgttgtgctaagtcctgtggaactgtaaaatctagtggtgcagttttcagactggagacctaagacctatgtactgtacagtcaaaagcaaatgcaggggagaatatgttaagtgccaggaaaaaggttttgaaattgctgtgggaaagcctggagtaggggtttggggaggggttgtcaaataagacattgccgtgtcttagcctttccatcctaacctttgatataattgatgagggagatggaataaagagccatgaagtactccgtaaagaaaggccacataactttttaaaagtgtgtttatgttatacaaccaaattcctgcctcaagttaatgtcttaaatccatcctccatgtagactccattttggtgtatctaaaaatcaaatcagctaaatgtttcttttgcttcaaatctttcatttacgctcctcaggatagcctaaatgcttacacaccatacaaagcccttctgtggtccagtcctgcccacttttctagcccatccctgggctgctctataaacacttgtgcatgctgtttgttacctctgacaaggttttagagtggcagtttggggccaaaatattcctctgcctaccaactaccctgttgcctgtctgcctactcactccttaaaacttataccacattatttataattaaatatgagtatgcctttcccactagatcaaactcttaaggcagatactggtatggtatttatatttttttcctaggggcgtagtacaatgactgtttgggaaagtatgaatgagtggctttagtgctaaggtgataagaaaattagtaaagggattagcatcagataaaat

SEQ ID NO: 587670 - DNA, 4001 bp, Homo sapiens
acttgtcccctttgaatcaactccatggccccttaattgtcagcctcataactgacatgatttccaggggccctgacttttcaggcatgttgtggtgcccttctcttttctcagcttacctcctcaagtgctttatggccctgaacagcaaaacttgaataagatcagcccgttaagccatgagcaccaataataccatctgactgacccaagccaggcagagataaatgctcatgaaggataaggtacttaaccacctgattgggtggctgaataggaatgaccacacctgagatttggtgggaaggagatgaccagcccagaatgcctggatcaccaattggagccaccaggtgataaagggtgaaggctgccagtacacacagttgaacctcacttctatcatttgccttacaacagtttgaattattgataggagtttctttccctagaattaaaaagaattctagccaatccattcaaaataaacttgggagagcgcctcacatcctcctatcctctttatctctgcctcaccattatgatactaattgatttcctcatattttcatctctccacaaacaaatgtatctggcttctggcccatctcccactcattttgactttaataagaaaagataactcagagaagggtaaaggacagagcacgtagcactcctccatgtcctttgacattttctatcatgcctaaacaagaagcagacagaattgtccccactgagatagacacgacctccggcaacagcatgaatgtgacaactgaggggctgggagagcctggagcccggcaagcagctgagagaaaccccaaagcagagagaagagataggcaacagacggaaaaatagagaaaacagaaacagcaggcaggagaggaaaacaaaattgagaaataaataagaaataaaagtgctgtaaagatagaaaccacaccatacgggaaaaagaaacagcacagaaggaaaagaaaggatgtaatcagatcagagtaatgaaggcaggcagtcgataccgaagtgagaaattggaccaaagggaaaatagtcaaaagctagaattcatggaggtgacagtagtaattagaacttggagagaaggagaatatcagggaagaaaaagggaaaatagaagaggtggcagtgacaaaaagaatcattatgaaaatgatatttcccaccgctgtaaaaagaaaaacaaatatgctcaaagtaattgttttccgagggggtctgggggaggataacgagggcatctcaatcgctgctgcttccctggctgggttgcttgagagcatccacgagtgtgaaggctgcgaatagggcgcgttagagagatgagttgggacactgtccccacctcaccccccacaccttgtgcctctttaaaatgtcctatgcactcaaatgttgtctgttgtatttgcaatagtgtctctacgaaacccagcctgttggaaaatctaacttttgcagttttcttaagggtgttaagccacaagctgcaggtctgggacagccctagctgcaagttaagggacagtcgttcctcctgcatttgcatcggtagttctcgcctgtgttctggggacaaagcattggctggtcagcacctgagccgaaccccttcctttcggggaaaagaaaggtgctgggaagcaaccgcccagctcccaccatctgtacttacgtcgaggaagatcgacatgcccttggacaggtgcagagcagagctgagctcctccgaggagttgttggaggacggcgatgtctcctgggaatcttccatcctcgggagccctgacggcctcaggcggagcggggctaggcggacgcaccggctctggcaagggcgcggccgcagctgctgcttcgccgccgccgggctctggatccgggagggtgttcgctcccgcgcgcgcctccctccgcgctctccgcgctctccgcgctcggtgtccccccctccctcctccggcctctgcgctcccacgcgctccaactctcgcctcctccttcccgtagttgacggcgtctggatccatgtcatccccgcacgtagcaacgcgcggaggggagcgggctctgcccccggcacggccatcggccacggctggagatagcctggggacccctaccagccccacgacggccccaagtgcagggatggaggagggcgtccggacagagagaagggacgaatggcagggcgtttgtcctgagcagccaaagcgcaaggtaaggacgcccccagcctcacctgagtggatgccataaatagggaggaactcagagaggttctacctactctgcttttggtcccagtggcctgtctgcccgaccttccccaaaggcgggggcagggttcacgaataccagcaatcgaggagcagctggtttggtgtagggattaagccattcggtgttatcttgcgctcgaaggacttaacctgtaagcctcacttttcctcatcagtaaaatggttacaccggtctcaccccagagggttctgaggcttacctatggcagtgctgctgacaaaggcggtgctatgaactctgcctagagtaggcttcgaaacgtttgctatggggcaaggattgttaggtaatgttcaaatatgaagtttcccaaagtcacaagacgaagtccttatctgtgtttaagcatttaaaccagggtaattattcaatatttgacggcttctgcgaaggctgtaaaaataggaaactgaccacacctttcatcaggagagagatccagtttattgggcatctaaaatgtgtatgtgttggttacaaacttgagctatctgggagcgagataaggcaaaaaagagggaaccttgtctaaacaagactctgcctctaccagtgagaacgggtgaggaggatccagatctccattttgtggcctttggagaaaagtaaacatattcttcctataagacaggcccacacacaaccaaaatgctgatcaacatgtgagtgtcttaaaggcatgtaaaacatgctaggggtttctcaggagagacaggttacactctggctggggggaccaataaaagcttgatgaaagaagcggtatatgaaatggaccttaaaaatcagtggatactccatgcttgatagaaatagaaggaaaacacttccaggcagaaggaacagcgtaagcaaagcatggcaccaggaaagcacgtggaagctggaagtagtccactggggattcctataaacatacagaatcccagatcctacctgggctttccaaatcccaatactaaagtactgtctagtccagaaatccaagtccccctcaccctaatgattcatacacagttgctatgtagtaggctcaggactagggtgtggcaagtggggccacttgagcacagaatgtaaggaggcacttgctctcaatctctatcctgtgcttgcatgatcctgagaatgattttcttaaattttgcaccctaggtgtcttgttcacttcacccaagtcccactgctcctttgtagatgggtgcttacaaaaaaaaaaaatgaatccagttgttctcaacgctgcctgtacattggaatcacctggggtgtgtggtaactttaaaatgtgcccacaaattcattgacattcttcctatagagaagtgggtcccctccccttaaatctgaaagattgtgactgctacaatgaatgaaatggaacagaagtgttgctatgtgctttccgagggtaggggcataaaagcctttgcaattccactttttacagtggatttgctcctggattcttgaacttccgtataggaagtttttctaccttaagccaccatgctttgaggaagcccaaggtatatggaaaggcaagtgtagacacctggcttacaggtatagctaagcagagcctttgcattatcccagcctcagcagcagaaatgtcaatgaggaagcctgcaaatgactccagctcccagctcttgcag

SEQ ID NO: 587671 - DNA, 4001 bp, Homo sapiens
tgtttaaacagaaatgttgtagaagattttacacataaagaaaaaaagaaaaaaaaaaggtaaaaggaaatggtttactatgaacatcactagttaactacctaaaacaatgttgactattttcctgtctacctactaaataaaggaagggagtggttggtaaaactagtcataaagcatgctggtcacagtaatccttcagaattaattgagagttgttcactctactatttattaactagatgatccgatagttgctgcaaagtaacttgtggttaatgcaggtcagtagagagctgatctcactgcaggccggaggcaacgcccaattcccacgtcttcccctcccccacccaacaagggctgggcagctttaatgcggaacgccggtgcagcagcacggagcacactcccagactacagtggcgcccgcactcacgcccttcaagtgccccacccctcccacacagtggccaaggagccaagccctatccctaagagctgcgtgcagccgcaccacccctggtctccactttctgggcgcaccaactcccccccttgctcgagtcccccgcccccctgtgtttctggccgtgccgcacctgcatagcgctgatgtcggcgttctgcttgtcctccagctcctgcagctgcttctccagcgcttcattcatgccccggcatgcttcgatttccagggtcttggccttgagcagacgacggctctcggacacctcgtccttggcggcgcgcacggcgtcggtgttcttggcggcgctctcggtcagcacggtgaagcggctcttgaaccattcctcagcgttctgcatgttcttggcggccagcttctcgtactgcgcgcggatgtccttgagcgcggcggaaaggtcgggcttggtcacgtccatctccacggagatctgcgcgtactggatctgcgcctgcagttcggcgatctcctcttcgtgcactttcttcagaaaagagatttcgtccatcaagctgtcgatgcgcttctcgagctcggcgcgagcgagcgccgcctcgtcggcgcctttgcgcgcttccatcagccggccctcggcgtcctcgcggctcagcacctcctcttcatagcgcgcctgcaggttgcgcagggtctcctccagcccttcgcgctcgccctggagcgcctgcttctcgttggtggcatcttccgccgccaggcgcaggtcgcggatctcctgctcgtacagcgcccggaagcgggatggctcggagtgcttctggcgcagcaccagcagctcggcttccaggaccttgttctgctgctccagctcgtgcacgcgctcgatgaagctggcgaagcggtcattgaggtcctggagctgcgccttctcctgcgtgcggatggacttgaggtcgttgctgatggcggctacctggctcaggtcgaggttctccagactgggcatcaacgatccagagctggaggagtagctgcggcgcacggacagcgaggaagacaccggcgccgagtagctggagtaagctgagcgtgcggtgctgtagccgctgcgcacgctggagatgtgcacccggggcgtctccacgtagcgccgcttgtaggaggtcgagtagtacggctcgtagctgaaggaactcatggtggcggccggtggctccccggcccgcggcggcggtgggagcccggagagagaggacaggggagagagggaagggggaggatggatggctgtgtgcggctcggcgccgttctgccacccctatttatacgccgggaggctcctgacgcagcctgcgatcgatcacggcacgccggccagtgggggcagcgcgctgctgcagccaaggcgaggattctgcgcaaaagggaaggcggggtcgagctacggcccgaggagctgcggcggtcgtcctttccactttgctcagagggccctgattttctctgagatcccatgccccctcactcatttcccttctgtactcactcacgcagcccctcccgtcctgcattgcccagaccccgtgacacttggatccttaagttgcccccaaaacaggttcttgctcccttttgacaccctagttttctgtatcccgtcacctcgcagacaccctgtccccccaactcgcccttttcccaccaggaacctccttaattttttcccttggtgtttacggtgatggtgcggctagggaattttagatacaaataaataggctaggttatgtgtatgcagtatgtatggagaagagttttaatttctttctagctttctggcactttctgcaattcatcttcctttctcctgattatttttctttttctttaatgagctgcttaacacatagggaatgtgcgcgcgagtgcgcgcgcgcgcgcgcacacacacacacacacacacacacactcgtgaaactgcggcactactgcaggtattggtttagcatttttaaacctttacagcagttaatccgcctgttagtgtttctagattttcacatttcttaactgagaatgaagccgcagatggctttaacgtgttgcagtgtgtgggtggtggagggcagagaaagagttggaaacacagagactgacttgctgaggcagccgcgcgctccgcagccgggagcttcaagctgcctggatcctcaccaagctaaattcctgcttgctaccaccaaccgcagcacatttaaagtccgctttcctctttttacacatgtgtagcacacgacctgatgatttcgataagccttgcagttggctgattttcagggaagccgctgcggccagccctgagcgctgggtgtggtctctggggaggagaactcggcacccaggcttcttcaggaacggatagaaaatagccatagccgcgtgactcttcccccgatacaatgtaataacccgaaaacagatgcagtcaggaatgcatggatttccttcaggaagcacccagatgcttgaaactggcgcacgcggtagcgcacgtggatacaaccctacggtttgcagggcattttcacacgcatgatgttaggagtcccccaggtttcatggagggattgcagagatttacacgaaacacctaagatttatctgagcaagcatttagtttttgttttatttgtatatcgcagcatttgatgtgcaacttatgttttttttaagaggcaaactgagggggaatatggtaactgttttcaaatagagaagccggaatggcttcccctgtgatacttggagggtgaagtatttgcagtggtgcagttgcttctggagacatttcactcctctcccgaggaaaggatggggtgaggcttatcctcagaggccctttctcatccccccccccaaaaaaaatacctgtgattgtgatagcccaccgtcctcatgatagactgcagcagataactttcctcgggtttctaaacaatgtctgttgtcgcaaataatgcaaattcacaaatattgaaattagtagtttaaatctatcaagactaagtgatctcagaggaccatccatgcccaaatattctagatttcaagcctaaggtcatgaggctgtcctgaatattgtttgtccctggcaggtttggtagggtacttactctgttgacttttcatagcctagctatccttggtcttttcactcatgaaattcaagggtggaataggcttctctggaggcggagggtggaacaaggacccagataagccatagagttgtctcctcccaattacccatatgtagatgaagcatggcagaatggattattttgttaacctgctccctgcaaacctcattgttccacactcagtgtgtgtgagtctgcataaaacacactctcaggtatttatgaattcgtttcctttgtgccagctgtctttccccggagtttcaggtcaccctcagatcttaagtccatcagcgttttttttctttctttctttctttttttttttttttttttttctttttttccgcggc

SEQ ID NO: 587672 - DNA, 4001 bp, Homo sapiens
atattctatgaattcactataatacctgctatcacttactggcatattacattatactcagtgacagagaaagattctcctggactgccagacagttgccccctacaatgactaaccttgcccaatagtccactaaccacacccagctactaagtcttggccctgcagtagagatccattaggtacaacatgaatatgctgaaaaacttgttagtggccaaatagcaaaaaacaaaaacaaaaacaaaaaaacaaaaagccataaacaaaacgcccccaaactccaaagccaaacagcctttctgagagtagtcactttcttaaacgtttagattttcaggtgtatcgagttataaatttgttgataatttttatcataaagtgtctatttaatgtagttattcagctttcctgaaaagagagatagctctgtaaatgcaatttattctcgttatattataactaccttattggtagcagaaaaattttaatcaacgattttgtcctttgcgcttagtcaacagcaaggtcacttcagttaatagacctataacctatctcactatctataaaacgatcatatatatttgtgtctatatatctagatttatatgcatatgcacatatgtgtatctatagatctagattaatatcatacatgatatattgatataatttatactacagtctagcataaaatataatacatataaattatctacatatataaaagaactatatctatattctatcattctatatctattctcagccagatgatggcaatagtaagctatataacagagaaacagagaaatagaacgtcctggtgtttgtccttgacattatacatttgaaaagctgaaaccactagatgaaatattagaaaccaaaactctgttcatgcttccagcatttgaaaacatttttccataaaaagtttaagcatgtgcattgagattaatctgcacctcctttgtgtaattcaaaaaccttttgtttctactagtattcattcttttaaagctgcataaaaagagataaaactacacttgcaattctttagaataatttctttttaagtaagcaagataaccaggtgctgagttgatgcctgcaccctgcctgctttaacttaagtggtggaagctctgccggaacagcctctgcactgcggttagtgttccggccacgcacgtagtaagcatcgtacctgtacgcagcgatttctatatccagagccatcttgacgttgaggaggtcctggtattcgcgcaaatgacgagccatttcccactttgtgccccgaagctcattttccagctgctggatggtgtcctgaaacagacacagagaatctccccagactcatccttgcaaacagcaacttccttcgcaaaccacttgctaccccttccccctggcctcctcccgtctccctccacttctgcaaacctcgctgacacctgactcccagccccccgtcccaccccctttttcttttaaatctaagcgattctcaaatgaacatacaagatcagtaagacaataggacacttcctgggcacatcacgcacggagaccagtggacttagaacacgtctcaacaggacacaaacatgcatggggaaactccatggctgacctggccattcccatctgagccctttgggctgaagccaattttgagagctcttccgatcactgccggaaaagtagagaatacacgcgtttctgcataagctatcctaaagttgctgatttatccactaccgaattcatccctcctgctttaaacgtgcaagcgtgcaaaattagaactggaaaagatgcacgtttctgaaaaaggtcaagacccttagcagctggggcaggtgggtgggggcggagtgtggaggatgagatgggcgaggacgctgatccgcaaataccctaggtctgcggcgcgcgtgctctagcgagcggccaccagggagcgcggcggagagggcgcctgggcacgagcccaagtgtcgggggcgcgcggcgctggcgctggcgcaggctggccgcgcagccgcggttcctacctggtagctgctgaggtcgtggttgtggcgctcctcgatgtcgctgagctgccgctccagggactccttggtgccgcgcaccgactctagctcgatgctcttggactgcagctggcgccggtactcggcgatctcttccttggcggagcggatggcctccttgttctgctcggccgcctcggtgagcttggcgtagcggcatttgaaccactcttcggcctggtgcatattctggtctgagtggctttcgagctgggagcggatttccttcagcgccgtcgagatgtctgtcttcaggtagtctttgcgctccaccgtgatgtgcgatgcctggatctgggccagaaggtcggccacctcctcctcgtggttgctccgcaggaaggccacctcatcctgcagcgactgcaccttcttgtccagctccaccttgaccagcgacgcctcctcgatgtctttgcgcagcgcgcggatggccgcctcagtgtcgtcgcgcaaccgcgcctcctcctcaaagcgctccttgagccggtggatgtcttcctccaggtggtccgagtccagctgcacctgagccttctcgtggttcaccatctccagggtggcgcgcagctcgcggatctcctggtcgtacgcgtcgcccagctgggcgtgcgaggcctgcttctgccgcagcgcctggatctccgcctcaatctccttattctgctgctccaggtagtgcaccttctctatgtagccggcaaagcggtcgttcagcccctgcagctgctccttctcgttggagcgggacagcttgtagtcgccgccgggtccggagccgccgttgagcagggacgaggactggctgaagtcaaggctgctctcggcggagctgagcatggccgagctgtaagcgaggcgcggggcgagcatgctgcgcttataggaggaggacacggtgctgggcgagccgcgggaccacgactgcgagcggaagccactggacggggagccgctgacgcggctgaagctcgagcgggtctcggttacccgccggtaggcggacgggttgcccagcgagtccaacgtgtagctcatcttggaggccttggggcgtgtggctgtcacagcgttctgccggcctcgccgcagcccatttatagccgcggcgctggtcccgggccagggccccgccccgtggaggcggcggccgaggaggcggggactgcgggcaccggtcggggaggaggggaggggggcggctgaacggtgattcagcgcccgctccacgtgggcccaggccgcatgggaacctggacttttctgccctgggcccagcccctcccccaggtcccctttcagtcccaggctacttgtagccgggcattcgccttctttccatttctcacctcccgattgcgtttcgcacccttggtgcgaatatcgccagcgccctttctttgtcactgtcccgccgttcaggcagcgcttccccgaccccgtggtccccttgttctttagccttctaccctcttatcctcaaggctttctcttattttgccctttccctgatacttttttctttacccatcttctgtgcttaatttcatccccttcttttttggcccctcttctccttcctactctggcctttagtccagttcaccctgcccttctctcagccccttcctcggagatccttttcttccaatctttccttctccccgtctcctccctccttccccttgcattccctcttttcccctcccccaccctcatcttttcttgcctccctccccttcccccaccccttgtcttaaagcagctggagatgagcgccgaggagctgggtctagaagacaaaacaaaacaaaaaaaaagactttgcggaacggtctgcctgaaggcttcgggaaggggacaaagagaacaggccggggtagttatttg

SEQ ID NO: 587673 - DNA, 4001 bp, Homo sapiens
tgttccggccacgcacgtagtaagcatcgtacctgtacgcagcgatttctatatccagagccatcttgacgttgaggaggtcctggtattcgcgcaaatgacgagccatttcccactttgtgccccgaagctcattttccagctgctggatggtgtcctgaaacagacacagagaatctccccagactcatccttgcaaacagcaacttccttcgcaaaccacttgctaccccttccccctggcctcctcccgtctccctccacttctgcaaacctcgctgacacctgactcccagccccccgtcccaccccctttttcttttaaatctaagcgattctcaaatgaacatacaagatcagtaagacaataggacacttcctgggcacatcacgcacggagaccagtggacttagaacacgtctcaacaggacacaaacatgcatggggaaactccatggctgacctggccattcccatctgagccctttgggctgaagccaattttgagagctcttccgatcactgccggaaaagtagagaatacacgcgtttctgcataagctatcctaaagttgctgatttatccactaccgaattcatccctcctgctttaaacgtgcaagcgtgcaaaattagaactggaaaagatgcacgtttctgaaaaaggtcaagacccttagcagctggggcaggtgggtgggggcggagtgtggaggatgagatgggcgaggacgctgatccgcaaataccctaggtctgcggcgcgcgtgctctagcgagcggccaccagggagcgcggcggagagggcgcctgggcacgagcccaagtgtcgggggcgcgcggcgctggcgctggcgcaggctggccgcgcagccgcggttcctacctggtagctgctgaggtcgtggttgtggcgctcctcgatgtcgctgagctgccgctccagggactccttggtgccgcgcaccgactctagctcgatgctcttggactgcagctggcgccggtactcggcgatctcttccttggcggagcggatggcctccttgttctgctcggccgcctcggtgagcttggcgtagcggcatttgaaccactcttcggcctggtgcatattctggtctgagtggctttcgagctgggagcggatttccttcagcgccgtcgagatgtctgtcttcaggtagtctttgcgctccaccgtgatgtgcgatgcctggatctgggccagaaggtcggccacctcctcctcgtggttgctccgcaggaaggccacctcatcctgcagcgactgcaccttcttgtccagctccaccttgaccagcgacgcctcctcgatgtctttgcgcagcgcgcggatggccgcctcagtgtcgtcgcgcaaccgcgcctcctcctcaaagcgctccttgagccggtggatgtcttcctccaggtggtccgagtccagctgcacctgagccttctcgtggttcaccatctccagggtggcgcgcagctcgcggatctcctggtcgtacgcgtcgcccagctgggcgtgcgaggcctgcttctgccgcagcgcctggatctccgcctcaatctccttattctgctgctccaggtagtgcaccttctctatgtagccggcaaagcggtcgttcagcccctgcagctgctccttctcgttggagcgggacagcttgtagtcgccgccgggtccggagccgccgttgagcagggacgaggactggctgaagtcaaggctgctctcggcggagctgagcatggccgagctgtaagcgaggcgcggggcgagcatgctgcgcttataggaggaggacacggtgctgggcgagccgcgggaccacgactgcgagcggaagccactggacggggagccgctgacgcggctgaagctcgagcgggtctcggttacccgccggtaggcggacgggttgcccagcgagtccaacgtgtagctcatcttggaggccttggggcgtgtggctgtcacagcgttctgccggcctcgccgcagcccatttatagccgcggcgctggtcccgggccagggccccgccccgtggaggcggcggccgaggaggcggggactgcgggcaccggtcggggaggaggggaggggggcggctgaacggtgattcagcgcccgctccacgtgggcccaggccgcatgggaacctggacttttctgccctgggcccagcccctcccccaggtcccctttcagtcccaggctacttgtagccgggcattcgccttctttccatttctcacctcccgattgcgtttcgcacccttggtgcgaatatcgccagcgccctttctttgtcactgtcccgccgttcaggcagcgcttccccgaccccgtggtccccttgttctttagccttctaccctcttatcctcaaggctttctcttattttgccctttccctgatacttttttctttacccatcttctgtgcttaatttcatccccttcttttttggcccctcttctccttcctactctggcctttagtccagttcaccctgcccttctctcagccccttcctcggagatccttttcttccaatctttccttctccccgtctcctccctccttccccttgcattccctcttttcccctcccccaccctcatcttttcttgcctccctccccttcccccaccccttgtcttaaagcagctggagatgagcgccgaggagctgggtctagaagacaaaacaaaacaaaaaaaaagactttgcggaacggtctgcctgaaggcttcgggaaggggacaaagagaacaggccggggtagttatttgtataaaaagtgggatatggcgtttttaacgtttgggggacgtccgcagcttccgcaggggcagaaggtaaggcgcttgtgctcgctatggcgccggcagcaccaaggacagcgcccaggtcggcgagtgggaggtgcagccacccggggggcttgtcacccagcctggcctgtcaggttggcagggggcagggggttcccttccccctcttctctccgagtaaatacaatttaaacctgcctgtagtgactatctttgcaggagcgaagctggaatcacaggctaagacttccctgcaatgcagggttggcacaatggacagatcgcagattttgaaaacaaccaaaattcattaaagtcagttaacagaaatatatacttgtagcccagtttgagttttctaacatatggtggtataggaaatgaagagatacagggcctgaaatgtgaaggtcaaatactccttggaaaggagaatttgaaatctgttgggatgaaaagtccagggaaatatagtttttcttaagtttggacacagacaattgccttgtcatctttcggttcagtattccctatgtgtaactgcaatgattgaaaaggcatctgaattaactttaaattgatttaaaagttgcggaacagagtcaccacaaccttgaataaaatcagatgttttcccttcatttaaaatgtaatatatttttcgctttagattttaatgattgatttggaatagattttctatatcattaaacatgtttatgcaaacaagaactctacacagacttcttgctgtctggtgtactcctgttaaaatgtccctttattttgggtagtgctttgggggtaattcaggttaaaaaagttcagaatactacaagataaagtgaagaagagattgcagaactaacaacagcgctggggccacaggtacaagtgactgaatgtgcaacgcttgctatgggtgagaagaaactactgcttataaaaagtagggactccagaccgaaatagcttcttttcacagcatgtttccttaagtccctgttttattaaaagacaggatcatattcatcagtaagtaatcaggaaaggggtgggtttctagaggttttattttttatttttatcagctcccttggcccatctgtattaaaatagaaataatgttttaaacagga

SEQ ID NO: 587674 - DNA, 4001 bp, Homo sapiens
tgagacatatggggatagatcctaggggaggcgcaggatgggcgacagagccaacccttcagaggagtattacctcacctgggtgtcctggagccacagagactgcaggctggcgggctgtagcttcttactgctgccccctgtcttgaccacctgctgacccacaaagggggagaccaaatggtgaaatttcctcaccaacggcccttctggcatccctgtgggcagaaatgggcaaaagaggccaccgacttagctcatttatctctagcatctttaacaggtgccaagcatcctccatgccgccatttttgctgccaactaactttaagagcaagcatggccaaaaagggagtgtggctgggaggcggtcagatcatagagaagagcagctgtggcagggtgtgggaaacgtagcaggaaaggcagcccctcttacctttcttcatgcagcaaacacttattaagcaccaacagtgtgctaggcagcacatcatgggcaccatccactttattcctgagcggcacctgccacaccaggagctggcctttgttactttttgcctggactgtgaacctctaacacctcctgactttctctgtccccctgctcccgctctcaaaaaacagccattctgacccactgctgccgacttatttcccacttttgaagggaccagatgccgccctccaggaccgccgaccactagcgtgggggaggtgtgcatgaaacgaccaacacgcagacagagctcagaatcataagtgagacccccagccacgtaggtaagcccggcatagctacagacagttatctctgatccccgagaaacagctgtggttctgttctaatcaccacgcagggctcccagggccacctctactctccctgcccccaaatcatcccagtccactgacagccgcctacatgaggcagtctgagtggtgtacacccgggctgttcgggcagaggagactcccagcctcacccggggcagctgcctaaccacctgttcctgcaccagcctctctataagttatgatgaaaatcgaaaagaactaagtagatatcgggcagggggtagctattatatttcagtgattctaaaaaacattttagaatacttttaaaatctaagaaatggtgacggctcacaatctcggcattctcatattcggcagcagcacattcaataacgcgcatcttacactcgctggtgccgattcgctgagatgtactatttcccctcatcaggctttccagacactccccagggaatcctgacaaaaccgccaggctggaaggagacgtgccaaacgctgctgaccttaaccagttggatgcctgatcctcttctacggggaagcttctggaaaagccttcatctgaaatgcaccaagtcctgaaaatctccggacacgtgggcatgtttcgtttagggatttttatggagatggacaggtgggaagcaagccgcctctgcaacagccttgaaagatgagacgcggaagggacttcgaagagtcgctgaagatgccgcgcccaccctccggccctccctgcccgggggctaccgaggagctcgaggctggcgctgcgccagccagggaagaggaggggttgtctccgccgttctcttccgagtgcccgaggtggggggtctaagaccactgctttcccaactctgcctcggggtgcggggagaggggcgcagacgcgggtctgagggtcagtgggggcctccaggcgtgggcagcacctccgcaggcggctgagacggaggagggcccggggcccgccctcccttcctgtcccctcccgacttctccgccaggccgcagatctaccggagggcgggcggctgcactcaccggctccgggtgggtggcacgtcggcccgacccagcaccgctacgcagcccgcacagccgctccagctgggggcggagatttcccggctcggcggcccatgcggcctccgtccccttaggggacgcccctgtaggtggaggctgcggggctcctcccccaagtgggcgtggactccggcctggagggggtggcggggtgcgcgcaggcgcagggctcattccctggaaagtgggtctaggtcgaggctgctcttttgtgggtgggcgaggggttccatcccgggggtcgctggaggcagggctgcattagagggtcgcgagtgaaagcagggatggaagaagggtgcaggctgggactaacattggagagacgctcttggaaactttttttttttgcggggggagatagtctcgctgtgtcacccaggctggagtgcagtggcgcgatctcggctcactgcaacctccgcctcctgggcttaagccattctcctgcctcagcctcccgagtagctgggattactggcgcccggctaatttttgtatttttagtagagaccgggtttcaccatgttggccaggctggtcttgaactcctgatctcaggtgagccgccctcctcggcctcccaaagtggtgggattacaggcgtgagccaccgcacccggcccttttggaacatttcttgtctcaaggagacagttatagggaaaagtcaatgggtgtgtgaatgggacagcctgggtgttcccacaatggcaagcctttctgtgggttctgcttggcctccgagcctaatgaagtcgggtgcaaaggaaacaggtgttcaagactcgtgaaatgttgaacgggtgggatttttttgctttctattatttgaattttattacttgaatttttactataagcaaattttgcttaaagtatttgtgtattaaattttttatttcatagaataaaagagataaaacaataggctgtttaaagatacatatgttttcttgtctttagttctcgaaggaggatggggagccagcactttccaggaagttgggaggaaagtctggggaactccccagcaggtgttcaggaaataggctggggtgaagtcaccatggaccctagctgaggggtccctggggaaggacttggtcagcacagggaaacaagcccagcccaccgtcagagacatggttgtgtcctactgattgagagggaggttacaagtggccttcccacagtggtcacctactgaacaggctagggcaggaggtgaggagagggaggcctggggaggcctagggtatagggtcctcatctagaaaggcatctggaggcagaggggatgaggttggagggcatggggtttgcaggaggcatcccttgaagagcctctggtccccctctttctatgtccggccttttctggagaataacgacccccccacccccaggatgcccctgctataggatcaggctcaccacaatggtagcttctgggccccctagtttctctttctgtagagtggctgagccgggagggaagccgtagccacagtcctcgccttacctggtggaatgaatgcctggtgcctaaaggggttcttctgaggctaaggggctatgcaattgaaaatctcatggttcacagcttggctctgtcattgattgttattgtttattgagcgcgtactatgtgcaaaacactgttgtgagctctttgcatatattgcttcattattagttgtggggatacaagcaagtcacagtatctctgacttcattcattaaatgggatatctattaaatggtattatagaaatatcacaaagccacgcttctcaaacttcaatgtacctatgaatcccctgggaaccttgtttaaatgcagattctaaggtctataccagggcccaagatgttgcctttccagcaagctgctgggtgacgctgatgctgtggtctaggggccacatttttgttttgttttgttttccgtgacatagtttcactcttgttgcccaggctggagtgcaacccaggcacgatcccagctaactgcaacctctgcctcctgggttcaagggattctcccgcctcagcctcccaagtacctgggattacaggca

SEQ ID NO: 587675 - DNA, 4001 bp, Homo sapiens
taagagggcctaaatttgcacaataatggcaaaacttgatacagttttatctcaaaccagcaaagtttagatgtcagctcagtaatttcaattagcacattctggatacatcctttctaacctgtacaaatacacactgtcaaaggcaaattaagccttgcaaacagtatttatttgcctcacatttatgtcacatgataatctgtgtttggatatcagacagccaagacaatcaagaattccaggaaatgtcaaagaaaactaatgactacagaggtttccactgtgaaaacaatgtcctgtttttggatgatcacatctgctaaccctctattttttttttttttttaatcaagaggggatagataactcattcttaaacttatattgggaatacttctaataaaagaataatataatagatagattcaagttcccataaaaatgatgcttttctttgtaattcctgtgggtagaagaaaggagaaatggggttggattacaaacattgatcaagaggctctgagtaccctcatttttcctatttttatatcttttatgatgaaatgacttaaagcaatactctcccctcttgaaaactaataaagtgaacatgcttatttatcttacttattctttatacaaatatattctcttctgcattcagaaattaatatttagaacacttcaggcataaaaggaatccagatctttgataattggttaaactctccgatttaggacaacagcaacaaatattttctgattatattgttgcaaaaataaaagtatccatggttttgttaaagaacaagaacaaagtaacacatttaatgaaaacaggaggaagcctggaatccaccgtgataaaacttagttgcaatatgaacgctgctagaggaagggctggccagaacacttcctcatcttaaaccaagccaaaaataaatgggcggctccaagtccctttgattttgttaaatgtatatttccagtgtaaactggcgttgtttaagttaacaaagttttcccaaagggccggtgggaaagaatgagagtcctgcaaatgcaacctgagaaaatgtgttcctcgcacggaaatggaagagctgtgttgagataccagggacacacgcagggcatctgcgcgaggtgacattaggctgcccttaatgagttttctgcttctgataacagggtgtcacttttttcttttcttttaactgtaaaaggatcctggggtgaaaatgagtgaattgcccccacactcctagattccttccgggagaagagggcggacgcaggctggggaggcgggatcgggacccggaggtcccaggaacgggtggctgaggtcaaggccgaagacctgggcgcccactcccagtgccgggtgcccgggagaggaagactgggcggacccccgcgcttccggatgaggcggacttaggtcaatgcgggaaacattgcatgtcacctcttcccactcggagaggccgggtgtcttcctgagagctggcaggaaagcggccgaggcgcagaggcgcccggagccagccgccctggccgcgtccccaccgggctgcggtggctgcggggcggcccttacctggttcctgcggtaccagtcgcccgagagggagccgttgccggcgcctggtgccccgtacgtgaaattcagtgacagctcgtccagggcggccgaggcggagtccccggggcccgcgggcgccaccgctgccatgaggtctcgctcccggcgctcgggctccggctcgggctgcggccgcctccccgccctgttgcaccgcgaggaggccgcgccgcagccacttcctgctcggtgcccgggcgaggcgggcgcgccgaggccacctggctcccgcccccgcgcggccgtaggtgctcccagcctggccgggcgctgcctcctctcctcctccggtgcgaggtgtcctcggggagcccggcggtctgcggcctcccggggccgtccagctcgcaccgcgccctccttccgctgggccagtgtctgcatcctcggggccgcactgcccaagggggcaatccccgcggccgtccgcaacgggtccccgcgcctgtcggggccagaatcagatcatctccgttgtaaacatttgtccaagtcaatggaagaggaggagacactgactaacccaaagcagctatcatctcccatctctacctggcaattccagtcctctatcacatatgtagtgtttctcaccgatattttaaaaattgattgcatatgaaaaagtcatgagttcccagaaatattgtaagcaatatgagaaaaaaagatccgagcgattgaatctcagtgccagtgcttgatagatccttagtaaatattccttgaatgaggaatgtggtagccataggaccccagtgtgcgatgactggattgggtttgcttcagatgggatcaggtggagttgctgaaaagttgccagctactgtatatatgaatttaggatgaaagataaatgttgttattaatcttaagaactctaacgagatgttctggttttacctgtattcaaattctaatgtgtgaccacaaatgatctgtagggtatttctcactttaaaaaaaccatgattctatactgttgcctgaaggctgatagttgccttcttttgtttacacaatgctgaggtttttcttagataatgtgctttgacttccatgagttcatgaaagagagaccttcaagaaaagagaattgctgcctagaagggagcagggacagttttcagtgtttcttaggggaaatgtgcaaatgagagaaaagagtgagaaaaagtcatttcacatacagaaaaaacaagacatgtcgtctcagaaattgtgtagtttcttgcttaagcactcgagatgttcagtgaacagctaacaattgtaggtaactattcccaattttaagaggctgatttacttcaaataaatatctgaaggaaaaaggtctctatttgttatattacattttattttattttttgagacagggtcttgctctgttgcccaggctggagtgcagtggtgtgatcttgactcactttagcctcatattcctgggcccaagtgatcctcccacctgggactacatacaggtgcatgccaccatgcccagctaattttttttttttttagatagagtctctctctcttgcccaggctgcagtgcagtggcacaatctcagctcactgcaacctctgcctcctgggttcaaacaatgctcctgcctcagcctcctgagtagctgggactacacgtgcacaccaccaagcccggctaatttttgtatttttagtagagacagggtttcacggtgttggtcaggctggcctcaagctcctaacctccagtgatccccctgtcttggcctcccaaagtgctgggattacaggtgtgagccaccacacctggccctggctaatatttttctatttttttgtagggacagggtctcgcaatttttcctaggctggtctagaactcctggcctcaaacagttgtcccacctcggcctcccaaagtggtgggattacaggtgtgagctgccatgccttgtctgataagttttctataacatcacattcattgatattggtgacttcattaatgcttctttctcttcacatgctttagggtgcaagtaacagagtatccaaataaaagtggcttaaacaataattatctgctatctccagaggaatgtgtctctatgtggttctattatgtcgtcacttccacctttctgctctgctatccctgaggtactggtcttgtccattgagggaggaaagccttttccagaatcctcctggcatcctttcacctcagatcccattggctgggactgggtcacatgcccatgttctaccagcaagggaggctgggaaagtgattcttgggtatttccaacctagtgagaggtaagctctaccaaccaggatgagtgggaatgccatg

SEQ ID NO: 587676 - DNA, 4001 bp, Homo sapiens
cttaaaattatttaagagtgtatcaaatgttttataacagaggaaaaagcgaagtgctatgagattataggaatataagggattttacctggagcaccaaggaagacttcattaaaaaatggaattttaagataagctttgacaaataagttgcatttgtatcaactaagaaagtggaaagaaggggcatgcttggctgatggatgaaatctcaaaaacattatcatcacaatgcctgttaagaaaatcataattgcattgataaatctgctacataaaaaccttacttgttatttccatgtaaaatagaaattaggcattatagattatgcaatccagcatgcctatctataatcttacattgaatcaagggttgactcaatgtttagtcagtttttccaacttataagccatgtccatttctgaaaaccaaaatacaaatcaagctcctgccttcttttcttagtgaaagaaaacattcatattgttttaaatttttaaaatttttttcaagaaactataaaatatgtttgattcaagtatttcacaagacagaaggcactatccaataggcttaaaaagtcactgatttcaaacctacgaatacataaattatgcatgcattatgtgaacaatgaagggcacatccaaagtgaggttttcatgggagactggaacactgaggcaagagaaaagtgaaaacattctaaagccttcatgtaaacaaggactaactactaaaaagcacgattttatccctcagttaataagtcttgcaagggatgacattactaagtaaagttcattgcaagctttttcctctcacttgtcaaaatatactagtttatatttgtgactcgaaaaaaaatacaatgcttggaagaaagcttggcagagcactcagaatctgtctgaagtataacgcaagggagatgtctattaatctctcacacacaaaagtctgactcaaaaggtctgtggccttgacctcaagtgaccatggaatagaccacagagccagtccaggatccaaagggattaagaggagcatttgctctgctctgaaagggccttttttccccactctagtttctaacttcccattacacacactccctctgcaaggcaccgcgccaatggagccggttcactctgttctctccttgatgacagctgtcagtctgtcgccgcctgaacatgcaacatttcaacaaaatccaaagcggaactggaagggcaggggctgaagcacacagcctgatctccttcctggaggtcccagactccttaaccatcacttttcaacctgcttaaggttagaaccacctcactcttcactaacagagttgaggcagcttctgtctcctcagaacctgggcattcccacacagtgtaattaagcaacattcctggaaatcatcctaagaagaaagagcccgcaagtccccgtgtaacttcagcacgaacgcggagggtgctaaaccaggtatcggatcaaggggcgggaaaatccctcactccgccggctcctggcccctggaccgcgtggcgacgcccggcgggagcgcggcgaaccccagcgcatgggaccgggggtgagaccgcgccctcctgcagggcaggggcgacctggcgagtgcccgcggctggagagcagtgcgagcccagccaggcggtggggagggtgggaggcgggcggagcgccctgttcacccgttcgccccttgccgggagctgcggaaccgcagagggagtcgcagaggccggtcctggagcagggacctgtcctggggcaggggccctcggggcactcaccaactgcagcgcgcagaggcagatgagcgagcagcgtccggtgcagcagcccatggtgccggcggcgtccgagcggcgctgactgccagagatcctcgtcctccgccgctgctgcctcctgactccggagtagtccccgcccggcccggcccaggctcctcggccccgcggccgccgctcgcggctccagggctcggggctcgcgcccgcctttgttagtttcccggcggggcgggccgaggtcagtgcggtgcgcacgacccgagcgtctggcgggggtccctgcgtcccactgtgcaggtctgtttcttggggagggggagccaggcgggcggggcggggggttggaaggaggctacagatggcgagtgggtgaatgtctgtttaggggaggggagtatgtaggaggtgggcgtctggaaagtggagtgggctgtctgggtccgggtgtgtgtgtgtgtgtgtgtgtgtggtgggaagggaagaatgaaagggagtgccgctggggaggatcggcctgtctagttaagagtctttggggagaaaggaagagggacagagagaaaagagaatgaatatgaatgagcgtgaattagggcggccggcggcgatggagaccctcgttgaccggtgtaactgggtagacccagctgggctttcttgctgagggttgtgctgggggttgggagggtggtcggacgcgtttgcaagggaggggacacggcttagttgagctgccccagaggtggcgaggatgggagttgggttagcttgggttccggggaggaagggccgggacgcgagacacccagggtgggcgggcgccggggagcgcaaggcccagctccggaacctgcccggatgcgagggggcccgcgggcgctgcgcgggcaagtctgttgagccggcgctgggcacgcagctcgggggtctcccatccgagcttgcttctgcccgccacagccggttgcctggagggcgcccctgctggagtctgaaagggaaagttggacagagttgggtggcaaggggcgctgcggcggagcgatgcacccgcccagggcgccgggactagccaggacgccgcggggagacctggcttaaggttcttttctcacataccctttgaaatcctcaccgggagggagaaaagagaagtcgaggaagaagaagatgcgtagctttttctagaaatggagaaggtttccggaataggtataaatatatcttcacagaaataaattgagaaggatttggaaagaagatctcggatagttaagatacggacaaactctctctgaatcctgtggaaactctcctgctctctcccacctaataaaacagagcggaggcgttctgcagaggatgaaatttcatcagggctcaaagacagattttatgggcgcatttgttgtacctggtggaactgcgcaaggagctcaaaagcacaccagaacagggaacaagcctgcaggccaattatctcagaaaaggctgttttcagaatttggcacagaaaccctgtttctagcccactgctgccctcctgggttcttggcggtaggttggtaagaaaaggcaagacatctttgcgtttttaatacttccactccagacatggaaactgctcaagccgttagttcaggcgttaaaagcagtcctgtttttatttttatcctttctgaaacgtttcttcaggatctatgtttataatttaagacggttatcattcccaaggaagtctgcacatctttgaaattctagtagggacacatgaataacctcaggatttgggttattaaaagggtcaagaacattcattgtttacattccacctctgatattatcatggagacaggagaagtccagtcagaactcctcctccttttttaattcaagcgttaagacatcagtgatcaaggatcatgtgagcacgctgcctttatgcacaatccacgtactcgtcatcattctttatggatgaaaacaatagaaaaaaatgaacactgacaaataagtagtttagcatgtagaaaaggacattgcagaacatctcaggccattgacccctctaaaagctgtaggaagcagctgaaaagtgagaggacatgaacaagtcttctatctataacttccagaaattgttgtaaccttttcatctccagagactgtgatgaatgatggta

SEQ ID NO: 587677 - DNA, 4001 bp, Homo sapiens
tggcacaatctcctggagggggatggagctgtttggtatgtaaagtttgaggacagaacaacttccttcagagacgtctgtgctcagataaactgaggccatctccacttgcaaagaggaaaaattctgaggagggtttgttttcttagcgcatcgaaaggtaacaactgaccttcagccaggctgcagagcaaggaggaccccatttcaaagtcacagatcatgcaggccctggggctgcacagcaccgcagggtgggccagcaccctgcgcccttctgttcacaatcctggagttcttgagggcaaggtggttagctgcgatggaggaaggcatgaagcccaccgaaggtgtcttccctgtccggatcgctaccgcggccttgggctcagttcctggagccggcctcgggtccggcctcgggtccctcctcggcggcgtccactgctgccgcagaagagacgctcccaggatttggtttccagtgggagaaggaaggcgccgcaaataccatcggctgcgaggcgactgtggtggtcgaaggaacgtgatcctttgtcagctcagcggagccgaagtgatcgccgagttggctgagcagcgccgagggagtttagaatccgctgcagaaaacctaccagcttcttcgcggacacagcaggtaatgttcttaggcttctggagttagtgagtagccggcctgcaggccggtaaataactccgatctagccccttggtttatttctttcgttcgcgccttgaatggaggcgccatggcacagtctggcagaggaggcctgccctggcgggcgctactcagggcccctgcgttgagaatgccgagtgaggtgctgaggtttggagagaaaaaggtggcgttttcatcccttggaatatcgggcctctccagctgaagcctccggatcgacacaacacaactcccggatcgacgcaacacaactccccgccagccccttcccttccagcgggctggacacaggtgcgtgggcctcgcagcccggcgcgcacggttgcgcctttggatacctgcgacaggactcggccagaaccgtgtcccagggcagagaaaaccctggcaacctttaacgttctccctgacgcggagaatcctgcgccaacggggccttccacttcgggagactcaatcgccacccggtccccaactttcgtcttccagaagaaaaatccatgaggaggaatgggggggtcccccgaccagaccagcaagaaagggcccagttaggagtgacctcagcgccacgagggttccactgctttgatggccacacgcttttgcaaacggtttgggggtggagagacaccaggtgatggtagggaagggcggtggtgactggcacggctaagacactgcggagggtttcgctgtggagatgagaaggtggaggttctgggcactgtggctgcgagtgtgagcgatgcgtttgtgggaatcagaggagcggatttgggaaaagtgaatccttgagattcagggccttactttcgttaggggtgtgtgaagcacactgggtgtcaggagaggatgggaatgggattcgagaggcctttttttggactcctcgagagaaaatggagagagtctcgaacccaggagataggaggcgtattttccccatgcacccatggatcacgcccccgcccccacattccccccgtaggaggcaagacctgagcgcttactcacgtggctcccccatccgttccgcgtccatctccaagactgcctcacagggacccccaggaggctccgaaccatccagctttctgtcaccgccgccgccaccagcgttgtgaacctctgaccctcgcggctctgcgtccattctcaggtactgaaagttttccgggctcttccgcacccgcggatgtggcgaagccgcggggcagctccgctcgcgctccagtcgcaggatgtccttgaccgagaagggggtggaggtgacggggctcagcagcatcccgaaggcggatggggcggggccgaggaggtccgggtgaggagcggcaccctgaacttcccgtcttgtcgctgcaggccccgcagacagacccaagctctgggacagacgcccagcgtcccagacagcgccttcctctgggccatgctggtaggcccgggtccagggccgggtgacgagaccgtagccccccattggttctcgcagaaaccacgtgctagctctgcaccttcctcccccagcgctttcttcccgcgcccgtcgaatcctctccagtccccagtcgccttcctgggaggtttggttcgtattgacggttctcaaagcaaagaaaacgtggagagacagtgctgcgcgcggcttggatctccgtcaatacggtactagcgggagcttccgaggtcaacctagggtccacggggaccctcctagtggacatgcggggattggaggtggagtccttgctgtgcaacccgatccggtccatccagcctggtcttagctcaactctgcattcttatggcggaggaaagctaagatagagacagctgggacccgcggaatttgaggcgcgcgctgggatcttacgtgcgcagaggccggaccgcagagtagaagtgagtcttgacccaccagggcctatattgagatggaaacctctctctttgaacagaatccaggtctgcggagtcccgacccgccacttcctaggagcagcttctcagccccaggaccgaggaatgggtgtgggggctacatgtggggagccctcgacctcttaaagggctccgcgaatggtgggggagactggaaggcaatctctgcggcccgcgcaaagtggtcagaggcgggagtgggggtgggggggggtgggcttccgtcgcccttggcgtccccacgttctttttcttcctctcctttatcctccttaaagcggattgcctggagcgtgccagcttgtgtgcgcgtataaatgcggcgcccgccgaagggctgggaagatttgactcgcattagatctccagaaaaggcccttggttacggcgggcaccgagtaaatggcgcagtgtggcacaaaggttaccaacacggagatagcgccaacagatccagcccctgctgttactactcctggatcagggaaacgtgatttggtgtcagctgttccagcactgaatcgaagagggtttaaaaattgtgttttaatcacaatgggatctcattagagttcttttggggatttcagatcaaatgtttctttttgtttttctttccttcctttccctccctccctccctcctttttctttctttcttttctttctttctctttcttcctttttttttttttttttggttacagggtctctctctgtctcccaggctggaatgcagtggccggatcatggctcgctgcagcctcgacccggactcagtgatcctcccacctcagcctcctgagtagctgggaccacagatgcagccactaagcctggctatttatttatttatttattgcttgtagagccggggtttcgccatgttgcttaggctggtcttgaactcctgggctcaagtaatgtgcccacctcggcctcccaaagtgctgggattacaggtgtgagccaccgcgcaggcttcaaatgcttcttaaacctacttacgtgaattcaatgttacaacagctgtttgaatatgattatctcctgaaattcagataaacccaactcatctccccaggctaatgggtgcaaaattgcacacaaatatttatgcaaaatttcagcacatttgatcattcagctacaaagtaatgatttcctatacatggtaacatttaatcttcacatcaaagctatacccaaatatttccagctgctgctccttcttcttcttcctcctcctcttcttcttcttcttcttcttcttcttcttcttcttcttcttcttcttcttcttcttcttcttcttcttcttcccctcctcctcctcctcctccttc

SEQ ID NO: 587678 - DNA, 4001 bp, Homo sapiens
agaacagaatccttgggtgtacaactcatccaaaatcatacaaagtgctggaaaataccacttgattttccctctctccccttcaaacaggtagccagaagcaaaaaaaatgacctacagtatgcactggaggaatgacttaggtattaaaactttcactgtctctgttgtttcattgtctcaccagtgaagaatctgagatttccacgcaaatctccaatagctttggtgtgcacacctcttgctccctgaccttggccccttgtgcttttcatagagacaccctggggaaggcagtttttgatcataatggttgtcacctgagctggcattaccaaaaagctgggctccagctgcccacgcagtacaggtatgggtagtaaggatagctgttatacacggagaccagggaggcccgggagaaggcctcctctttcagggccggcaaagaggagtgcttctccaagtctcccagctccgaggagagctgctttcgcttagtcttatagcgtctgttctggaaccatatcttcacttgggtctccgtgagcttgaggttcttggccaggtgggcccgttcaggggccgacaggtacttctgatggctgaacttcctctccaactcgatcacctgagtgtgggagaaggcagctcgggagcgcttctgcggctgcttaggggtttggggaagccttggaagggcgcctgaagtgttttcagagtccaacagataagaccccaagtgcctttctggaaaggagagtggggaaggagggatgggaagacaaaagttacatgttagcagggaagagaacagaattcaatccacccttatctctttagtgagtgaacaaacagcccactgtcatcgtggatacatttcacttttttcacatgactaaggagctctccggagtgaagagtgagtaaatatgtttattacgcattcatttgctaagaatcatcaagaacccaaagttagagacgtttcgtggttgaactttctccctactgtctagtagaattatatggggattctggatctgtgtgctgaggagaggcgggagagggaggcagggaaaatgccgtggaacaagatacccgggaaggccagaccaaaagacatccggtgttaggatccaggtgggcaagagagggcttgtgccactggagacgcagaggcaggctcattctgggctttaattccctcttcgctaaacgaggcgttcggtcgcctcatcagaagtgacaggaaagaaaataagtggactctctctcctggacaccggagggaaccccgaatataccgctttactgcccacgggattgggaagcacacggaggctttgctggtcaacccctgctttgtcactgttaataagttattattagttctcataactaccggggggctggcgccgatcgcgggtggcgcggggcgggatccgctcctgggacggtggagggcggtggcgctgcagtcgcgccggcttctgagccccagggagcggagggcacggagccgggcgagtcctgcggtgtcagaatcctgcgccgccctgacgctggggctcagggttcattccgggggcgcgcgcgtggctgcggaggcgggaaggtccctctgcctgtcgccgcggagccccgcgtccctgcaccccgagctctgggggtccgccttgggctgccccccttccccggcctcgccgcttacctggctcggtctctgccagcgtctcggcctcctccggcgcggcgcggggcccggtgctcagctggtcgttctgcgccccggcgcggctgcgtcctccctctggctctggctctggctccggctccgggtcgcgctgtctctggctgctcgtgcggccgccttgccgctgcgcgccgtcccgcaggatgtcctggatgaggaaggacgtgagcggcttggacggggtcggcggcgcggccccctccgctttcgcctccccgggccgcggctccggaaccctgagcatcccggcggccccgccttggcctgaatgcacccgcccggcccgcaccgctttcactttccgcctcccggctcgcttatagcccaggggagcgggccgcgccgccctcccattggccgcgggacgggccgcgccgcggattggccgccctgagccccaggtgaccccgccgatctgcgagccctgagcactgccccgctccgctcctccctaggggattccttccccagttccctctccttccccaattccctctccttccccaatttcctctccttctccagctctcctccctccgccctgagccgttttcccaggccaggagcgcaccccaaagcggggctcctctgccccaacccacccgcaacagagagaagctcctggggatgggacgatcaagacaaacagtccagttagctcttcaggaccgtcagagccaattacaggggatgagcacgcagtcactgcagccgcgcggtaccgtgagagttctgggtgctctctctctctgggagagatggtgcaaactcagatctgcaatatctacgacctcaaagaggcatgacaagtaggtgcagccagaccccaggctgaaagaaggaaaacacctttgccaaagccttttcccgttgcagaagtggttttctttggtggttcctttatccgcaataacctgttaactttccttcctccccagacacatgacataccatccttttgaaaagtttccagacggatggaaggcgttttaggccaggacaaatgcaaaaactgcatttaaaaaagtagttcaaaagaacatcagcatactctttttgcagattaccaactgttaacatgtaacccattggctaaacaatgggttagccagattggtccaaccggtactgtgactggactggacggtaccgtgacaacagacgaaagtggaacagagatgatggaagtattttctttccttgtcttttctcttcttttttttacggacagggtctccctctgccgcccaggctggagtgcagtgatgccatcataactcactgcagcctcgatttcctggattcaagtgatcctcctgccttggcctctcaaagtgccaggactacaggcatgagtctcagtgtcaggtcgatgatggaagtattgaattaatgttaaatttactgaaattgcacattgtactgtcagtgtacaagagaatatttttaggaaataaacactgaagtaagtaggagcaaaggcacaagatttatgaaacttacatcaaatggttctgaaacaaggatgcagattgatagatcccacgccataaagccgatgggttaaatggtaacagttggtaatctggaaaaagggtaggctgatgttttttagaaccatttttttaatgcaacttttttgtctgtcctggtctaagacggcttctattcaactggcaacttttcaaaaggatggtatgtcatgtgtctctggaggaaggaaagttaataggttattgctgataaagcgaccgccaaagaaaactacctgtgcaacgggaaagactttggcaaagctggttttcttctctcatcttttcaaagtctctttatattagaacattctttaatgttttcttttgaatcattgtagattcacaggaagttgcaaaaataatacctccagtgtcctccaaagacatctatacaactgtaggacaatgtagaaaacaggaaatttacgttgggacattacagttaactagactacagacgtcatttatttatttatttagagatagggtcttgctctgttgcccaggctggagtgcagtggagagatcatggctcactgcaacttcaacctcctgggctcaggagattctcccacctcagcctcctgaatagctgggactacaggtgtgtgccaccctgcccagttaatttttgtagtttttgtaaagataaggtttcaccctgttgcccaggctggtctcaaagccctgggctcaaacaatccttccgc

SEQ ID NO: 587679 - DNA, 4001 bp, Homo sapiens
tggaaaataccacttgattttccctctctccccttcaaacaggtagccagaagcaaaaaaaatgacctacagtatgcactggaggaatgacttaggtattaaaactttcactgtctctgttgtttcattgtctcaccagtgaagaatctgagatttccacgcaaatctccaatagctttggtgtgcacacctcttgctccctgaccttggccccttgtgcttttcatagagacaccctggggaaggcagtttttgatcataatggttgtcacctgagctggcattaccaaaaagctgggctccagctgcccacgcagtacaggtatgggtagtaaggatagctgttatacacggagaccagggaggcccgggagaaggcctcctctttcagggccggcaaagaggagtgcttctccaagtctcccagctccgaggagagctgctttcgcttagtcttatagcgtctgttctggaaccatatcttcacttgggtctccgtgagcttgaggttcttggccaggtgggcccgttcaggggccgacaggtacttctgatggctgaacttcctctccaactcgatcacctgagtgtgggagaaggcagctcgggagcgcttctgcggctgcttaggggtttggggaagccttggaagggcgcctgaagtgttttcagagtccaacagataagaccccaagtgcctttctggaaaggagagtggggaaggagggatgggaagacaaaagttacatgttagcagggaagagaacagaattcaatccacccttatctctttagtgagtgaacaaacagcccactgtcatcgtggatacatttcacttttttcacatgactaaggagctctccggagtgaagagtgagtaaatatgtttattacgcattcatttgctaagaatcatcaagaacccaaagttagagacgtttcgtggttgaactttctccctactgtctagtagaattatatggggattctggatctgtgtgctgaggagaggcgggagagggaggcagggaaaatgccgtggaacaagatacccgggaaggccagaccaaaagacatccggtgttaggatccaggtgggcaagagagggcttgtgccactggagacgcagaggcaggctcattctgggctttaattccctcttcgctaaacgaggcgttcggtcgcctcatcagaagtgacaggaaagaaaataagtggactctctctcctggacaccggagggaaccccgaatataccgctttactgcccacgggattgggaagcacacggaggctttgctggtcaacccctgctttgtcactgttaataagttattattagttctcataactaccggggggctggcgccgatcgcgggtggcgcggggcgggatccgctcctgggacggtggagggcggtggcgctgcagtcgcgccggcttctgagccccagggagcggagggcacggagccgggcgagtcctgcggtgtcagaatcctgcgccgccctgacgctggggctcagggttcattccgggggcgcgcgcgtggctgcggaggcgggaaggtccctctgcctgtcgccgcggagccccgcgtccctgcaccccgagctctgggggtccgccttgggctgccccccttccccggcctcgccgcttacctggctcggtctctgccagcgtctcggcctcctccggcgcggcgcggggcccggtgctcagctggtcgttctgcgccccggcgcggctgcgtcctccctctggctctggctctggctccggctccgggtcgcgctgtctctggctgctcgtgcggccgccttgccgctgcgcgccgtcccgcaggatgtcctggatgaggaaggacgtgagcggcttggacggggtcggcggcgcggccccctccgctttcgcctccccgggccgcggctccggaaccctgagcatcccggcggccccgccttggcctgaatgcacccgcccggcccgcaccgctttcactttccgcctcccggctcgcttatagcccaggggagcgggccgcgccgccctcccattggccgcgggacgggccgcgccgcggattggccgccctgagccccaggtgaccccgccgatctgcgagccctgagcactgccccgctccgctcctccctaggggattccttccccagttccctctccttccccaattccctctccttccccaatttcctctccttctccagctctcctccctccgccctgagccgttttcccaggccaggagcgcaccccaaagcggggctcctctgccccaacccacccgcaacagagagaagctcctggggatgggacgatcaagacaaacagtccagttagctcttcaggaccgtcagagccaattacaggggatgagcacgcagtcactgcagccgcgcggtaccgtgagagttctgggtgctctctctctctgggagagatggtgcaaactcagatctgcaatatctacgacctcaaagaggcatgacaagtaggtgcagccagaccccaggctgaaagaaggaaaacacctttgccaaagccttttcccgttgcagaagtggttttctttggtggttcctttatccgcaataacctgttaactttccttcctccccagacacatgacataccatccttttgaaaagtttccagacggatggaaggcgttttaggccaggacaaatgcaaaaactgcatttaaaaaagtagttcaaaagaacatcagcatactctttttgcagattaccaactgttaacatgtaacccattggctaaacaatgggttagccagattggtccaaccggtactgtgactggactggacggtaccgtgacaacagacgaaagtggaacagagatgatggaagtattttctttccttgtcttttctcttcttttttttacggacagggtctccctctgccgcccaggctggagtgcagtgatgccatcataactcactgcagcctcgatttcctggattcaagtgatcctcctgccttggcctctcaaagtgccaggactacaggcatgagtctcagtgtcaggtcgatgatggaagtattgaattaatgttaaatttactgaaattgcacattgtactgtcagtgtacaagagaatatttttaggaaataaacactgaagtaagtaggagcaaaggcacaagatttatgaaacttacatcaaatggttctgaaacaaggatgcagattgatagatcccacgccataaagccgatgggttaaatggtaacagttggtaatctggaaaaagggtaggctgatgttttttagaaccatttttttaatgcaacttttttgtctgtcctggtctaagacggcttctattcaactggcaacttttcaaaaggatggtatgtcatgtgtctctggaggaaggaaagttaataggttattgctgataaagcgaccgccaaagaaaactacctgtgcaacgggaaagactttggcaaagctggttttcttctctcatcttttcaaagtctctttatattagaacattctttaatgttttcttttgaatcattgtagattcacaggaagttgcaaaaataatacctccagtgtcctccaaagacatctatacaactgtaggacaatgtagaaaacaggaaatttacgttgggacattacagttaactagactacagacgtcatttatttatttatttagagatagggtcttgctctgttgcccaggctggagtgcagtggagagatcatggctcactgcaacttcaacctcctgggctcaggagattctcccacctcagcctcctgaatagctgggactacaggtgtgtgccaccctgcccagttaatttttgtagtttttgtaaagataaggtttcaccctgttgcccaggctggtctcaaagccctgggctcaaacaatccttccgcctccaccacccaaagtgctgagactacaggtgtgagccactgtgctgg

SEQ ID NO: 587680 - DNA, 4001 bp, Homo sapiens
gcgtccctgtcagcaccagctccagtgccaggccgcaaggcgatctgaggaaaggaagggccgtgattcccagcaggccgtggttcagccccttcctggcatcctccacccagccggaggggctgtccttctcccttcctgccttgttggaggggtgccgttctggggtctttcccagcccttcctttcctccccaggtgggatgctttttctctctgggtgggcctgtccttatatcagcaccaaatgatgcccaggtgggtggcccttgggcacaccgtccccgcctcccctctccctgcaccctccccttttccccggctgtcaggatgaggagggcacagcggtctcagaggtattgaccctgagggtaaatcggagaaaggaggccagggggatttccgcagctcaggggccgtcatcctgcagtgtcaggggcattttttctccactgggatgtcccacttcccctcctggaggcagatttcctgcagcctgggttaggtgctcagctctggcccctccagtgggacccttcctgtgcacaggtctgaggagtgcacctggccactcacctgtcttttcttctgcagccagcagctggcttggggcccaagactctggacttctgactccccagccagctgcctccctccctgggaagtcctgcccactccccccgccccaacagctggatcacagtggcatgtctgggaccccacagccagtttcttggctgcagagcctggtcattttagtcctctgtccacttgtgaatctgcagaactggcaggcgaggcccgaggaggtgcaaggggcagcggcttccaggtctcaggagtgctgtgcctccctcctggcctcctcctcccttagctaggatgcctgtcccctttccctccttttcctcctcctcccccgcctcccctcctcctcccctgcacctgctgctcctcctccacgcgcccctcatccaaagaaagactcagtccctgcgcccccaggagcgtggggaaggggaggggaaggtaggctcctcggcgtccccccgcaggctgcagccaggatcccgggcctggacggcgggcgtcagacgctgtgcgctcccaggctgagcaccgagaaggcggcgcggtgcttgcgcagcagcaggcggatcttctcgtcgtccgagtcggggtccagcggcttgttgtactcgtcgtcctcgttctccgagggtgcgcggtccccgcctgcgcctgcacccgcgccgcccggggcccggggcgtggaggacgagggctccagggcgctcttcttccgccacttggtcctgcggttctggaaccacacctgcgatgagaaagaatgtgaagggcacaggggcacagcgcgcacgggacgcgagaacagccatcctgcttttacagctaaacaaatggctcaacaacggagtgactgtcacattcacgtttctgttggggaaggacaataaaatttaaaaacgtgagcgcggcagccctcccctccgccccccgcccccaccatttgcttcctcttccaccgccgcctcctccccctctccctccccctccccctcccctccccctccccctccccctcctcctccttctcctcctcctcctcctcctccacctgggaactcggtggaagatgcggagtgcgcgggtggaaggcttagccccggtgctcattggaaggtgcttatgagcagtccctactctgggcttcatagaccctcaccctacttcataaataattgttcccctagttagttagaaaagtaacgtaggtccattgcttgggatagttgaagagggcaggaacgcaccccagaagcagaaagacatgcaggagtgtctgcttcttccccccagctctcgccccagggcagctgagcggctgatgaggagggcgcagcgggttggagctcggggaggccccagggccctgagcaaagcctagacccaggtgccagctgcccctgctgcatccttaggcccgtcgccgagtcactgagccagcatcaaagtggggaaagttgcccccagactctaaggcggtagaaaccggtttccccgggtctatttagggggcatttggggcccctgcgtgtggagtgggagagcctgggctcaccctccctagccctggcgtgggcgacaaggctccaggcccctgaagcccatctgatcctgcttagtagaaggagacgttgtcttcatcttaaggattggtaaactgaggtcagctccttttgctgactggagcatcaagcatgaatctgggccagagactgccgaccgtgcttggaatttttggccaaatacggggggagagggaaagcctcaggttggagtcccccacatctggggttgaaccccagctctgccagctctcccagctctcccagccgggagacactgatcttcatctgcgaaatgggtgatgataccgaccccccgggttgctgagaggatgaaatgaggtgccgcacataaggctctgagaatggggctcagcctttcccggctatggttaattaccacaggctccagggttaggcaggcaggcagtgcccagacaccaggacagctgccctctggggggctgcgttgtgtggccacctctctccaacgcagtggcctcctgtccggcaggctcctccctgcagggcaggtgccatctcccgcacagacttaccttgacctgcgactcggtcatgcccagtgagtatgccagccgtgccctctcggggccagccaagtacttggtctgctcaaaggttttctccagggcaaagatctggtgccccgtgaaggtgggccgggtgtgcttcttcttgtgtatgctgtcactcagggggtctggggctggcaggaggaaggaagtgtggggttagtagaataagtggggaccctgcggctaggcacgtctggcagggcaaccaccatgcctgcccctctccctcctgcagaggtttccaggacaccaagattcctttcccctgagcagcattcttgatattggggaacagtgactgtgacctctgccccgcctggatgggcagggctccgagagggcagctgccctagtgtaatgggacttaggggcagcagagcctcatgcctctctgtctaaagttctcaatactcgctgatgttgccttcccctgaggggcaacaggagttccctctctgtcccagggatgtcccttcaggtcaccctcctcctataattagggaccagggcctgtgaattccctccacccccggcttccgccaacttccttgctcttgagactcaacttcccaggtctccaggaaaccagggaggggcaaacctgacgccccaagctgccacttccccatgtcaccaggcctggaagttatgtggcttcaaccaccctggagagcctggcacagaggccagagaccctgacccccagcctggccagggcagcaggctcgggaaggagctgtgggcagtggttcccacatgtcaggcctcgttctgtgcagtctgacagctcaagttacaggtgaggaaactgaggcacagagagaggaagagccctcctgagagatcatgttcaagtctctctgcctttgccttcattagccactgactttcttggctatgtccctgtgtgtgtacctgcattcaggactgaagaggtggtgtgtgggatgtggagaggggagggggagatggagggaagagagagtcagctgaggcttaaagcacccctgaagccaagcctaaaacaggatctgagagaggaggccttcacccccaggggcacagcgatgggtggcagcccatggaggggtggctgtcaggcactgtgaccggcaaggcagagtagcaaatggggggacaggtgtgcttttggggttccctaggttggccccaagcccccattggcgtaggagagcccggagatcagacagaaatggaggcccctgcctgacgtgggcagggcttcggtggcacgg

SEQ ID NO: 587681 - DNA, 4001 bp, Homo sapiens
cacctgcaagggtaaggcctcccagtgaatcctcctcatctgggccacagatccacttttcacagcactctccaggcacctcaacttttcttggagctgggcagttaggctcaggcagtagcacatccagctgacagcggggcacacagccaatctgcccatctctgcaggtgcactggaatttgcagcttggctgaaatttctctccactgcggtagatgaccccatcgaacacacagttatctccctctaccgctagaatattggggaagcaaagtgaaaagcaaagaggaagaggaaaaacaagaacacaatacagtgaagaagctatgtaagatttggagggcatgttccaaaacccaagtccttttctagttcaggcgatctggtttctcatgtatctactgtagagtgatgtcctcatggaggcctctcagagcaagaagaaaccttcaagatcatctagtcttgccactcattttatggatgaggaaagaggtgtgcaactgtgaagtgatgtccccaaggtcccctggccatttttcccaatgttcagtcattttgcgagaacctccttagagtttcctactccagcagcttagacttaaaaagagaaaaagtgtactttatgttttccaacaggttagctgatcaaattgggaagggcattaagattccttgacactcaagcataataaaatcatcagtagcttagagaaaaaagtaaaagccctcctgtccagaaaggaagggacaatcttcaactacaatgttgtatcatgtgaaaaattgatccccgactgattacgttttagaagcctggattggctagttgcctgcattttattttacttgcagccagaaaagggttacatagttatcccaggagactagcagctgctttggttcaaatgggacaattacaggtgtgaaaacaaacctgctgggttttccccaactgcagtttgggaaactgtgagcgtgtgagtaaacccgagcttccatcagccccaagtggccccctagaagtgtccgaaggaaatgacttcactggcccttaactctgcgtggctccccctttgcttagattcttgtctaggaagccaagtgaggaatgcctttcacccccagggcaggtttcctttctggctctggcgctccccaaagccccaagtgctccccaaaccatgcctgacacacagtaagtgctctatacatgtcatttattgcattattattatttgcttatcgccctctgggaaggggaatacaaaagagaagggaggaagcagcttcacttagctgcaggagaagaggtcaaacagcagagggagcaggattacccgtgcagatgccagtctggttgctggggtccgcgctgcgatcacagtagaggccactgctctcgtcgcatggctccagatctgagcagctctcgccacgctggcgggcacacaccagacagcatgagcagccgtccagcaccgcgcgcaccccgggggcgcaggtcggcggcgtcgcagggcaccggcccgggcactggggagggcagcgctgagtcgcagcgacctgaaggcaggcgagacaaggagaaaccactcagctgggacagaagacgcagtgagcccggtgaccaaatgggggccaccaaggcgggcaaagtaacttgggggcatcttaagggtgtgccacttacctgtcccaggagatggagaagcaggaaggtcaggcaaaggcactgctttcggagacaaaagctcgtgctctgcacactctgcatgctcaggctttcccctctcgcttttaccaaacgagactttcttcgctgtagattggcactgctcgccttccccctggtccggtgcttgccgatcacgcccagcacaggttttatagcgcgctcctgggacgcgcacaagccggttggctgcagtgcagggaggaggggggagatcggctgggtggggaagtggaacgaaccccggggttgccatggcaattggctgtgggtgctgctctccttagggcgcggcgccggggcctgcgtgtgcctgtgtgtggcgactggcttttcccagagggtggggaggggctgggtggagttccgaggccaggacccagggctcgctcgagcgcgtgggaaggaaacgcccgtttcctcctggaagttgcttcgccttctcccaggacgaagacaccaccactccccaccatcctcctccaccctgaccgttccaaccagggctgcaagcgtggggtccccttacgggatgcctgcagtttggggccatctgcaggggattggcagaaggcccaggggtttagtcatgagggaagcacatgcaagtttgtcaccgtttagggcactcattgaatgtgttgagagggaggggagagaagcaagggaggaaaggagagaaagaggagaaagagaaaagtgtgtgtgtgttggggggaggggagtggcagggggaagggaatctagaaaaaaaatcgatatgtcaggaggtggggaatgctattggccaaatggcaaaattcttttgactctaatccttctagcttcactcagtcttaaaccccaaggtccacaggtttgttagaaataaaagtaaaacacacacacacacacacacacacacacacacacacacacataaagaaaacatcataaaataaaacaaagaaatcttggcagaagaaagccttgaagcacctgctgtagcagaccaaatgtgagacggcacacctgagagtccagaaacctttgacagttttctaagtgggttcagttcaaccaccatcaccaccatcaaaacctccagccagggaagaaatgaggaagaaactggcttaacttggctgacccttcagcaaatcaaatccttctctcaccgggcatccgctttcaagaaatgattgctggggcatgcttgtcatctctcatgggaaaaagggagcagttttactgctccaaaggtgacattgtttgaaggatttagaacagtttccccccacacttcaacactggtgctgcccctaggagaactatgcccagctcttttgaggatagttgctttggaaaaaaacaaaaaacactttttaaggaaaattatacaggcctgtgatgtaattctagagtttaaaaagaaacaaatggcctctacctcatctgtccccagcatgaaggaaatcaaaggcagcttgcggaaggggccaggtctgcctctgcaacacccgcagatgatgaggtcacctcaagccccttctagataattctctcggcagcctgaaaccactatgacacacttccaagcctctaatagttctgctttctttgaggtaaatgagactgagtagtactcaaacttaactagagatgaaacagttcatttgcactcttgagtaggacatttacctactcttcaaattgataggctttggagggtggagggtgggagcagggagaagatcgggaaaaataactaatgggtaccaggcttaatacctgggcgatgaaataatctgcacaacaaatgtccatgacacacatttacctgtgtaaacaaacctgcacatttacccctgaacttgaaataaaagtttaagaaaaagataaaacaaaaaacaaaaaaactgataggttttgtaagccatttggcctaatgatgcctccatctggctgcagatcgaatcaaccagcatgtattttgttaaaaatacagattcctgagccccactcttgacccactcagtaggattctctggtggtggctcttggtagacagcattttaatgtactttgaaatggagcaactagaagcactgctaatggggaggcaaagagcatcggccaagtgttccaagcatgaatagactcagatagaacaaggagaaattggcaacatggagattgggctagctcttcttggaaagagtggggtgggagtggtgacagggaaaatgtaactttaagacaaggattaacatgtcaagaagtc

SEQ ID NO: 587682 - DNA, 4001 bp, Homo sapiens
gcttggcatcctctataagcaacgatgaccagtgtgccacagcgctgtgaagcgcgctcagccggagtgctccaccacaaagccccgcgatcctccgacgctaagcactcggccgctggctcctccagggggcgccggaaccgcgcgcccgggctactccgggttccttgctccgggagtctgacattttcaggggagatcacggataggaaagggaaaaggcaaagaaaaggagtaggggcagacagaaagaaggatcactattcgtatcatattctaggcagtcactgccaagcgccagcctctttccccgcatttcatgcctccgcaaacgcgcgcacaccacacacacacacacacaggtgtatacacactccgatggggcatcccgagttgttgtgttttccccagttgaagaggcgctggcggcctcggcagcggtccccgcccgcggcgccaggccaagcgggtctcacaggggtgggcgccaaacgcgcgcgcctgaccgtcttcccagagcgcgcggaggacaaggggacccgccggggctgtgcgccagctacagcaggggccgcgcggagccgacgcctgggggcgccggcagcgtcctcgggcctcccttcgaaggcgcggagagttccgactccagccaggttccagactgccagggctcgggtggggcagcagggagcagggcagggagggggcggttcccagcaataccgccctcctcctctaccctcctcttcctccacctcggctttagggagccctcagtgtggcgatctcagcctcagttctcctcacccggcatggccgcgcatcacctggagggcttggcaaggtcaacctgcgggcacagtcgcagcgcttccgatctgctaggtcgggtatggggcgcgagtcggtttccccaggaggcctaggcggcctgtctggtcccgcactctggcgccggctcctccctcgctggccaggagtggcgggcagttgcggagccggacgctgggggagtcaggctgccgcgcggcaagttatcagctggcggaggttcctgcggaagctggcgtccaggaaggcgtagaggaaggggttgaggcagctgttggcgtagctcaggctggtgatgaagtaggagatagcgatgaccagcggcgtctgcgggaggtcggtggtgagcgccaccacggtgctcaggtggtagggcgtccagcagaggaggcacaccgccaggattgccaccaccaggaaggtcacccgcttcttggcgcgctccagggccttggcgtggctgtccagccgcatggcatgcagccggcacagcagggtggtatagaggacacagatggtggacacggggatggcgaagcccagcacgagcgtgtagaggcggctcgcgcgccaccagaaggcctcgggctgcggaaagactagcacgcactggcgccggccctgctcgtcgtctagccgggcgaagactgcgaagggcagcacgacgagtgtgacgatcccccacacggccaggctcaccgcgcgcgcggcgctgtaggtgcggccggccacccggcgcgactccgcagtggccaacaccaccaggtagcggtcggcgctcatgacggtgaggaagtagaggctggagaaggtgttgtactggtcgatagccacgatgagcttgcacatgagctccccgaagggccactgccgcagcaggaagtcggcgatgttgatgggcagcaccagcgtgaagagctcgtcggcgatggccaggttgaggatgaacaggttggtgacggtcttcatgcggggcgcccgcagcaacacgtacagcacggcggagttgcccgccagacccacggcgcagatcaccgcgtagacaactggtacagccaccgccagcggcgccggcagcggcgccagagtcgacgcgttggagcagctcagcgccgggtccgggcccgatgcgttggcgggccagggctccgagaacgaggcgttgtccatctcaacgagggcagaggagccggcgacctggcgtcccccaaggacgccctacggagctcagcggtcctgaagcccggttctgcacggacctgctcgcggacgctcgtttcagctctccaagccgttctctggtttttccggaggaggggaccgttcccagccaccccacggcccaatgtcgccgcggactcacggggctggaaagaggaatttaaagcataggttagttcgtcgacgtgtaactttagaaataggcgcggtcccgaggaggggtgggggtggcgccgcggcgccccaaacctcctccacgtgagcgctctctgctacctgttgaaatctcacttctaccagttgaatacatcaaacgaaatgctagagagagaagaatcctccataggaaaaatgcaaacccttctcccctctttcaggaaacttccgtagacccaggttaccccacagaatcccgcagtggcaagcttcggtctccccagggtctgtgcgccctcagtaacagcaagctcaacagcagtctttaccttacctggctggctggggaaggggtctgcctttcctggagctgtcaggagaaaagcccgccggctgcggggaggctgagacgcctgccggctgggtgtccgcctccccctgtctgcctcccccgagttcgccagagtccgcagctcgcgtccccgccggtccctcccgcgcgcctggaagtgcagggatggcgcagccgcgactgcgttccactgccctgaccgccgcgcccacccccacaccccaagtaaaatggtcttagaacagagaacagaaattcccccaaatttaagggattcctttcttccatcccagtcgtgcaacctcactccatctgaaataatagaaagctctcctgttaagaatcgaatttaaggaaaacaaagttagggtgtaagtgatctatttttaaaggagaacaatgtagtggaggcgcctgttccattttttatacaccgtaacacaaataggctaatgtaatgtgaaatctgaaaggaggaaaaagtgagtgcaattttataatgcaaatcacctgttttctgctactctggtcttcaaggggatagaagattgttagtatgttttctaaaactacttctacttctacttttgtgtaagtaaagacttgattagtaaagacaaacggcttccgcaaagccttttagggaaccatgacaatgcgtatttcataaaacgttacaagttgttcaacacactctctacttatccacacacttgcccgattctcctgctaatgagagctatcctgcgatcgcagcggagagtagccaaggaaggactagcaggggcagtcttgaactcccctgtcgctatttccctggactttggattctttctctaggaagggaaaatcatcttaggctcctcaccagttcccctaagaatcgaatgaaataaactaaatattggttatttccaatttctgctttttttttttctccacatttcctttaggagagagagcaaattaaaacacgagattatatcctctagtaaactacccttccacaaaagcaggcgaagcccaaataaagtgtatttttggtcctctaggatgcatcttagagaagggggcctgagatccagagagacctaaagtcggcagtagaagactgtggggccagaaatacagtagcccccccatacctatgggggataggttccaagagccccagtggatgcctgaaaccatggatagtacccattgcggtcaatgggaacatgtttctgttcttccatccaaaaatgatgcaacagcaaaactagcatgcatttcttttttcttcttcacattttcgtggatagatttgtttttagtagatcttggcaacctctgcatatgattttttttctttccttattaagtccagaatttttaccttttaacttaaaggaggcatttgcagcttctctttggcatatctgaattgccagcatcactt

SEQ ID NO: 587683 - DNA, 4001 bp, Homo sapiens
tctgacgggaggcagggctcaggggtaatgctggctagctggctgctcacctcctgctgtgctgcctggttcctaacaggacgagttctggtccttgacccggcagttggggacccctggtttaaagtgtaatttttgcagacagcttaactggcccaaggtcacacagctctaggaaggggtgagctgggctggaccccggctttctgcatgggctgtgctacctccctagcatggctcatttctgtagggtgaatgcaccctcgtgtgtgtccatccccacccaagggtgagggtgaggctgacagcagtcttccagccagcagggaaatgcgcaccatggggaggactgaggcctggagtgaggcaatggtgaccggctgcatcttcttgtcctcctggtttgctgggggcaggatctccacgcgatgcatctcctctttggctttctcccccaagcaaatctgagcggggttgaaaatagaggcccctcatcaccctgagggccgacgggagaaatccatagccctccgttgggaccagaaagttcccggacaccatcttcctcccctcttttgggaacacctaccgtatgaagcaacagcctgcagctctgcttcccctccagctggggtctgaaggtccaagtccgcctctcctgactgagctcgcagcctgcggaggagaaagggagggaagtggggccctccattcgttcccaaaggaggggctcacctgcgccccaagctgccgcgcaccggaggtggggcgtgtctctgggaaggagcctgagtccccactcaccccagagcacggtcgtcactgccttttcctccgtgctactggcgctactgagattcatggctccgggcagagaagcgggctggccgggcagctgcaaggagggcgcccgcgtgaggccttgctccctgaccctgaccctcgactggaggatgccagagaccagcaggcatcggcaggtactgaggggtcgctcgcggctggaggggacctgccacggtcaagggctcaccggcaactcctggaggacgagtacccacctcctagcggggtgcgcagcccggggctcgaccgggcgcgtacaggacagcgggactcacgggagagggagctgtccaccgagctcaggcttgaaaggccgcggggaggtcacctggctgcgcttgggcctgactcaaaagcctctgtgcacctccaccagacgcagagaaaggggtgtgcgcgcggcttaggtcccagctccccccacacagccttactgtcgctgctccgcgcggggccagtcacgccatcggcgctcccggagcgcagcgcaacctcatcccctctggccggaaggcggctgtccaagcccgggctaagaagcctgggaaggggaagggcaggtgtccaattagtcgcaaagaagccgcctccctctccccttcccttctcccattctttcctcctctgcgcggcagaatcacctggagggctgttaaggggcgcattgccgcgccccactccacagctgcccttggcgtcggtctgggtggggccgagggaatttgtagttctaaccagttcccaggtgaggctgatgatgccggcccaggacctttcgtgagaagctgtcccggccaattgcggacccgccgaggcctcctggcgccccctccccagcccatggagaggaagcctcagctcagcttaggaagggaggcctgcagccggcaggaagctgcagttggaagccctccttcttgttcgttgcctttcttcctttcctttccccatgccttatacagcatgggcctttcctaaggcccagacagcccgttcttccagcctaccgtgagagcgagcgagccctgtctccagaacggtgagatctcccgcggagagccgcagcgggcaggtggggtggggaggtgagccgggaggcgaggcgccgcggcagggggcggggagcacactgaggagcacggctagcgacgctacagggccaagcacgtgaccagcagctggtcccaggctcagtgggcagtgaagaggaagtggggtttcagcggatataccctggagacacctcagataaccagggatctcccgcacacccctgggacaggggctcattgccacggagaggtcagaatcttttattcctggaagctggggtcagcctccctgtgaattggccaggacaacccaggagaggcttgggggcctgccagggccccctaggctccctatccccagctgagcagttccagtctccttggctgtccctgagctctctgtccctggcaaggcgcctattgaaggtgacagccattgcagccaagtgtgtggtaaagatgagcaaatggcaggcacatgcatgccatgcacagacgttcaagaattcactcaacaaacggtgattccgccaattgggcgggacctgggcatcccgcggtgaatacgacagcccctcaaagggcttccagcctcattggagagcagtgctcaaagcaaaccggccttcagtggccccaggctacccaccccgtgaataatcacactgatgtcaggctgcagctgggggtcacagtgaaggctaaatggaggcaggggagggggatgaccctgaggtcatgacctagagctgggacactggaactggacagtctgggttcaagtctggactgtgctctgtgatttcaggtgtgttaattcatagctcagtgcctcagtttcctcatctgctaaatgaggctataatattggtaccatcgtcattaactttttaaactgatacatattaattgtacatatttatggggtacatatgatatttttatacttgcacacaatgtgtaatgagcaaatcagggtaactggggtaccttcaacattatttcttttcttttttttttttttttggagatggcgtttcactctcatcacccaggctggagtgcggtggtgccatctcagctcactataacctctgcctcccatgttcaagcgattctcctgcctcagcctcccaagtagctgggtttataggtgcttaccaccatgcccagctaattttcatatttttactagagatggggtttcaccatgttggccaggttggtctcgaactcctgacctcagtgatcctcctgcctaggcctcccaaagtgctgggattacaggcatgagccactgggcccggctaaacatttatcatttctttgtgttggaaacatttcaaatcttctcttctagctattttgaaatatacaataaattattgttaactatagtcaccctactgtactatcaacttatttcttatttcaacttatcttatttccatcaaacagtatgtttgtacccattaatcaacctctgttcatcctccccccacccccacttcccagcctctagtaaccatcattctactctctactcccattaattctactttttttttttttttttttttttttttttttttttttttagctctcacatgagtgagaacatgtgaaatttgtctttttgtgtctggcttgtttcacataacataatgacctccagttccacccatattgctgcaaatgacagggcttccatattttttttatggctggatatattccattgtgtataggtaccacattttctttttccattcacctgttgatggacacttaggttgattccatatcttggctcttggaatagtgctgcagtaaacaagggcgtgcagatatccctcctttcatttggatactgatttccattacggagagaagtaaggagatttctcaaaaaactaaaaataggactaccatatgatccagcaatcccactcctggattatttatccaaaggaaaggaaatcaggtaccgattccctaggaatcaggatttctagggttatttatcccagtagtggaactgtttgaatcatgtgatagttcaatttttagttttttgagaaacctccatactactttccataa

SEQ ID NO: 587684 - DNA, 4001 bp, Homo sapiens
gatgtcagacctgatctcatgttcacccaatattccactgcagggcctagccagtgcagtaggattaaaagaaagaaagaaagaaaaaagacctggcgtggtgactcacgcctgtaatcccagcacttcgggaggccaaggcgggcgaatcacctgaggtcaggagttcgagactagcctgggcaacattgtgaaaccctgtctctactaaaaatacaaaaattagccaggcatggtggtgcacacctgtaatcccagctactccgaaggctgaggcactagaattgcttgaacctgggaggcagaaattgcagtgagctgagattgcaccactgcactccagcctgggtgacagagtgaaactccatctcaaaaaaaaaaaaaaaaaaggcaagaactgccattattcacaattattatatgcatagaaaacttaagttattagaaactagagaatttctggatgcacaaccaatatgtagatcgaccatgttcctgtcactagcagtgaatggtttaaagcagcagtctccaatcattgtggaaccagggaatggtttcctggaagacaatttttgcatggatggggtgggagtggggggtggttttgggatgaaactgctccacctcagatcaggcattcgattctcataagaagcatgcaacctagacccctcgcacgcacagcttaccatagggttcatgctcctctgagaatctaatgccgctctgatctgacgggaggcagggctcaggggtaatgctggctagctggctgctcacctcctgctgtgctgcctggttcctaacaggacgagttctggtccttgacccggcagttggggacccctggtttaaagtgtaatttttgcagacagcttaactggcccaaggtcacacagctctaggaaggggtgagctgggctggaccccggctttctgcatgggctgtgctacctccctagcatggctcatttctgtagggtgaatgcaccctcgtgtgtgtccatccccacccaagggtgagggtgaggctgacagcagtcttccagccagcagggaaatgcgcaccatggggaggactgaggcctggagtgaggcaatggtgaccggctgcatcttcttgtcctcctggtttgctgggggcaggatctccacgcgatgcatctcctctttggctttctcccccaagcaaatctgagcggggttgaaaatagaggcccctcatcaccctgagggccgacgggagaaatccatagccctccgttgggaccagaaagttcccggacaccatcttcctcccctcttttgggaacacctaccgtatgaagcaacagcctgcagctctgcttcccctccagctggggtctgaaggtccaagtccgcctctcctgactgagctcgcagcctgcggaggagaaagggagggaagtggggccctccattcgttcccaaaggaggggctcacctgcgccccaagctgccgcgcaccggaggtggggcgtgtctctgggaaggagcctgagtccccactcaccccagagcacggtcgtcactgccttttcctccgtgctactggcgctactgagattcatggctccgggcagagaagcgggctggccgggcagctgcaaggagggcgcccgcgtgaggccttgctccctgaccctgaccctcgactggaggatgccagagaccagcaggcatcggcaggtactgaggggtcgctcgcggctggaggggacctgccacggtcaagggctcaccggcaactcctggaggacgagtacccacctcctagcggggtgcgcagcccggggctcgaccgggcgcgtacaggacagcgggactcacgggagagggagctgtccaccgagctcaggcttgaaaggccgcggggaggtcacctggctgcgcttgggcctgactcaaaagcctctgtgcacctccaccagacgcagagaaaggggtgtgcgcgcggcttaggtcccagctccccccacacagccttactgtcgctgctccgcgcggggccagtcacgccatcggcgctcccggagcgcagcgcaacctcatcccctctggccggaaggcggctgtccaagcccgggctaagaagcctgggaaggggaagggcaggtgtccaattagtcgcaaagaagccgcctccctctccccttcccttctcccattctttcctcctctgcgcggcagaatcacctggagggctgttaaggggcgcattgccgcgccccactccacagctgcccttggcgtcggtctgggtggggccgagggaatttgtagttctaaccagttcccaggtgaggctgatgatgccggcccaggacctttcgtgagaagctgtcccggccaattgcggacccgccgaggcctcctggcgccccctccccagcccatggagaggaagcctcagctcagcttaggaagggaggcctgcagccggcaggaagctgcagttggaagccctccttcttgttcgttgcctttcttcctttcctttccccatgccttatacagcatgggcctttcctaaggcccagacagcccgttcttccagcctaccgtgagagcgagcgagccctgtctccagaacggtgagatctcccgcggagagccgcagcgggcaggtggggtggggaggtgagccgggaggcgaggcgccgcggcagggggcggggagcacactgaggagcacggctagcgacgctacagggccaagcacgtgaccagcagctggtcccaggctcagtgggcagtgaagaggaagtggggtttcagcggatataccctggagacacctcagataaccagggatctcccgcacacccctgggacaggggctcattgccacggagaggtcagaatcttttattcctggaagctggggtcagcctccctgtgaattggccaggacaacccaggagaggcttgggggcctgccagggccccctaggctccctatccccagctgagcagttccagtctccttggctgtccctgagctctctgtccctggcaaggcgcctattgaaggtgacagccattgcagccaagtgtgtggtaaagatgagcaaatggcaggcacatgcatgccatgcacagacgttcaagaattcactcaacaaacggtgattccgccaattgggcgggacctgggcatcccgcggtgaatacgacagcccctcaaagggcttccagcctcattggagagcagtgctcaaagcaaaccggccttcagtggccccaggctacccaccccgtgaataatcacactgatgtcaggctgcagctgggggtcacagtgaaggctaaatggaggcaggggagggggatgaccctgaggtcatgacctagagctgggacactggaactggacagtctgggttcaagtctggactgtgctctgtgatttcaggtgtgttaattcatagctcagtgcctcagtttcctcatctgctaaatgaggctataatattggtaccatcgtcattaactttttaaactgatacatattaattgtacatatttatggggtacatatgatatttttatacttgcacacaatgtgtaatgagcaaatcagggtaactggggtaccttcaacattatttcttttcttttttttttttttttggagatggcgtttcactctcatcacccaggctggagtgcggtggtgccatctcagctcactataacctctgcctcccatgttcaagcgattctcctgcctcagcctcccaagtagctgggtttataggtgcttaccaccatgcccagctaattttcatatttttactagagatggggtttcaccatgttggccaggttggtctcgaactcctgacctcagtgatcctcctgcctaggcctcccaaagtgctgggattacaggcatgagccactgggcccggctaaacatttatcatttctttgtgttggaaacatttcaaatcttctcttctagctattttgaa

SEQ ID NO: 587685 - DNA, 4001 bp, Homo sapiens
gcgcagggtaggcacggggcacccggacccagcaccactcacctccatactctggggggaagaagtgcaggttccgaagttcctctcgctcagcgcggatggggcttcggagatcatctggaagtgctgtgggagggcgcagagctgagcgggcggggacctctccaggaccccgtccccccaaagtccgcacttaccattggagaagattcggtgccacactgccaaggggcgggagaaagagtggagttagctgctggggcatcagaactcctctgcccttggctccaggcaccttcccctgccccgttcccccacccagccctgccccgccagcaccggagccgatcttgatgaggccgttgtgctgaatgaagatggtgtcgctggtcaggttcccgtggatgattggggggctgcaggcgtgcaggaagctgcagacgttggggaggggagagtaggaggagccggtcaggaggctctggagagatgggggctcggtggcgccgcgcccaggccagcccaggccctcacctgagcgcagacaggatctgcgtgcaccagcgcttccaggcctggcggcggacgcacgactccgtcggtcgggtgggcgcaggagaggcggctgggcctgcggagcccgccccgcatcctcgcccagcccctgtccgaggccgccgggcaccccctcaccatcccagtccccgaggctgccccaaccccgtcctgtccccgtggctgccccagcccgctccccatacccgggcgttcatggccttgtggttcttcttggtctttttgaggaattgcttgaggctgcctgatgacacgtactctgtgatgaagatgacctgcacggtgcgagctcaggatttccaccagctgcgggttcgtccccatgcccgccccacctagctgtggtctctgcctgcccggggccttgcccgtgctcaccctcgcgcaggcctcagaggtatccagccagtacttgtgcaacttcacgatgttcgggtggtccaccagcaccagctgctcgaacacggtctggatcttctcctggggagggagggtggtcgctgggtggtcagcaggtggtcacccaagcaggatgaggagggggcagcggtctcacctcgtgcgccgcgaaggccttcctgtctccgaagtggagctcgttccacaccacctctaccccctcctccgtgtccatggctaggaaggtgctctgaagccctggcatgttcccttggtttacctgggggtgaataaagggttatgtgtgccctggtgtgtgtcagggttgtgggtgaggatttggtccctgtccacacctttccagtgggcccaagcgtgggctgcaggccctgagccactctgcgggaaggtggggcttggagggtagctgcccccaggagccaagggctcctatccaagggctgggctaaggggatttggagcaggtttcagggggtcgagggggatccccaggaagctagcggctgagtccagaggcatggggaggtggtcctgggaggagactggccctcagggagtcccagggcgagcgccaggccaaaggggtccaggggtggctgattcgcgggccgcgaggggccgcggagaggtttccagccgccgcgctctcccagcgcccccacgccccgcgcagcctccaggcccctcccgctctgggagggcggtgtcaccccgtgccccaacccccgcgcccacctgctcccgtcgcttttgccagcgaccacacgggctttcctccaggatgtcgctctcgtcctcgctctcgtcctcccgctcccgctcccgttcccgggcccgcctcggcgccggctccggggccgccatggttcggccagcccaggccaccgccctctgcgcgatccgccgccggcgcagcctctcccggcccgccctggcctcgcgcccagcagcccagcctagagccgccgcggcagcctagagccccagccccggctctgggaattgggaggcgcgggcgcgcggcggacgggcggggcccgggggcggagccggcgcgcacctcccgagccgcctgtgcctgccggagccagagcagagcttccccgagagctgccgagcccgggccgcgcccaggccccgcccccccggaggccccgccccgcgaagccccgccccagtccctgtttcctcctcgtctcccaggcctgctccgcgaagcccctccccaggccctgtcccctcctcgtcctccaagcctccttcgcgaagccccgccccaggacccgccccacccccgcgaatccccgccccgttttagtccccgcccccgcccgttcccagggtcctccgcgaagccccaccccaggccccgcctcacctcctcgaagccccgcccctatgaggccccgccccgcgcagaggaaccgcccccaaatccccgccccctcggaggccccgccctgcggacacctggagcccggagcgcccacttctctcgcggttgctcccctaggatctgggggaagacccggggcatctgggggcccccaagcccacggcaccctccagctgcagaagaccccgcgggctcgaaagcgggacccgctctcctggccacgcactcattccccggccgacccccaagggacaggtcgaaggggcaccgagggcgggggaaaggcccaccagcaggctgacccaggctgactttgatcggtgaccacgaatctctccctggcccgcccaccagtgcctcctcccgcccacaagcccatcttctcactttccaggatggcgattttctcttttctcctcaaacgcgcatttcctttccgcggctggctcccatgggacagtggaaccatgaggggggagcccacccggctcacacgacctctccctccggaggccgctctaagcacaccctccagccacgccgaccaccggggctgtccccgattctcacctaaaacccccttcagcccacagcccccacggccttcctgtggtctcctccctccttcacggcgggtcctcatcctttaccttctctctctggagcccaaattggaactccgctcctcccctccgcgcagctccatgcactggccctttgggacgcctctttctttctttggcagaggtgcatctggccctgctgcgtcccctgtggtctctcttttctgaccagccttggtcaccaggcaccttgtgtgtggtttccaccaatgccaggtgatcctgctgaggccctctgcagtaaaggtttggggtgttcaaatcctccaccctgaaactggccctgaccagctcctgggagacaccctctaagcccttggaatgttctgcctgatttgaatgtctgtgtttacctcggccacaccagattctatgctaagcttgtccaacccgcagcccagagggtgcattcggccaaggacagctttgaatatggcccaacacaaattcataaactttcttattgagattttttttaaagctcatcagctgttgttagtgttaagtgtattttatttaagggtattgcccaggacaattcttccaatgtgtgccaggaaagcccacagattggacacccctggtctgtgctaacaatatggtctacggggggaccttgggccatgtggcatcagcctgacctctgcaggggctggaggccaaagtcagccacctgggaggtcagccatgcctgtgtgaccaacccaataaaaaccctggacactgaggtacggagggcttccctggctgctgacatgctgtgctcattgtcacacctcagtgctgggaggttgagcactgtccccatgcctgcagtgggtggggacacctgcagacccgtgctggtctgtcctgggttctgttctgtgagtccttgccactgctgattttaacgcatccattgctgtaataaatagtaccctttccgagttctgtgagtccttctagtgaaccattgaacttgagggtggttttggggagccccc

SEQ ID NO: 587686 - DNA, 4001 bp, Homo sapiens
cttagagtcagacctatttcaaatctaacttgaaccattaattaccactatgatctacaggaagaaacttaatttcattctcagtatattacatttttaatgggtataacaatgataaactcagctctcactgagtctcttactagttatatgacttgaggcaaagcagaacacttttttgaccctcaatttcctaatctgcaaaataagatagttgccatgtgctgctgaactgctacatattggaataatgtaaaaaaaattagtaatattaggtataaaaatgccatgtctctttacagtattatattttgtatctttgaagtaccacctgctgcagaaagtgatacaaccctttcttttacactttattatacttccaaagctatagatctatctgacatgatcaataactagagtcaacgtgtagttaataaagtatgtagctaataaaaccacagaaactagaaaagaaaatacagtcatcagagcaaaatctttgataagattaaatttaattctcattgtaatcactttgctcatgaatgtgtaacaactttctggttaatgtcctataaaatcaaagtataggagattgttctgttgcttctgttaccatacttgggggttcactggaaccctgtgagatgtgagtgcagaaaatatcatctttgagtttggaaccactattatacatgtcacgttgattaaaggactctttagaagcaaaaatctaatccacttatctcttctctgatttcaaaatgtagtttgatattagaagaaatgattcttaagtaaggaagtaaataagaatgaagagtgtagggatgataacagagtatcattttagagtagatacagaatgcatccaccaagatgttacaggaatcacatgaagccctgtcaaatatggacctcctcggggagggtaggaacatgtaaaattcttgctacctaagattacctaattttaaaatctgctagaatgatgatgtgctttatcagcagtgtcagttaaaaattcttattagataaaattatatcattaaccccttgttaaaaaatagtctgaattcaactggttacattccaattctttccataaatctaagtattcactgagctttacaatgaagttgtgattttaactgtgtaaggcactggtactctaaattatcatatgcatttgtcttattttaaagaaattgcattttttttttttttgagatggagtctcgctctgttgcccaggctggagtgcggtggcgtgctcttggcttactgcaacctccacctcccgggttcaagtgattctcctgactcagcctccaagtagctgggattacaggcgcccaccactcccagctactttttgtgtttttagtagagacagggtttcaccatgttggccaggctggtctcgaactcctgacttcaggtgatctgccctcctcggcctcccaaagagctgggattacagttgtgagccaccatcccggccaagaaattgaattttaggatctattactatgacagcatctaccactaatgctctcttccttcttcccttccatctcttcttacttcctacagttctttctccagccatcctttatttccttcatcaataagatgtaagaaccacaagaattcttgcctatgtgataacatgattttttgtcattatataatgaaacagcttttcacttattatctattatgtttctgatagtaaattcacttattagggtctaaataacatttatatgttatcttattgctgggggcagtctctactattttatgcattatacttaccctggctttttttgtatcttgatattttgtggtttgttttttcgattcaattcattcccattcttgaaccacttgaatctgagagaggagtattcagaactggtttcacaccgaaggactagtttggaacctgcagccgattcctggcttttcatctctttcaatcggggaggcaaggctaaaagaagaaaagagaatgaaaaacaactctgatcaccaggcaatctttcaaagagaaacatttaatctggagttagcctgatcaaggcaccattccaaaggttttattaacagagagaaaaacaatttcaaaatggatgagcgaaaatggatctcatcttggagaaaaataaaatgcccaaataaaatatactcagaagcagagaaccaagattagaaaattattccttaaaaaaattctagatagtttcaagctttatattctctgatgccattaagaatcctgaatgttggtaatttcaaagaaccaaaagcctgtgttaaaggagcgtatgtaggctgggcacggtggttcacgcctgtaatcccccaacttacggaggctgaggcaggaggatcacttgacctcagaagttggagtccagtttgggcaacatggtgaaactccatctctatgaaaatacaaaaattagctcggcatggtggcatgtgcctgtagtcccggctacctgggaggctgagggggaaggaccacctgagcccaggaggtcaatgctgcagtgagccatgatcccaccactgcacttcagcctgggtgacagagtgagattctgtttcaaaaagaaattaaaaaaaaataaaaaataaaaaggagaatatgtaaccgggccattatttttaaagcgtgttcacatcccaaatcacagtgtatcacagtactgtgaataggcgcaggaagcatcacatccatttttaaaatcgggaagtttaatttcagagataagtaagtggctgactttatccatggttacaaagtttgtgggtactcggagctagggctcatttcactatcctgtcatcagaggggaccaaagaacacagaaaacccatcaatcttaacaatggctcctttcttcaagacagaaattctctgatgctatcactctttgactggacctacagagtttctatcccatacacaatgaatggaccattccagatgaccactactcacaacaaattctctctttgattggatttagtgcatctaaatagtctcaacagagactgtgagtacttaaattatgcattagcttggagaatacattaaacacctacataccattcttattttaagcaagactgcttaaaaatatgtaccgaaatacttgcagataaaatgttacaatatccgagatttgcttcaaaataatatggtggtgggaaatggataggcataaaggtgaaaaacaattaccaagaagctgataactgtggaaactgggtaatacggacatgtggtggtgtgttatgcaattctatatagtatgtctaattctgtttatcatagacatttcttaaaagcatagatgaataaattttcctctcacacataatttcactttaataatcaacaaatgtcacagaacctgagaattccacaattctgtttcctgagtctcagaaaagccagctacaaaatctacttctgctccagttcaggaatgttaaacagaaactcccagaaaacaaacccaggcaaatgagtctatacctccctgattccgtacctaattattcaccgggtaaggggctcaagactccaaggacagtaatcaggatcacctaaccatgaacaggaaatggagacctttcctactcagggaactctatttgtttttctacgattctgcccttgccaagtaaatcctaaaaatgtcaagaatgaacatacgaagtttccaataaatttcagaaaaaaatcatttgaatgctgtgatttcttagcagtacccctacagctacatattccccttattatttatttggtggctgggagatgaggtggagaagcagccatttaatgtagttgacacactggccactggcaaattagaaaacatgttttagctgttcttagcccttgatacctgaatattttgtctggttcttttttttttttttttttttgacaccttgaaaatatttttttctgaaga

SEQ ID NO: 587687 - DNA, 4001 bp, Homo sapiens
gcccttcttctttcttcctttcagcctgcccctccctcccttctttctttccttccttccttctttccctccttccttatttccgtccttccttcctcacctccttccacaattgttttttttttttttttttttttttttttttgagatggagtctagctctgttgccaggctggagtgcagtggcacaaacttggctcactgcaacctctgcctcccaggttcaagcaattctcctgcctcagcctcctgagtagctagctggtactacagccatgcgccaccacacccggctaatttttttttttggcattttagtagagagggggtttcaccatgttggccaggatggtttccatctcttggcctcgtgatccacccacctcagcctcccaaattgctgggattacaggcgtgagccaccacgcctgacccacaattctttagtgactgtttattatgtgcaagacataatgataacaaccaaaatcactggggttaaaaattgtaagaccatgaccaactctccctagaagaaacccttcatagataaaatgtactgaaatgaacactgaagttggctgggaagaatcaggtccaaggcacaattttccaattattagctgtgggacttctctctatctacctgtcttagaaaattcagctgcaaaaatggataccaaagggttgttgccaagtttattaaaacactttgtcagttgcaacactgcacacaaatatatgatactgttactattactaatgacataaatattgagcaaacaaaagtaaaaaaagaaattctgcccagactgaaatgttacatatataaccaagcctcaatagttgtttcttaggaaattattcttctgcaaaatgtgaaaaaagatggcctaatttggagtgacaatcattgagtgattataaagcattaagtaaatatcaataatctgtgtttaactttatcaaaactacttgtcaaaaatgtataaccacttaatttccttataaaataaaattgaacaatttaagagaaattaatatcataaatgcaggattattttaccctttcaagatctacataattctttaatatttctgactgaatttccaaattacaagaattaaacttacttacaatattatgtattatgtgttataacaattttttaaagtataaaatattttaaaatagtgtcatatccatagcatgtagactgtaatataaacttcgtttacaacttaagattttggaaataatactattgcccattttgtaaatactcagaataaatagctgagaaataatcaagtgttctctgcttgttactaaatattttcccatggaatcaaacagtatttcctgtagaaggctaggtttttttcttctcaagacaggctaaaaagaaaataatactgtaaaggatggcttgcttttcttgcttgttttaagtggtgttttccttatcagtgaagtagacaaaaccagtagaccaggaccattacacaaatgcaaactgctgataaaaagccactattcttctttgacaattagcaggaattagcatgagtatacagtgtatatatacctcacaaagcaatcattagatcctgtttcccttgaatgaattagtcctcacccacagcttttaggacaattctttacgagttacttacagaaaattaaaccaaataactctacgccatttgcttaataaaatatgcacattttaaatgtttgaatattaaactgctagtcactacaaaattacagattttttttaaccttacctgtaatatcttcaatgcttatgtgtttaggaatctgcatactttcctgctctttgaagtccagttaaaaaatctgaaattattattcttgctctgaatatagctcctttgcaattaggtataatgagcagactgaactcctactggggaaaaaaatgcttaggtggttcctgaagatgaagctctggagcagaagctgagcagaaagagctgtgccacctaatgtagcttctctagatgccaagggaatgataggtggagtcattagttttccaaaggaaaggttcagagccaggctcagaaccacggaagccttgtcattctgggttggcattttttcctgagaagtcattcaatcctttgctgaatagcaaatatgtacttgaaaaagaaagaaagtggccagaggagatcaaagaacctgcatagagttggaggttcccagagccaatacagtgactggaagtaatgtatcatctctcttgacctctccttgactgaactctgctcaagaaacaaaaagggaagccaggagaattctcaggagacggttaatggaactaggactttctaaagcagaattagggcatccaactccatggagctcaggacttagctaatacgctgggagcacttagaggtttgtagacttcctacaaggtgacactttgtccaaagaacaagttgacaccaagggccaatggagattaactggtttaactgatgaacttgggctttggcattgttcaaacatatatagaatgataggactatcaaggatcttagcacattttatagtttatcctatattttaaaggaggatacagatcatctcaaaagaatagttctgcagtctttagtaaaatacctctagctaagaattcacaaaagtgcacaggggaaggctgcccaaggtcacataagtgaattagaaaatgcttcctaagtgggtaagattcctttctcccttacaagctttctgggcagaccctgatatcatttcttcctattcagcagaatgaaaagtgacctttgggtgtttctcctgataaaacaaaattataatttttgttgtaacactgatctcatttgtagctaaacagaaagcagattctaagttcccagcagtggctgagcaaatgatttggtgtcattagacagtgttatccttagaataataagattgccaggaaaggttatttttcaaacctacaagttgctgttttttttctgtttttttcagacagtgcattttactcatggcacagtctaatcatcctaagtctactatttctcaggagaaacatctcaatgatacgaataccatggaggatgtcatagcttttccaaagaagaagaaaagtatcttcccatagtggataattgactaaatggagttacaagaaagctacattttcttcttcacaaagccaataatcttttcttagctgagaagccaattccagaaacacagttctgctacatattttctactaatcactgacagttttatatgagtataaaatttccatagccggagtccacaaactttcaagctgtcccttgaatctttttccatcaatacttagattctaaaggagtacaatccgtctagcctgcaaagcaaatatcagcaggccatctgactggcttaatttgatatatttatagacctcaccaggctaaatgtggaaggcacacattctttactatactctgcattttctaccaggatcattttgggtggaagaaggtcaagtcaatgtagaaaatgttaacctgtcactttccaaactagtcaaatctttcgtaccaagcaaaacaaatcaaaacaaagaggactgaacatccaacaagaatcaaggattcagttattcaacaagctactgaaattaccatgtgacatttaatgacatgttaatttattcaccaactaaagcccacttagaaatgaaagtagctgaaaggtcaaaagagagaaatcataaggtaaattcattatcttattcaacaaatttaaaaaaaaacatcatggcacatcaacaaataaaagtcatatggtcatttcaatggataccgaatcaacctttgatgaaattagaaagtcaatttttgtaaaactattcagtattatctttaaaaatcaaacctgaatttaatcaaacatccacatacatgtaaccaacagggactaaattaagtggcatcaa

SEQ ID NO: 587688 - DNA, 4001 bp, Homo sapiens
tgaagtgaatatgatcagcaggatcttattaaagaagcaagcacaagaatggccagtggtgaaacaattactctctgttcaatttctgttttgctcaaaactctgctgaaggtctctgccaataacccaggttctgaaatgctatcagtgataccagtaagaagaccaagcaaatgtggtttgttttcttccagcaagggacaaatacttctacagtattactgtagccacagtattatcaagtactagtgaattaattctgcagaagtgcttcatgaaatgtgtgttgggggtacgctcgaagcgacttaaggcatctggatcaattaataattgggaattgcagaggcaaaaaataaattctcccccatctccttcctcccctcttttatcagctacctaccaatcactcataaacaagtatttattcgacatgcctcttttgtccaaggtaatgtccaaagcatcagcgcttcctagggacatctaaggtaaagcttttgttcatgctcgtgttctgatgatgaaatacaagatttgtttctagaaagcttcaattgccattttattatatagataaccagcaaacaattgggttcaaaaattcagataaacggttgttttcttacatctcttgggaaagtaaattatccatatttatcacagaggtcttgaaaaatagaactgttaagccaaaagtttgtagaacttgtttggggcagagctgattcctgacactggactagatttcatctgcttcgctgacctttaggaatccctgccgctgctcttgagtctccgtagcacaggactgaatcaagatgaaccggcgcgcactctacatcgcttgccctgtgccccaaaacgccgaagctaacttcccacgcggcctcttgctcgaccacccacttctgcgctgccaggcacaccgaggggaccggctctccctccaggcggcccattccagcgtttcccgctagagggcacacggcccccgtgcaaagcgcttatggcgcggggcacgcgcgcacgcagcctcgactcctatagcccaggtcccactcccgggctgggctcagccgctaaggcgctggggaggggccgtgccagggagcgaagcgctcccgggactctgggagggtgcggccgggactgctgtcccttgccctgagctctgggcgtaggcgcccggtaggactcggcgcccaggtgagcggcggcccccaggaggggaagcaccgcgcgactcaacgggcgctcagagcgcagggcgaagaggacgggcgagggagagggggagggagaggccacggcatccgaggaggaggaggagtaggaggagcaggaggaggatcgtggggcccgggccgcgctgcgcacccacctgggctctggctgcccgccgcggactccggcttcttgccggagcctcgctccttcttcttgcccttccctttgcctctgccttctttgcgctcggacatctcgccggagacggagcgctctacgcggacggctctcggcgcaggcgagtttggtccaagggctcggatcgggtttgggaaaagtttgtccctcgagggggagagcgagcggccgcgctgaggcgctcgcgctgcgcgggggcgtctcccgttgcctgcagggagcgcggcgcggacgcggcgggcggtccggccacctggaacgggcgctcgccctggctctcggggctgctcctgtcgccccgggaagtcgtcgatgggtcccaccgctggcggctcgcgtcctggcctctgcccggcgccctcgcaacccgatcggggagaggttatcaccgtcctgctcacgctcccatcgtccggcagccgccgccgctcagctcctggcctccgcgcgagcccggagttccaacaagtttcggggaactcctcgccggctctttttcaattgccccgcagccacccacctcccgcccgcaggttggaggcaggcgcctccttcgcaccctcccctggcctcgccccctccctcttccccaccacacccccaccccgaggcgcggacacgccaccgggaggagcctgggctcggcgctcccgggcgcagccccttttcctcccgcgctggccgggcggggggtggcggcgcggctgccgggaacccccgacaggggtcgctggacgctgcgcggagaccgaggccagcgccccggagacccgggaacccaggcggagacccgaggctctcgctgcccgctcccctccgcagccaggcagcgcctgggagggctgctccgtcccattccacgcggaaaaggacggcgcagagaaaagtttgcgactcccacacctgtgccccaagcagagtctccgtggtcaggaaccctgggaggggtgcggggggaacgttggtggctttcccagaagagttcggggttcattccttaactcacttaagtacaaaagccctgtcgcacgcaggcgaaaataaactctaggtggaagggagtttaagataaggcttccttccaggtgcacaggaagggctaagcgaaccttaaagatgctaggttgcgctctcctgctgggtctgcgccgtgtgcgtgtgtgtgtgtgtgtgtgtgtgtgtgtgtgtgtgtttagtaagtgcctgttagaaatcttcagcttttccttaaaaaataacctggcctcttctaagggggtgcccttaaactacgtctcttactacaacttaattttcagaggaactgataaaaaacatagttcggagcacgactcagaataattaaaattactgcagccgctgaaagtcactcagttctgccgagtggaaaagcaggcagggaggggtagaataaagacacagaactggagatccttaattcgtgaatgtggggtttctcagattcaaactttactcagaactgcgcgtgaaacctactccttcccttgtcctccctctggtggagaattctaaagagcaaggaaataagaaggcattgacccctcccctgcaaaggacaaaagttaaagaccagggtaacgggcaccacggaaggatccagaattgtctacatgtagagaaaacattctcagagttataccacagctgtggttaacttagactcttaatttacagtgaaatactcttgtgttgtggtcgggaagtggtgagttggaacaatccatattcaaaatctattgcttcactttaaaagtgacttgctcttggttttccattttctggggtcaatgctaactgaaccattacctacacactaccttctcacggtattttctgatggccgcaatttaaataaaagtgcagtctggagtgtctccttgatatgtagatgggaagggagggagggaaatatgttcactttaaaactgtcctaaaatcacactaattttattctagtttaatttgcactgtcataagaacgaaactctgttgaatgggtttaactgtggaaagatatcctagcagtcttgccatcattatttatagtttaaaagtttgatgtccaagtagcttctgatagccttcctacaaacaccaaatataaatttcactgggctataaagacagcaaaagcagagaaaagatgatgaatatatctcagtagcactattaatattccacagagacgtatgcaagatggagtctgaacactggctgaaataactctgttttcccaggagggggccactgctcagtaagcaggaaatagcaaaattcagagaagtcctttcaaaacagatattttgtcccaaggatgtgagacagcataagggcttagtatacactaccacatattctctaacatggcattatgttagaattgaaggactgaaagcaaagatgtattctgggattcttttttaaaaaataagattttccccaattaaaaaaaagaagctcaaaatccatttctatggaaatgttgtaattctgctacttttgtttagggtctggatgttttgcttcaacaaaacagcttactggtcattttt

SEQ ID NO: 587689 - DNA, 4001 bp, Homo sapiens
taaaacataagagatggcgtgatgttttaattttaaaatgtgttagaaataaattgaatttaacttaaattcaagcatgacttgcagatgctgaagtttttcattcccggtaccagattgagccatgtggctagagagagctgctgttacaacactggttcagatccggagtttgcaagatcattttactcggcccttcaatgccatcccaagcatctcaaacataggctttgcttaaacaaaaccaggcaactaaaatgcaagaagaaagggaaatgtcctttggggacctcaaacccaccccttttattcatcatcatcatcgtctctctctctctctctacttacaaagtttaggagcagtttggagattagtttctgttgtttgtggctgagttgctgacttgggcgttctcacctcagggttccgggtgggtgaagggaaggatggcgcagtggacggcaagaaagaaaaggcaaaaatacgattcttcggtgtcggtgccgctgatggttcaaaggagacaacagccttgtcaccttgcactgtaacttgaacctcactttcagattgagccctagagacaggtgaagtgtatgcctcagacgacacccacacagctgaggcagcagttgcgtccagagaaataatagggtcctggcctaaccccccagggtcaaggtgagtaggagagtcatattcaaagatcttgtccacaaatacccacttgaggccggcgatgcagaggcagaggctgaccaggcaagccaggatggggacaatgcagattttctctgagttgaggcaacctctcaggcgctcagcttctaggcacgcacagcagggcacggccaggcccacgagtccaggggttctcccatcttcagtctggggctctggcatgtcttctgctgccggaagcccatcaagagatgggtctgcactcagctgagtggaggggctggaggacctctcggcggcgacctcagacatgtctggggaataaatctccatcggctcacctccagaagaaggcctggccgctctcacggtccattaccacgcagaggcccccccaaccaaatgatacagcatcttacagggggaaatcgataaatcgtccaagtccaaggccattattaaaatcaagaagagttcagaaagatgcaaggggggaagaaaagctcctagcaactacaaaatcaaagtatatcgtaataattctttaagctgctgtttctgggccacttttctagttcttttaaatgctactccaaaccatcccgggctcgtcaagaggacagggacgaaaatagatcgacggagctgccggctgattaattaagtaaaccagtagcccaaactgaaaggcatgtttctcacctcgagcatctgaagctggtgtctgctcagatgaagaaaacaactgtcatgcaggagaagtaaaagcagaaggaggaccagcggcggtggcggcggcggcagcagcagcggcggcaggagaggcagtagtgacaatagcaacagcatcctgttgtgttaacgcgacgacggctgaaaggggctgaatcattacagagcagcaggtgcctgccctcggagcatcactgcaaacaggatcagagggctccggaggcaagagtgcagccaggaggggcggtcactcccttccccgccctgcctccaccccacccccgactactcctctttgtccttcttgagtgctcattcactttcttcctctgcggctcttctctgcttcagtctctttctctttctttcccttcttcatccaagcccgtcctctctcctctctctctttcctccccctctcccaacccccactccccgctctctacccacactctagagctgcaggctggtctgagtaaaatcagtatccccagccacacaggactgccagtgacttcctattttatccaattagaaggaataaaggccatcaaatcaaagagaggcaggcaggcatcagttaagcctagtccccatggcccccacccgttttcctcctttttctttctttctctacaaaagctgtcccagtcttcttccacccccaccttgccagctttcagtctctttccttcacccactgttgggtcagagaaagccagcgatcgatgctagcaatctaacaaagctgggatggggatggggtggggggtggtgtaggtgggaccttatgggttggacctgaggcttgaagtctgctatctgattcctccctagagaggtaagcttttcaacagcaatttcttcctgcctgctgctgagagatagcattccttccctagccctctaataagttttgttcactaagaggactgttattacctgattttcaaccaacagtttgaacatttttttcctaaccatggacagctctgcctttagccctttttgcaatgactatgtaagactttgtttgtcatgcccagggagaaatgctgagtacaggctggaggaagggagtgctaggggaggggttggcagcccatatatcccctgctgtggtcccctttgaatttccatttattctatctcacccaaagaagactaataatgtcaagctaataggaagcaccagtaagtaacagagttatgatgcgagcaaagctaccacttcatttttagattagcctttcatggtgactccacactgcagaggtttggattccctggcactgtaatatataccacatgtcctcagctatcaccgcactgaaagtactaagaagagttttctatgagagcatgccttttgggttaggtttcaggagctttacctttcagtagtttcaatgctgactgtttttttcttttaaaacaacagtcattaaaacactagaagaaatgcactgttcttaatacagaccacaggcttccccaagcactgtgctgcacatcactgcacacaatatgcatctgaacctgtaatccacacttactgtgattggacatctaaacggtttccaaggaaccattttgttcacttatgtcaataggagtctgtaaaactctctctaaatctatactacatagccatcatatgagtccctgaagcagtaaaatttagaattcaagtcctgagaaaatccgctttaagcacattatattttgtagggcacaatctccactactttgaggtatgtttcagctttaaacggcaggagataagaatattatcacttcttccttcaagatgaaattagtccataattatacatgatttaaagggtcttaacatcttaaactgtgtttgcagtactataactaacaacaacaaaagcctgtgccaatttgcataaatgtaaccatgactatgacaagtttatgagcaacatgagttatccttgagttcatctctctataatctgcacagtaaatggtgtttaaaaataattcctatgcttattttctaggtttatttgacttcaaagcagtgagacctctcttacaaagattctagcaaaggacatacaatttcacggtgtagaaaacatctattgaagcatttaaagcattcaaattgaaagatagtaagatctcaatgatcaatattcatgtaaatattcagaaacaatatcagcaggtgtttatgctaaactagggtaatttatgatttcttcaaaaagcacccagttgaaatatacggcactgaattccccaattttgacctaaaccaaaactattatactcaatacaccagcatttcatccaaggccaaggtcagctaaatttcaaagaccaaaatggggttcaggtggcctcaagtcaggcagataggagaaaataccaagcatgataacccatagtttagaaaagtggtctttaacttacaccaagagcaattattcaccttacctcaaccattaagagcaaacatattcagcagaaaaaaaaaaaaaagttactgggcattgctctagctgttacactgaaaatacccaacacttacagagaaaaccaacattttata

SEQ ID NO: 587690 - DNA, 4001 bp, Homo sapiens
ctattatgcatgttggaatttgtgatgtgtaatcgtgttaatttactgtttgagaagaaaccccgctatgtgttagtgattatatagtaatcaggaaattatacagatatttagatcatagaaattagtttatgaatggcataaacataatgctacctcagcaacgaaatgagataatcagctaatttctcaaacctgatcatatgaagcagacccgggaagaatacttttcagtggtaagtgggaaaaggtgtagcaaataattgctaaacttccaaaattcttcttcttcagggcctacatgtgatattccataatttcgttcatctgttctgatgcagtgaagtgcaaaaacatcctccaaaccaaaatattgtgaaaacaaaatttcttgagatgacttggccaaaaaaaaaaacccccaccaataacaactttataattctcacatattacacatattcacaaggtacagactgcacctctctgctggacattgagttgccaaaaaactctgccacatctgtcggggaatgtcagtgcactgccccttccttgcagagacttcacagacacagaagcaaacccctaaccatctccacactctggactccaagtgaagggaaggcgttaaaatcctgcgggactcacccttcctccttcaaaggaggcccagaatcagcaactcctaaccaaagccaagttcatatcacccacaagaaagcagccggcacatttccgatctacttggtgagccaaaccccaaaggattaaaaagtttcaggaggccccaacccaggactaaacttgggctttctccagtggcaaagcctaagacaagggaagctggagaaagcgaaacctccctctctgaggatcgctgagaacccaccaccctgaaaccaacaactgggacccagagcgcctctgccttgctcgggcggccgtcgagccccgctgcccgcgcgcccgggatgcgccctcctcgccgcgggttcgcgcccccaagggcgaggaacttaccgcaccgcttgcacagcacccggctgacctccttcttgaggttccggcccgtctccagaggggggaaagaggctcggaaggcggccggcgcgcggctggtgctgttggcgtcgggctccatgaagaagatgtacctgctgtcctccttgagcctcccgcaggaggggaaggcggggtggccccaggtccccaggcgcacggtgagcagcgagtccttcttcaagcccccggctttcaccgcccacacctggtgcaccttcaccagatagggcgcctcctccccgggctcgccggcgctgggcaccggggcggtgggccaagagggcacggtcccgttggcggcgagcagcggctcctcggcgggcggccccagcgcccgtgggcccgcggctggcggctcgcgatcgccgccccacgcccctgcctcgcccgccgccgccgccgccttcctgtcgagtgccccctgctgccgccgctgcgggtgcacctttccctcgatcaccaccgcggcgcgctgagctagctcctgcaccgatcccacgctgggcggggacgagtagcacaccgaggcccccgcgggagccgcctcgttgccggccgccgcccccggcgccagggccgcggtccccagcagcagcagtagtggcagcagcggcagcggcggcgacgagcgggcggcggagccggggcgctgggcccgggggccgggacgcccggagcggcgcggggcgcgtcgccatctcatggtgcgaggtgcgtgcgggcttctggctgtcggttcggactctgcccggctctctcgcgctgcctcccttttccttcccctcgcagcaccactcctcctcctccccccttgccctcctccttttatttatttattgggggtgcaggggtaggagagttgtttatgggaggaggagggggaagaagtggatggaaccacagaaaggcgaagaggtataagggcaaaaaaaaaaaaggcaaaatagaaaaggcaaaaaaaccgctgccgccgcctcagttacagggagtgacaggtccccccaccccccgcgccgccgccgcgcccgagccctgctgtcggggctgctgtcaccggaggaggacgtggaggtggaggagctgctccgcgggtgacagtcctttgtgtgaagtgatgctgcggcggctgctggggctgcgagcaagcggctgggagagagcgcgagggagagagccctggaggcggagttgcgtgcctggaaatcgctgggtggccgcggcggcgacagcgtcctgcgcctcgccagcctgtttacctgtggtgccaactcggcccgcgcgtcctttccccatgctgctgccggagcggagcgggacccgcgagtgggtcctcctgggcgtccccgtccccgcgcgcctcctccctctctgtcgccccgagtgctgcaatgggaggacgggcggcaaacaggctgcagtccgagtgggctgcggaggcttactggggagtgagaggtgacgcttcagtgagcaaggacctgtagccggcgcaggatgcccaggcgccggtgggaggcaggcagagaggggcaggtgggaccccgggcgtgcgggtcctcggtgcagaaaagttttgggtgaacccgttgcttgacacttaaaagggagcaacatgttcgcaggcgacaagcagcgattaaaacaacaactttataacgctctctctccttgcagcgcgcacacacagtgtgcacttcagatgtgacgcctcctctactccatgctcctttgatccttcggtcttcatgacccccgccttttcttttactgaaattcctgcttcaccatgactttatgacatgtgtggtactgctgataggagcatagtttgaataaaatatttgctgaacgaggccattttgtacaaagtttatggcactttgtcaactaatgggttttgcaaaaaataaaaataaaaagtgaaatgaaagaagcttctatggctattggaacaaaagatcccaggcataaggagttgtaggtatttaacctccacctggtattgtgccacctgaataccaagctcccccaactccacccccatctgtccccctacccccacatgtcctgccaaatttaaagagctatgtctaaaacaagaatccatcctctcccgggatattcctttcaacaaatgccattccacagaaagggaacacatttttagcatttcaaggtaaatattttctctcatgttcttttatagtgaaaaatatattcagtgacctcataaaacagttaaagttgttattcaatgggcgatagatccacactgtgagaactgaagaattttaaagtactctaacttcataatatctttactctgggattctacgtgttgcctctagcagtttcttgaaagtatgtcatagaagctttagatttttatataaaacataaaaacagatgataagctacaaagatctttttgttcttggcataatatagttggctacaaaacaaggttccattctctcaaagtgcagtttggagggacagggtcatcacactccctgtgtgtcttggcaaggggagttccctgttactcataccctgatggagcgcttcaggagaagatcaccatttagcagcatagttgggcaggtctggcctccagtatacgttcacttgaaccctgcatggtgcttctagcgatttactgaaagaaagtggttcaaacatccaatcctactaatttctttacttttctttagcctggcctcccatatttctgactcgactttttgggaggtacaactctggcctagaacactttcttcctctctaccttccagatttgtatcagttatctgtcactatatgacaaaccacttcaacatttggtgacctgttggttcatttagcccaagattctgcaagttggcaatttggactgggttcagctagggtggagttcttctgttgacctcattgat

SEQ ID NO: 587691 - DNA, 4001 bp, Homo sapiens
gaaaagtaacaattttcctgggtatgctggagccaatgacgaatccaatccatttgctaatttgtgtttattgatgcaaggggataaacccggaaaaatctgggcagaaatggtaaatttggggcttaataaagttgccttaaaatattcctctgtttcagaatgaattctaagatttataaaagagactccttgattccagtgcatacctgatgtgagacagattcctgtcattcaaatgcatattctatgcattgaatggagtatgcccatcagcccaggttgcaaagccatggggcagagcactaaacaatttgggcactcagcaagttataattcaaataaatataaaacacatggcgccaactttttcagatgactgatgctcaggaacagttgatgcctcctgactggatagataaatgttttggttgccaagagctagagttctctctgaacactgccagcctatcacgttgttgtctaatcaatgaattctaacaaagcagcatatacatggaaatgcaagtacaggtttcaaggtttgtgtgacaccacggagctgtatgagctagccaaattgaacacaaattacttcatcgaaataacagccagaaccaaggaaaaaacgtttccctgtatatcaaaaaggccaatatgagtattggcacgaatgactcatatcatacaacatgatgccaattcaagtgtgtcaaagttctcacaatttaaatatgaatgttcacccactcaatacagagcaccaacaagtcttaatattgttggtactaaacaaagaatctccactcaagctctttccacaagaaaaatgcattacaaattcagtcagaagggcatccccaagtgtgagttacatagttagggctcagttatttaataaacaaccctttctgtgactaaaacctaatcacatcaccaaaaacatttttgaaagccatatctgagatacgttttctgtgtatcgtatcttcttctctacagtagaaaaatgacatttcgtactgtggacacactggttagaccaacattacagattagagaaagatgaatgtctggatcaaaggggtcgagtcaacccttataaaacaagtgtagacaaatcttgaagtctgcacttgtattcccacgtgtaacctgctttgctggtattcactgatgagacaacgtgacaggctagcagcactggaagatctgtggctctcacaatcaaaacagtgtgtctgtaaaatgattcagcccccctttccttttggcatctgagctgcagaccgagcaagttgtttctgtcaccaaaaatgccctgggaactatacatagagccgaagtgagctttcttatgagacttcccttggggacaggtccagcatatctgaaagggaactgctgtgagaccattttagctcaagggatcccaaatccttactgggatgctggtgagaatgagtgctccgctgccgcaccgcgatttcgactgcaaagctttccaacacaaggtccactgcgcggggagcaagtgtttgggaggcaggaccttggctttcctcagaatcaggcctttccggcggcccccctcccagccttccagggcatggagctagtcctgtgtctaaaggagtcggcaggaaaaaggcgcggcaatgcgagtgggtggtcgccggcctgctcggtgccgcccggcgaccaactctgcggcgccggcgccgagtgcctggacccgattaaggggaaggattagaaagggggtgcccgccgggcagcgtactcaccctcccctgcgaacgcccgggctcgcgtgccgggatccacgcccggaccccgcgcggccttccgggtgagctgcccgcggccgccgggacctgcactgccggatagctcggcatgcctcggctccgcggtggaatctggcctggcccgtcatccagttcctgtccccggcaggctccggcccagaccaggcccccggcctctcaccccgacctcaggtttccgccacagcccccagcccaggccctggacacgcgtccggcccctgcctccgtgcccggcccccacgccgcctcccgtccctcagatctccggccggcgtccccacgaccggccccgactaggcccccggctgggcccttcttcagctgggcgcgcacctctccttggagtagagctgcagctgctgctcctgctgcttcttccggataaacgccatggagggtaggcgcgggcgggcgcagagcgcacaggcaggccccgccgccgcctgccgaggaggtccggaggagccggggagggcgggattggtggccggctggggagcgcgcggctgccggcctggcttcccctgcggcgccgctgggcggccgagagcccgacgcggcgtcccggccgcgctcaccgcagcatcctcgcgtggggactccggcggcaccgtgactcaggcccggaggaggggcgcgcggtgacacgaggcgccccaaactcaggccgcctcagaggatcgccagggccagcggccagaccaggatccgacctcacacactaaacgtttcaccactttaccaaccattgcaggctgcgttttaaatattttacgcataaaaagggatgctggcccataaaccaccaatctgttggccacaaagacttgaaataacaacgttttgtgtcctccattgtgaaaaaaaaaaaaagacggaagttaaaggggtgaaggcaactcagtcgtaactattccaaatacaccaggaataagtggagatttatagccaaggagcaaggagcaggtgttcggaaaactgctaagaggaaacatcaattctgggggaaattctggctgaaccaacctaacaggagtcccagtgaaggcaggccagggggtcagatactaagggtaggagtaaagaattttgatcacatatggagggtgggggattcttgctaaactgccgtggcagtgttacttcctaacactgcatttacaaggaagtgcacacaaggacctgggagaagattcagaagcctaactgaagtttggccaagcaaagaatctttaacacagtctcttgattgttgagataattgctcgcatgatttttttttatataacagctttattgggatataactcacataccaaacaagtcaaccatttaaagtataccattcagcgatttttagtatatttccagatatgttcaacaatcaccacaatttgagaacattttcatcacatgtaaaagaaacccataccctctagctgtcactcttcctaactctaccctccaaaccccagccctagcaaacaataatcaatttcctgtctctatgggtttgcctattctggatatttcatataaatggagccatacaatatgtggccttttgtgtctggcttctttcatttagcgtaatgctttcaaggttcatctatgttgtagcatgtatctgtacagtacttcgttcctttagattgctggagcatattctgttgcattttgtttatccattcatcagttgatggacatttcagttgtttccacattttggctattgtgaataaggctgctgtacacagtcatgtacagtttttttatggacctatgtttccatttctgttgagtggaattggaatctaagagtggaattgctggatgtggaggcgaaagcagctccatcttggaagctaatcctccgtgttgacttctgattgaccccagttctgggaaggcctctaagatttctactttatctattgttccttgtgtaagagcaggtatctacccagtatgttctgtccttaattcaaacaacttgatgttattatacttcaattgtcctacacatcccttctgaaccacccctcccctatggtatataagccctaaggggctggagtgatggctcatgccggtaatcccaatgcttttggaagttgaagctggaggattccttgaagccaggagttcgagaccagcctgggcaacaaa

SEQ ID NO: 587692 - DNA, 4001 bp, Homo sapiens
gagctagagttctctctgaacactgccagcctatcacgttgttgtctaatcaatgaattctaacaaagcagcatatacatggaaatgcaagtacaggtttcaaggtttgtgtgacaccacggagctgtatgagctagccaaattgaacacaaattacttcatcgaaataacagccagaaccaaggaaaaaacgtttccctgtatatcaaaaaggccaatatgagtattggcacgaatgactcatatcatacaacatgatgccaattcaagtgtgtcaaagttctcacaatttaaatatgaatgttcacccactcaatacagagcaccaacaagtcttaatattgttggtactaaacaaagaatctccactcaagctctttccacaagaaaaatgcattacaaattcagtcagaagggcatccccaagtgtgagttacatagttagggctcagttatttaataaacaaccctttctgtgactaaaacctaatcacatcaccaaaaacatttttgaaagccatatctgagatacgttttctgtgtatcgtatcttcttctctacagtagaaaaatgacatttcgtactgtggacacactggttagaccaacattacagattagagaaagatgaatgtctggatcaaaggggtcgagtcaacccttataaaacaagtgtagacaaatcttgaagtctgcacttgtattcccacgtgtaacctgctttgctggtattcactgatgagacaacgtgacaggctagcagcactggaagatctgtggctctcacaatcaaaacagtgtgtctgtaaaatgattcagcccccctttccttttggcatctgagctgcagaccgagcaagttgtttctgtcaccaaaaatgccctgggaactatacatagagccgaagtgagctttcttatgagacttcccttggggacaggtccagcatatctgaaagggaactgctgtgagaccattttagctcaagggatcccaaatccttactgggatgctggtgagaatgagtgctccgctgccgcaccgcgatttcgactgcaaagctttccaacacaaggtccactgcgcggggagcaagtgtttgggaggcaggaccttggctttcctcagaatcaggcctttccggcggcccccctcccagccttccagggcatggagctagtcctgtgtctaaaggagtcggcaggaaaaaggcgcggcaatgcgagtgggtggtcgccggcctgctcggtgccgcccggcgaccaactctgcggcgccggcgccgagtgcctggacccgattaaggggaaggattagaaagggggtgcccgccgggcagcgtactcaccctcccctgcgaacgcccgggctcgcgtgccgggatccacgcccggaccccgcgcggccttccgggtgagctgcccgcggccgccgggacctgcactgccggatagctcggcatgcctcggctccgcggtggaatctggcctggcccgtcatccagttcctgtccccggcaggctccggcccagaccaggcccccggcctctcaccccgacctcaggtttccgccacagcccccagcccaggccctggacacgcgtccggcccctgcctccgtgcccggcccccacgccgcctcccgtccctcagatctccggccggcgtccccacgaccggccccgactaggcccccggctgggcccttcttcagctgggcgcgcacctctccttggagtagagctgcagctgctgctcctgctgcttcttccggataaacgccatggagggtaggcgcgggcgggcgcagagcgcacaggcaggccccgccgccgcctgccgaggaggtccggaggagccggggagggcgggattggtggccggctggggagcgcgcggctgccggcctggcttcccctgcggcgccgctgggcggccgagagcccgacgcggcgtcccggccgcgctcaccgcagcatcctcgcgtggggactccggcggcaccgtgactcaggcccggaggaggggcgcgcggtgacacgaggcgccccaaactcaggccgcctcagaggatcgccagggccagcggccagaccaggatccgacctcacacactaaacgtttcaccactttaccaaccattgcaggctgcgttttaaatattttacgcataaaaagggatgctggcccataaaccaccaatctgttggccacaaagacttgaaataacaacgttttgtgtcctccattgtgaaaaaaaaaaaaagacggaagttaaaggggtgaaggcaactcagtcgtaactattccaaatacaccaggaataagtggagatttatagccaaggagcaaggagcaggtgttcggaaaactgctaagaggaaacatcaattctgggggaaattctggctgaaccaacctaacaggagtcccagtgaaggcaggccagggggtcagatactaagggtaggagtaaagaattttgatcacatatggagggtgggggattcttgctaaactgccgtggcagtgttacttcctaacactgcatttacaaggaagtgcacacaaggacctgggagaagattcagaagcctaactgaagtttggccaagcaaagaatctttaacacagtctcttgattgttgagataattgctcgcatgatttttttttatataacagctttattgggatataactcacataccaaacaagtcaaccatttaaagtataccattcagcgatttttagtatatttccagatatgttcaacaatcaccacaatttgagaacattttcatcacatgtaaaagaaacccataccctctagctgtcactcttcctaactctaccctccaaaccccagccctagcaaacaataatcaatttcctgtctctatgggtttgcctattctggatatttcatataaatggagccatacaatatgtggccttttgtgtctggcttctttcatttagcgtaatgctttcaaggttcatctatgttgtagcatgtatctgtacagtacttcgttcctttagattgctggagcatattctgttgcattttgtttatccattcatcagttgatggacatttcagttgtttccacattttggctattgtgaataaggctgctgtacacagtcatgtacagtttttttatggacctatgtttccatttctgttgagtggaattggaatctaagagtggaattgctggatgtggaggcgaaagcagctccatcttggaagctaatcctccgtgttgacttctgattgaccccagttctgggaaggcctctaagatttctactttatctattgttccttgtgtaagagcaggtatctacccagtatgttctgtccttaattcaaacaacttgatgttattatacttcaattgtcctacacatcccttctgaaccacccctcccctatggtatataagccctaaggggctggagtgatggctcatgccggtaatcccaatgcttttggaagttgaagctggaggattccttgaagccaggagttcgagaccagcctgggcaacaaagcaagaccctgtctctacaaaaaataaaaaataaaaattacctgggtacagtggcacacacctatagtcccagctactggagaggctgaggcaggaggattgcttgaagccaggagttcgagaccagcctgggcaacaaagcaagaccctgtctctacaaaaaataaaaaataaaaattacctgggtgcagtggcacacacctatagtcccagctactggagaggctgaggcaggaggatcacttgagtccaggagtttgaggcttctgtgagccatgatcgtaccactgcaccccaacctaggcaatacagagagagagagaccttatctcaaaagaaaaaaaaaaaaaaacattgagtctgggggttaatagcacagcaatccaccatctcatcttgctgcccaagacacagatatggacatggcttctgttcctt

SEQ ID NO: 587693 - DNA, 4001 bp, Homo sapiens
ctggacgataagagtgagacgctgtcaccaaaaaggaaaaagaggacttttcctcatcctgctcccaccatgagaaaaccttctcttcagttttctttctatttatttatttattttttgagacagagtttcgctctgtcgcccaaactggagtgcagtggcatgatctcggctcacctcaacctctgcttcctgggttcaagggattctcctgcctcagcctcccgagtagctgggattacaggtgtgtgccaggacacaccaattatgttatttatttacttatttatttatttatttatttattgtatttttagtagagagagggtttcgctatgttgaccaggctggtctcaaacacccgacctcaagtgatccgcccgccttggcctcccaaagtgctgggattacaggcataagccactgtgccagggcctctcttcagttttctatctgcccacatcttacccatatgctaaagtctgaatgtttgtgtcacccaaaatgtatatgttgaaatcctaacttccaaggtgatggtattaggaggtggggcctcttgggaggtgatgaggcccactttcatgaataagattagtgcccttttaaaagatgctccagatagctgctttgccattccaccatgtgaggacacagcaagaagccacctatgaaccaggaaacaggccccggaactgtgagaaataaatttctgttgttcataagctacctagtttatggcatttccgttacagaagcccacattgactaagataccatctttcatggcttggtttaagtggttctcaaccaagaaggattttacccctctcgcaaggggacatttagcagtatctgtagactttgtggttggcatctagcgggcagaggccagggatgctcttaagcatcctacaaaacacaggacagccctcaccctgaccccacagcaaaaaattatctggcctaaaatgtcaatagtgcatcagttgagaataactggtttaaatcaatctctcttggatccctccccaggtaataacactgatctttttcttcccggtacctatgatctccaagaaagtttagaacaagttgtgcatttcctgagttttttctctgcatgttatttatagacaatatgttgacttcctttaaatccatgggagccttgtacaagtcagccagagctgcctctcctttttcaacatgcaaggataatcccttctctctgaatccttctcatacaattgcttttccctccctcatgctaccattatccctatcacatgcacatgtacacaacacactcctattatgaaactcatcacaactatttgctcacatgtctgcagcttctttaaactgacacctccttaaactagaaccctgacatattctattgcatataaagcaattcctcacacaaaataggggaccaataaagatttggccagttacaaaaataacaacagacatcatcatttctcggtcacctacagaatgccataaactggtgtcccggcactttattctccttatcgctaattctcactgcaatctacataactgaagaggaaattgaggtccagagagtttattcaaacgaccttcccgtggccttacttttaaagtcagttcaaacaaaatctatttggatcaaaaattcgtaatcttgcccctacacacttgaggcgaaaggatggagagatggcgtctcggacaggagggtaaactgtcccagactcactaccgtggcgtgaaaagttccacaaccataatccgggtagacggacccccggctcggagtccccgtggagtgtccctgagggtggcgaaactcctgccaccctccccattgccgtcccccgcttcttccctacctggtagtccaagctgtctccgtctggtggcaccccaatttcccctgcctagacccacctcctttcctcagcccccttcgcctgccgctgaaaagtgagagcgggctcttgcgtcatcagccgtcgccggcgagtggtcacatgatgcccctccctgctcccagccgcttcggtcatgtgaccgcctggggagtcaggggcggaagtcggggtctgacccgctccaggtccgggactgcggatagaagaggaccgccgccttgagggaggggtggaaactgggtgccggctccgcgcgcgacctccggccctgcgcgtgcgccgtggcgcggcccggctgacaggtgagtggggatggagtgagcgcgccccatttttgcatggcccccttcccctccccgctgggccgcgctggccacggggaggtctgcagagtcgcgtgcagcctggatgggggactcgggatggagggcttaggggctttctggggcgggggctgtaatccagctcttcgtctccgcttagggggaaatcattttgcacaccccttcctcgctttaggaagcaccgttcagctgcttggtccgaatctcatccttccaagtttccgggaacactgctgtatggatgtcgtcgttatttctctttgcttttgagaaaactgaaaggctagtagtgaggacttttacaggctgacagacgtggatttgcattctagttatgccatgggctgtgagtttgggcaagtcattgctgctcgccgcgccttaatgccttcacctgtgacatactgatgtcaaaatcctttgcatttgggggaaaaaaaaaaagttcccagggccctgattcctgggatcggaatcaggattatgatcggacaggagaaagaaaaaaagtcacagagccataaaactgggtctcctgattgcaagcgcatggagctccctcaaacataggtgaggcgtagtgagggcgaagttttactgtctttgtgcactacaagggacaccttctctaattgtccttcacctgcctttcccaggatttcaggttcagcctcatttcagaacttttctggaaaatatatgcagcttgcatttatcttgatcagcaaccgttatattttgtttgtgataatggatttgtggagaccagtgcttcctttatggaactgaggttttgcgaaaggctaaaaatagacctgccttcttttgtcctctgaagagggtaaactgtttgtccacgacaattcgatttccttaagaaatattattctgtactcagggtaattggtgtaaggatgtcatgccttattcttgaaagcatgtcttttgattaggattacttcccaaactgaaaatcacagttccacgccaaattattaaaaatgaagttaccggcacttgtaaaagaaaataagaaaatatagtgggatctctggatttcatgccaataataatatagcctgtattgagaaaactgatcttcaagtgttcttgatccctagcaccaagagaacctctgaaaggataatttaacatagcttcttctacagtgtttatttggacctaattctaaagtggttttttaagacttagctgagtcttaacactttgtaaagccatccacctacctcttagctgcaacttgattaggcatttttaatgatggttcttagattctgttcttcaggactagtccttcagccaacgagggggctatttaccaaatactctagccaaattatatttgtacaaattatggaaattccatttgttacatggaaaatataactagtccgggttaggaggtctagtacataaaatgtaactaagtgatttccttctttcagctaatcttgttttaacttcttccatcttcaaaaacttagcaggagatgcttgcattattagaaatagaaaacacaagtgcccttcatggggcaaaacagattacaagcagtgagttcatttcagtaaaagtatattaaatataactcatatgcttttgcattaaaaatttaatataaagtttatatatagaattttagaaaggtgatttacctaggtaataaagacccataatatttgttttactattgccgaacatatttggtta

SEQ ID NO: 587694 - DNA, 4001 bp, Homo sapiens
gcccttttcaattgtttctagctctattattctacagaaaatattttttcacttaaaaatatacattgaataacttttgtttgcagccaacatggaagaataggaaccagatttatctttccaccagaaacatccaataagatgaaacaaaccagagaaagttaaatgaaacaacagttttcaagacatcagacataaaacaacaaaggacacttatgagattagccccaccaccaatctagtttactgccttgaggagtttccagaccacagcacaaagaagggaaagtgaggtatagtcaactctacataaatacaacggttacatggcttttccctccctttaactgtagtgtaaatcttcaccagcttttcttcccccttctctgaagaaagaaaaaggccagagtacttgtatgcagagttgacttcaacctccttgagttgaagaaactaggctactactctgtcattagacagagtagcagagaaaagagagatgcagagagaagcccagagatctgagagtctgcctcaagtactcaagagtactaatggcatgtgtttgaggagattaccccaggctacagaaagaaccatctgaaagggttgaagagaaatcctgggcactcacataaggctaggaaccataactgctcccaataagcagaatggagaaaacccttaatttgtgggatactgggtagtgtacacaggaaagtcttgcctcggtagtgggaaataaccctagactgagcactgctcctgatcggactaacaaatcataaaagcaagaaccaatggaattaatctgtttccaagtaactcaactatatcccggaaaaaaaactcaagaacattataaaaatacaaaaataacctgcacctaacaaggtaaaattcacaatgtctggcatccaatcaaagattaccacatatgcaaagaggaaagaaaacaaaatccataatgaagagaattaccaatcaatagaagccaatataaaactgacatggaagctacaattcacagaacaagatgtaaaaacaattattgctacatgtactccatgtatgttcaacataagtaagtagaagcaagaaagatgcaaaagatttaaatcaaacttctagatgtgaatattacaatgtccaagatgaaaaatacaccagatgggattaacaagagactaatattacaaaaaaaaaaagtaaacggaactaaaggcatgaaaatggaaactattggcaataaaacagaaaaaagtatgaagaaaaaatgaaacgggcattcatgagctgagaccaacttctgtgatctaaaaatgtgtaactggagtcttcaaaggagaaaaggaggggaaaaagttggaagaaataatagccaaaatattgccattgatcttgataaaaactatatgtccgcagtttatagcccaacaaaccccaaacataagaatcataaagaaaaccacagctggccacaatattatcaaactgctcaaaaccaatgtaaaagagaaaaatcttaaaacagaagaaaaaaggcatgttatgtatagagcaacaaagataggataatgtgagatttctcatcagaaacaatataagcaagactgaggctataactttaaagcattgaaagaaaaaactgtcaacctagaatgcagaaggagcagagagatggttacagaagggtacaaggaaactttgggaatgatagctaagtttagtatcttgattgtggtgatgatttcacgggtgtatacatatatcacaacttcttaagttgtacattttaaatttgtagtttattgtcaattatgtcttcataaagctgtttaatttgtgagacaaatttatgtcctacttaccaggcatgctccaaccctggagataaagcattgaaaacgatggacatgggacccttcaatacaaaatcaataatcttagcaaagaaaacatactggatgctacgaagtatgataaagtctatgaagtactggttactatggcaacgcataatacagattctatagtgtagattctgactagtcaagaaaggaatccctgaggaagtaacatgtaagccaacatgaaagaatgaagtatgaattagctaggtgaaatatagctgggaaacatataaaaacatataaaaagacttgtactaaatgaagattctaggaaaaggatatttataaatgcctaggaaggaaattgccggatcaaaagacaattacaatttgattaaaaataagttttttgtttcgttctttggaatagaaaaagacaaagtgacatttactgcttatgtagcaaaggaaattttggtacaacttaataacattatttaagacaagagaataagcctcattgcatcaagttcttgacaccagagaccacatcatctttacatcttaaatgcagtgtttcaggtagccaaggtgcccatcaaaggtttgtggaactaaagtgaactccttcagttagaataaaagaaatcaaattaccagaagcgcctcaattatgcttcactatctctagaaatgatagtttttaaacaaaataatctttttcatcatcctcaagtaattcctaatgaaaaactcatcatgtgaactattgcaaaagcctcctatctgctgtgtgcagtcatctcatcttccaaactcaacctccacagagtctgaggtaagcttttcaactcccgtatctgttcacgtcccttgtacttaaaatgtggtacacatacgccatggaatactatgcagccataaaaaggaacacaatcatatccttcaaagggacatggaaggagctggaagccactgtcctcaacaaaccaacgaaggaacagaacacaaaacaccacatgttctcacttgtaagtgggagctgaataatgagatcacatggacacagggaggggaacaacacacactgtggtctgtcagagaatggggtagggggagggagagcattaggaaaaattgctaatgcatgctgggcttaatacctaggtgatgggttgacgggtgcagcaaaccaccatggcacacgtttacctatgtaccaaacctgcacatcctgcacatgtaccccggaacttcaaagaaaaaaaaaaatcggtcggagcagtggctcaggcctgttaatcccagcactttgggaggccgaggcaggtggatcgcgaggtcaggagttcaagaccagcttggccaagatagtaaaactccgtctctaatacaaaaattagctgggcttggtggcgggcacttgtaatcccagctactccagaggctggggcagagaactgcttgaacccgggaggcggaagttgcagtgagctgagatcgcgccactgcactccagcctcaacgacagagactccgtctcaaaaaacaaaacaaaaacaaaaagaaacaaacaaaaattagctgggcatggtggcgggcgcctgtaatcccaactactcgggaggctgaggcaggagaatcgcctgaacccggaaggcagaggttgcaatgagacgagatcacactactacagtccagcctccgcaatagagcaagactcagactcaaaaaaaaaaaaaaaaaaaaaaatcttcaaatggcacctgatatcctgcagctgtacatcccaaacacagaatctaagattaacgctgatgaaatgagtacggaacaaggacaactttgtgaattttttctaaagttaaagtattcaatggattgtttattgtgagattttgcttcctgcttttttggtgttaaaatatccttttgtttatgaaaagatagatgagtaaatgatagtttttaagaaacatctccacctagtaaacagaaaagttggcagaactacagcagctgagttttattttatattgtaatggctcaatacaaaaatgtcagggaaacactgaatgaccggaaatccaagaaatccaaaaggcaaacaaggccctcactgatttatttcctctcactttcccagac

SEQ ID NO: 587695 - DNA, 4001 bp, Homo sapiens
tcactgttttcaaggaactcatagtctagtggaggaaacagacaacaaatcaagatagaatttaaaaggccgataagtacgtcttatggagaatgcaatgacgaagcccaaaagtgaaggcaggaaggctagtcaggaggctactagagttcaggtaagagataactctgatttggattagggtggaggcctagagatatcaaaatgtggagctgaccggacttgctaccaagcagacagtggctaaaagaaataaaccccaaatgactctggcacaagtgtctcttggtaccaacctgggctagtctagtcggctaaaggataagagaccacacggagaaaagtcaagaggagaccatgtgaaagaatcttaaacaagcttatagtctgagaccctacccccaccctccaaacatatgaggaagtccagccaaatgagcagagcttcccagcagatccattactgaacaaggatgcatcaatgagcccaactaggactagaagaaccactcagctgacccgtagacttgtgagcaataataactgcttcttgttttgagacactgaattttggcttcactttctaatgcactaactaaacatggtgataccatctactgacatggggtgactggaagaaacacggtggcaaagaggaaaaggaaaaaaataaaaagaaaaatcaagcttatcctctctcatcctagtcaactcttaacctacccttcaaagctcaacttagatattaactcctccaagacgccttcccagatccccagactagtttaggaaagatattcaagtactaccattgtattttgtacatatccctatcactgccttcccatattgttttacaattatctgtttacaattttcttcctaactagctaatagtcctcttttgttacggaaggtgtcttgttcattttgatattatcaggacgtaacacaaaacaggtactcggtaaatatttctgaatttaataaatcaattagcataaacttattttatactttaatgtctgttattataattaactgtagatcactatttctcaaagtgtgatctctgaaaacatgcatcagaatcagcaggggtgtgaattttaaaatgcagatctctgggctctatcataacgaaaatgccgttaagttgtaaaaacaagagtaaggatattctaccagctacagataaagcaaggagtagcagtgtgggagtaaatccacttttcctcactatcttctagagatgttctctaccagagttcttaatgtgccaggaactgagtaattaaaaatgctatgactggaatgtagtttctcttctaagaaacggctctcggtcagaggaaacaggaactgggggtcctccaaggaggtgtggtttctcaacgcacacgttcacaagcgatgctccaggaggaaggaatgttctcagcgtcccccgaaacagaagccaggctgtggacacacagcagccagagccccaggcactacccgcacgccagccctcagacctcagacctcagaggctgggctgctgacggagggggcccagggtcccgttaccgaagagcgcgcgaaggcggctcccaccgggttctgggatgggcatcattccccagaagcagcggcctccgtgagtccacgcaagccgccacggtggcttcgcttgccagtcagaaagaaagaaattgcgggaagggtcaggccggaggcagccgaaaggggaaaggaacggagtacgaagggcgccgccgcttcccacctgcgtcaagctccagctggtaacaaggcagcggctcaagagagagcttgtaaccctcgaagcggggatccaacagaggtctcttcacccgtagggagcaattagccgccacctccatcgctttccagggccgcagcgtgagaattaataaagcccttgttgaaaggtccgcgcttcacgcctcgcacagagactgggaagcggcgtggttcccatcccagaaaacactgcggtgcgaactgccttctgggaaatgtagtgtccgtgaaaaagttgagactgttgcatgctgggctatgtagttctcctggtacttaacgcgcgcgcgacggcaaggtctgaactctgttacccagaggccctagcaaccaggaggcggcccgcgctggttaaattctcacattataggcagggtggcgagaccccgccccggaaatgcgtgttctagctttctgtgtgcttaggtgcccgagctactgagggtctaagtccgggcagccgaagagtgtggtaggtaacggtcctcagcgcaagggtcatttcgtcgctgggaagggacggccctcgcccgcggtgatggtggtgagctatgcccgtggtcctcagggccgggacccgggcccagcccaggctcctttcgatgtactgtctttcgttagcgtccccgacccgcgctcgcgggcctgtagggctctccgacagggcgtgctaccggagttggcctgaaaccagtcctcgctttgttttctggctcctcctctcccgcctctcccgctgtctccgccctgttctattttccctaagaatgtctgaactgggagggataccctagcgcccttgttttaccagtgagaaaactgaggcctttaagaattaagtgacttgtccaaggtcactatccgtattttaggagccaagacgagatcaagttcaatattccaggagtggtactgactagaccttgtagttattttgaaaatgttagcctccaattacaaaagcaagcatttcctagttctcactcaacttctccttttccctgttcctctcaaaaaagaaaaaaaaaatcaactctggtaactcattgccagtctgaattttcaataggccagatggaagacaacaaaagtaatctcaagttagtgacagattaggtgggaaaacgttagtttacgccaagttttatttaatttaaacttttaagtggctttaacgctttcaaaacctaactttcctcttctttcaacatcattttggtttgggttgtctgtttttactgacaattgaggactttgtaagttaggaattagtttgagatttgttttcttcttatcccaccagcagtgtgtgtgtaaacacacacatccacacacttaggtttagcagttgtaattgtgggttcatcctagtgaagagtaaagcaaaacacttagagccttatctagtaattttattttttttgattaattaatttttttttttttttttgagacagagtcttgccctgtcacccaggctggagtgcagcagcgcaatgtcggctcactgcaacctctgtctcctgggttcaagcgattctcctgcctcagcctcctgagtagctgggattacagacacctgccaccaagcccagcttatttttctatttttagtagagacggggtttcaccatcttggtcaggctggtcttgaactcctgacctcgtgatccacctgcctgggcctcccaaagtgctgggattacaggtgtgacccactgtgcccggcctggtaattttatttttttactaatagtatttaatctttttttgatgtttagtatgtatgacttctcccaatttttggatgcagtctctgcagaagtgatcggcagttatgttcagttttggagctcctagggtcaaagtacttgagttcaaattttgcctttccactttctatctctgtgcctcagtttcctcatcagtaaaatacagattattttattaatataaatatgtaacaatacgttctgggaattaaatgtgatgtttaaaaaaaagcaaacccacactgcattagcccagtgccaagcacataagtgtttaataaagagtaatgatattattaacacacttgaaatgtatcaccccttcagttaatagaatggtaaacatgttaggatgcctgcctagaggatttagcagaaaatgctttgtaaatgttctatatctgaaagtacatgttgatg

SEQ ID NO: 587696 - DNA, 4001 bp, Homo sapiens
ctggatccctgggctccgaaaagccacggtcaccagcacattcaaacagatgccatcactgtgatctcggcccaggtgctgcagtccaagcaaccccttgatctccaccaccaagtggtgcagggtcagacactcctgcagcagccgcaggacggccatcttcatgccacccctctgctccatagggtcgaggccacaggcagtgacaggcaagtgaggcatccccactgtgcccactaacacccacactgtctgggcgctggtaaaggtagccacgagccgctggcagaccagatcacagggtagctcttggggcagaatgagagggtgcctggcttgctggcgatactgggcggctagttcaaccaggtgcaggatgtcatgggctcgcagcggagtgggcagggaggtccgtgggtaccaggcagcctgcagggactccgcatcggcctccttggaagtcttgagaattccacctgggggagatgtgggggatggggcagggagggtctgtgtggagagaagtgcagctctggcagagtcaacagacatccctgacccaggagagaggcccccagcccaaaggctggaatctgcccatgccaggctgtgccagccataacaggactggctgtagaggggctcacctcaccgaggagctgggggaaaggtgtcaactggccctgttcacactgcctccaggtgggccatacctgtggggcgagcgaggaacacgaagcggacccaggaggggccccgctcctccacggacagcagtgtctcgggctcacagtgcagccccgcctcctccttcacctcccgctgcagcgcctccacgatggtctcccctggctccattctccccgcaggcaggtaccacgacccccggcactccctcttggcctcctggatcagtagcacctcatcctgagaggagagaggatcctcacttcctgccacagccttccctcgccccgggaccagggggcatctcaaacacagtcgcccaagactcccctctgggtggacactctcaacccagctagcgctccaggagacctgccctcgtgtcgctgggggctgcagccctctcctctctgcaattcgtctctctctggatttaggaagacttccatttcaggaagggctgagattcctggaagccgcttcaggggctggagatgaggccccagagtgagggtcaccatgtgtctgtctgtcttggattgatttgcgtctgtacctgccactgtgtatctctcgcctccaacggcgtggtttacaaactgtgatgggtcctcacactggggtctggcttgaaacacgacccccacctccgctctgtacaaccccgccctatggccctggccccgtctagttgtcattacatcgcccactacaggcatcagcaccaaaggcctgaaggtaagccgggattgagccactgctatctgaggggccctgggcactccgctagactctggggaagggaaggaatgaggcctagtcggatgagacaaacaggccccgggcctcagtttcctcttctgcatatcgggacgaacgcaggacacagatgcgagtgggagtgggagtgctttgcaaaactgggaagcgccacgcacgcggcagcgctggctgtggccgttgggtcttctgtccccacctgggctggctgcgcgctcccgaggcccggcgggcccgggggcggccgctcacctgctcgctgaggaacacggccagcaccacgtagcacacgttcttccgcagccgcacgggcgccggcggctccccggccggcgccgagtcgcagctgtgcacgctggacccctggccagccagcacggaagccagcgcccccgccaggccctccgaggccatcgggtcccccggggggcggcgggccggatcctcgcagaccgactgagccgagccgcgggctagagtgcgctgcggagcccgctcccagtccctgcggcagcgggccgggagctcacgagaacgcggaagcgcacgcgaacgcggaagcgcacgcgagctctggccgctgataggctgcgcggcgccgcggcctgcccggattggccggcccgcggcattcaccgagggggcggggccgcccggggccgccctggaactgggggggcacgggtccggagcccagcggaccccgcccggcttctgccgcctgtcagtcccgtgcgctcgggacgtctcccagccgccacccgctcgccaactccccgagcgcgcactggtctgcaggagctccgacggtgacgtcatctttcctgcagggcgcgttgcgccgccggggtaggcgacggtgacgcgacaatccggtgacgtcacggaggcccggggccgccccctggaaccactgtcccgctgttgccgtaaacacacaatggcattgccggagttgatcatatcccaaatacctttcttctcattccaccaaagagttataaatgtcacatggcccgtggggtgggggacataaacccctgccttgaaggagattctgcaatagttggagagatggacggagtcctagatgaggagtcagctgagggttcgaggctaagtgctaaatgcttggtttgggcaggaagagtgacaggcgctggaaggagggagggggcagggctggggatggcgggaggggtccggggctgagagaaggctgccgtcagccggcccaccctcatcagtgtccctctgcctaccgcatttcccacgcagctcaaggccctctctgctgcagatggtgcgccctgggagggcgggggtggggccctgctcctccatccttgtcgtcaccctcccacccagcgtgcaggacctggcgcgtggagagcagggtgggggtggttgtggcgagcgcctgctcctctcccagctcggcctttcctccttcaccccacctcagcactggaaggcaaagccagctggaagggatctgcgaagcaggccgtctggctcctcacctggcagaggccacccctttcctctgcctctgatagttttgtgcgcctccctgctagggagactgtggcttggtggtgtggacaaagctcaggacctgcagccagatggccagccactgctgactggcttgctctgtgctcctgggtgagctgtgggcctcaattttcttatttgtagagcaggatcatagcaattcttcttttacaggggtgttgggaagccacaacaattggagaggagctgtgtggattgtccagcactgggcaccgtccccaggcagcccaccaaccctcaggggtggtccctctccaccatagctcttgctaccacacgcaaggcctgccctcatgaaatgtgacttttgttatcccctagagtcagggtttcactgtgttgctcagattggaggtgcagtggcgtgatcacagctcctactgcagacttgatctcttggattcgagtcatcctcctgcctcagactcctgagtagctgggactgcaggtgtgcaccaccacgcctggctaaatttttaatttttaattctttgtagaaacgagggtcttgctgtattgcccaggctggtcttgaactcctggcctcagtgatcctcccaccttggccttccaaagtgctgtggttgcaggcatgagccaccatgcctggcgaaatgtgcctgtagagctgccttagaactggactcaggaacttcagcaacgcaggatgcatctctttaggctcctctcacctgctgatactgaccacaggctccctggaggcagggccctgtgttaggctgtgggatatcactagaaggcccatgaattttgaggcacttgctgaacgccgctgggccaggccctatcatggacctctcaccttccaaataactgcaggcacaggaccccaggactgcagagcaacttgtcaacatatttgctctgtgtgtgtgtgtgtgtgtgtgtgtgtgtgtgtgtgtgtgtgtgtcttgcggcacacacatgtgtgaatc

SEQ ID NO: 587697 - DNA, 4001 bp, Homo sapiens
catctcaaaaaaaaaaaaaacaatctttggtcaagttttttcttgctctcacaagaaggtgagctgaagaatgaaagaaggaagaggaggagactgttaatgaaatgatagaatgttgatgaaatttagaatttatttcctttctctttgagtttgggtttaggtttaagtaactttggtgttggcaacatttcctaaccacctcgttggccactgcactgctcttccaaactagggatgtcccaaggcagcaatttaaacacattagctcagaagcaaaagtgaaacaagggcctccaaatctctaaaggaaaagaggtatgttttcagcattaacacatcggctaatgtgttcagaattagaaatgtggccaccagaagcagtcgtagtagaagggaggctttaggatgacatgtttttctccatctttcttccctaggtaaagaggtaagcaaaataagcagatattttcataacgtactttagcagattctagcgaaacgaatttgaatcttctcatattgctctcccaagcttgttaaagctaatgaggcataagatgacacttccctccttatcaggaattcatacacctgccagcaatttctgcaatagctgttttcttttgggaggaatgattaatgacttgcctaagatcacactgttctgtaaaattcaaactaaaacctgattctccccatttctagcccactggcctttttacatagccttaaaattcacttaaacagcctgagcatggtggctcatgcctgtaatcccagcactttgggaggctgagaggagaggggatcccttgggcccaggagcttgagaccagccttggcaacaaagtgagaccctcatctctacaattttttttttaattagctgggcatggcagcatgtatctgtagtcccagttattcaggaggctgaggcaggaggattacttgagcccagaaggtgaagattacagtgagccatgttcataccactgcactccagcctgggtaacagaccgaagcctcaaaaacaaacaaaccaaacccccaaaattcacttaagcaaacagaaaagtaaaattcactttccctcaagaaataacttgctttaagaaaatcaaaggagagagaagagacaaatgtcccatatacagaagaattccaaataatttacgtagctactccatcctcaaggaggtagaataaaactccctgctccttaagtgtgtgctgtgcatagcagcttctttccaaagagaacacggcggagattggagcagggaaaggatcaccttatagcagagaaaccagacaagcgctgcctctaccaggtggtcaaggtcaacaccaacagtcctaaatcatgttgacaatattatcccttgatatgatgtgatgagaacagcactttaactctgggactccttccccaaaacccataactccagtctaataatgagaaaaacatcagacaaatgccaataggagaagcctacaaaatacccaaccagtactcctcaaaactgccatattcatcaaaaacaaggaaagtctgagaaacaacgctacagctaagaggagcctaagggaacataactaaatataatgtgctatcctgataggatgccacagtagaaagcagacgttagataaaaaccaagaatctgaatcaagcacagactttagtttaagaataacgtatcagtatcggttcatcagttgtaacaaatgtaccacactaatacaagataatggggaagttgggtgggaattacatgggaatgctctaaactatcttctcaatattcctgtaaactcaaaactgttctaaaaattaaggtccatttttaaaaaatcaaccacaagttacagtacaaattacataaaagaaacaacttaccagatgtcactgaacagaaaaaaaaaaaaaaagttctggtttggttacaggagtccacagaggagatggtggcagcttctccttggttcaggtatttggaaccagctggggtacgtagccctttgggccacaatcacaaagccacgtttacacagcagaagtgaaaccaacttgccatcagggagctatttaccatggtctcctcccacagatactgatttattctgtcttctttcacttaaatctaaattcaccaggcacggtggctcactcctgtaatcccagcactttgggaggctgaggcaggcagatcacttgaggtcaggagtacaacagcagcctggccaacatggtgaaaccttgactctactaaaaatacaaaaaaaaaaaaaaaatcagccaggcgtggtggcagaaccctgtagtcccagctactcaggaggctgaagcaagagaatcacttgagcctgggaggtggaggttgcagtgagccaagatcgcgccactgcactccaacctggatgatggagcaagactacatctcgaaaaaaaaaaaaatctaaatggtacatgaaacggggatcttgcacccttctctgccatgttcctacaagtagacagatgtcttttttcctttccaagtgcatcactgcatccttccacagcatcttttctctgagggtgaacaatattcagatgactggttcactggagcagacaggaaaaatgccccagttccaagacagacaaagcactggctccccgacacccaactataagacatgactgggagagatggaggatatgagataataaatataaagttattcttgacccaaagtcttaaaattcaccaaaaataacatttgccaaaaataaaacaacattggattgtttgagtgtagaaatgagtgatataccgctttacacctctttctggaacttaaattttaaatccgtatatttttatgtctttatttagttagagacaaggtcttgctctgtcacccagcctggagtgcagtggcgtgatcatagctcacagcagcctcgacctcccaggctcaagccatcctcccacctcagcctcctgggtagctgggaccatggtcatgctccatcacgcccatctaattttaaattcatatttttaataaacccagaaaacaaaaatttgaaagtgctgtccaggagagaagaaaataaaacccactccactttgctgtgtctggcaacccaaaccatcacatcacatacagggaaaaagttgtcccttgaaccctcagcttcagggtgtgtgttaccttttttttttttttgtgagacacagtcttgctctgtcacccaggctagagtgcagtggcgccgtctcagctcactgcaacctccgtcttccgggttcaagagattttcctgcctcagcctcctgagtagctgggactacaggggtgcgtcaccatgcctgactttttttttttttaattttagtagagacagggtttcaccatgtttgccaggctggtctcgaactcctgatctcatatgatccgcccaccttggcctcccaaagtgctgggattacaggtatgagctactgtgctgggccaagggtgtatgttacctttaaaggccaactcagtcattaccaagacaaccctcagtactctaggtatgtatttagtctgaagaggggattcagaaggtaaagaggtcagaacagggaaagaattgaagataaatgtttagactgtggtcttaaaaactgctttgaacttttggcaagatgacgtccctcctccataagaaaaccacagaaacaccaggctaaagttcagaacaaagaaagtcagcacaaatgccatcctggatgctgagtcttatactgatctctctaggcaaaatcacaccttacgcttacattcatgtcacgtgtgctcagctctccctctactggctatttcttagcttcaacagttaaccacaaatgctactaaattacttaattattaaaattaattttgagcatttttaaagcttcctggggcaaggcccagtggctcacacctgtgatccctgcattttgggaggccgaggtgga

SEQ ID NO: 587698 - DNA, 4001 bp, Homo sapiens
catgttccattacctccttgaaacatgttgcttgaatgcaaatgagccaaaatgactttattagagacataattttgactatgctctaatttatttttgcaataagttataaggaggtatgattgggtgttcttcgataatggggagagtttcagtaggggaagatgaaaaagtcctggaggtggacagtggcgtgattgcatatcaatgtgaatgcacttaatgctcctcagctgtacacttaaaagtggctgacatggtcaatattatgtatattttaccacaactttttaaaaagtaagtaataatcttcatgaccttattcctttaaacacaacatttcatggattaggtcattctttgtgtcaggtgttccactgagcatgccccacttgctgtctggtgacaaccctccaagactttggctatcaagacgtctcactttctagaccaggaaactgggctcagagggtgagtcacttgccagggtggcccttgcccagaagggggcgctctggcaatgaccagacccaggtgggccagtctgacttgttctggctccaataccctaaactgctaggccggtcctttgagacaaactaagcattccagtgatgactcactgcgtaactgtcacaattatcggtagtacttgcttgggaagacccttagggtggccagcttcttgctagggtgtggtgaaacacagcaggtgacagcttccttgctgcgcacaaagaaggaaagtcagtgccagctagaaggtgccagttagaagcacgtggtcagccctgggcaacagtgaggatgacccgaatctggggtacgtgcacattagggtacgtgggtgggatggtgtggggctgcttctgaaatccagtatcctcctgttggccaagtcaggcgcccttggctgtggggctgtgtctacctggaggaaagacctccttctcctaatttgcccaaggaagtctctggggctgtcgtggcctcatgggtcagtgctgtccttgtgggcctgagaaggctcccgaagcctcgccttggtctgcatgccaggtttggagtcccggctcccctagctgtctcccaatggccggtctcatggctgcatagccagtgtctgagcccaaggccttgctggtcggacagacctgggctggggtcagggagttcaggctctgccttttgcttgtcgagtgccctgagccaggcactgaagatgcctggaactcattttcctgggcagcgaaatgcatataatggtgttttttcatcagggaatcatgagggttaaatctgatgagtcttataaaggtagaacaccatctccggcacttgctcagtgctcagtgaggactgcccataattaatgctgattgtgtttccacaccaggtgccgtgggcggggtcattgcccagggctatgtaggatcctcactaatgtgaagtggtggatttttcccccgggtaaatttgccaggtgctctctgtctggcattgcatcttttcacagatcgactcagagcaatttgggttttcagctatatcctggagcaacatccaggtctcagacagccctgagagcatcccctaccaccttatcctccattcatttatctcctcatttcccctccattcttctctcccttcctccctctttccctctctccctccctcccttctaccctctctttctccctccttttcttccttcatcaatttctcctacttttcttccctcccctccttcctcctaccctttctgcctctttccatctcccaaccatttccctccctccctcactcttttcctccatccctccctctccccctccttctctttctccctcccttcttctcttctcccattcatttccctcctttacttgctgtcttcctccctccctccctcccctgctctctgtctccccaaccatcaggaataacagatgcctaccgtgaaggctccactggagtgcagctggatgaatgatgctagggtttgaacaggtgcagactgagtcctttataccccaaggaaagacccttagccatgtgatgcctctccccactcctcacatcaagaaggaagcctttcatgaatgttggcaggtgggctgcctctgaagggaggaggcatcataatactatagcttggaacaggtgaaggctccatattaagaagccccatcttgagcctcagaggagacctcaggctctaattagagaacaatgggttccctgttctaccccacctcacctcaaaggctaggaggcccatggattatgtctcagggtcatcatgggaactctcgggggatgaaagactgatgaaagtcatgtgggctctcctgcaagataaagggctggctttgtctggtctagttcattctttagcaagaggatttctagcgtgattcttcttatatgttcttggcctcagatctcggaatttgatgcctctttcctttagggcttttctgcccaagctgtggggtagggtgaggtggggctttataatcagacacccaaggttcctctgccagccctgctactgagtagcagtgtgaccttgagtttgtcactgctcagctttagcttccacatctgttaaatgggcttaatcctactaagatttcgaggctgaagaaagccatatatagtgtgtggtatgggggctcattaagtcctagttctttttgtcacttcctcatatcgccttgtgaagggttttctttcctgattttgaaaggagaactggcatttattgagtacgtgtaatgtaccacaagtgttttataggattttgccctcatcatccctgcagcagcccttccattactgctttcataatcctaggagcaaggattaattagctccactttacagatgagaaaaaatggtgtcgttgaggttgaggcattgtagaagctcacgtgtaatggaagcattctggaatgcaggttagcctggctgtgaaccctctgagttgctcactctatggccacctcctgaagaagcaggactcctcaaacgattaaatcagggcacaattgagcctctatggaagaacccattgaagggcttcttcaaataagtaattactctcattcattgaggcttgtgtttgtagatcattaactattgttcagcatctcatgtgatttgaggaatgaagatgcattgtctgtaatattttctcattagcaccaaagacccaccatctctaaaatgactaagcccgtgggcatctatggctcagtgcagcaaaatccatcttttcagcatctcaagagcatagctgagattgttattatgctcaagagcataactgagattgttattatgcctgagcaatacaaaggcataacaatctacataggtatcttgttcgagacatttcatggggttttgagaaggatcattttttcccatagcttacaacagagtatcttaatcttagcactgttgacatttgggccaaattattctttttttgtaggagttgtcccgagcattgcaatatcgcaggtctctactcagctgatgccagtagcactccctaccttgttgtgacaaccaaaaatgtctccaaacattgccaagtgtcccctgggggccaaatcacccctgattgaaaaccactggccttcaatatccctggaaccttggccttttaccattctgttggtggaataaagtgagagtgaagttttcacaagaacccagacataagaggataaagtctgttctaaatgagagtttaaaattttagatttaattatgacagcacctaaatgtctcgttcacacaaacccacagcactagtgcacctgtgcagaaatagggagccacacgcacacacacacaaacacttagaaccatgcactggggccaagaaacaaacacaatctttctcctctctcccccttctcctccccctttccctctcctctttcccttcccctccttcctttccctctccctcatcttctccc

SEQ ID NO: 587699 - DNA, 4001 bp, Homo sapiens
ggagagtggatactgatctgctcacaaggaaaccttaacttggaccaaatattttaaaaagagtccctgcctcacagtgtgagcaatttatgtgacttgatgccctaagaaataaaaacaaacattggttcaaagagtatagatgaatttacaggtgaaagctcccaggctatgagggaggttcattcctgaccattggtggctggtgacctagacaataattatcctttttttttttttttttttgagacagtctcactttgtcacccggtctggagtgtagtggtgcaatcttggctcactgcaacctctgcctcctgggttcaagtgattctcctgcctcagtctcacgagtagctgggattacaggcacgtgccactacgcttggctaatttttttttttttttttttttgtatttagtagagatggggtttcaccatgttagccaggctggtctcgaactcttgagctcaggtgatctgcccgcctccgcctcccaaagtgctgggattactggcatgagccaatgcacccggcctcctattgctttttccaaagaaacatcactgtcactgttgtcaagagactctatctatctatcatctatctatctatctatctatctatctatctatctatctgtcatctgtctatcagtttttctgcactttgcttgtttgacttaatacatcaatatgtaagatgcttcatcaatcctttctatatttacttattattccagtgcatgaatgtattatttatttaaccagggacagcactttcaaccatctttttcatcaacagtaacagactaaatggcatatgtaaaaagttagaaaaggaaagttttctccaggcaaaaagaaaatataatctaaaacaaaaatttttttaaaaaactgactctttttaattacccaattcaattaaaaagcctttcaagtctatcctgaaagctacaactcagtgccatagtttatttgcaagacctttgctagagttagaggggaggccaacatgatagacctaattccagatacaaggtaagtctttgcctggagtggggggataggagaatgatattcccacaaaaccaaggcaatgcctctactgttcaatttgctctcctgcttgtaaagcctctggcacacattaaggatttgatctattattattacttctcctgtagtcatttctgtaagtccaaatatactcaaatcactttactcataaccaggaaaaatgtttagtttgctgcttccaatggctttttaatgacaccccctgtttcttcccttcattaaagccgcattatttatcatactggcattcttgctataaaccaccgacgaccttgccaatcgacatcattacattgtcttttgagaaccctacaattcccatcatggactcatttactcttctttccttaaatctttcctaagtcaccagggtcattatcctgaacccttttaatctttgttcaactattgattgtcacatatttttccttattccaacttataaggctaatataccgactataaaaatttaaaaataagttattttacttggcaagctctcgcttctcatcttctatggctctgatggctttcctctccaaacttctgagagatggtcgcagacagtaaagcttataatcacacaggcaacatgggtagagatcacacaggccgcaagagcgtgatcgcttggaatagcacaagcagtacggatatgggtgcaagtcacagcagcaataggggtgcatatacaagtcgcacaggcaccgtgtgctaaattcgtcgatgcatctcagttgccttagttctctgtccaccttctttatgtcccttctgacactgtccaagagacaactcagtgcagccattatggtcacacctgattgttctgtgagtacctttgggaaatggcactccgggaaaaaatttgttctaagcccttctcagaagttgcttttaaaaataaatgaggcacacatgattcacttactttaaagcttgtgttctatgacctcaccaccttctgaagtatgtcatagtcttctggttaccatgtgaactgtacacagtcatggtctccagagaccatcctcagagttacagagctactctcagaaccatactcgtgttgagatttcactcaccttcaaggaggatgggtctcccaagcgagcatagctcatcggggtgcatggggctggccactaacatccttgccttgtgtgtgctctggggaccagccatggctatgactgtgtgtttgttgaacttggtgcaggcgaaggcaggagctgcccacgcctttctccatgaccttctagctctagccttgattggaagcttggccttgctccttttgttctagaattcattctgtctccagacaggtagaatataaagaatgttctcatcattctcctcctaccaagtcatcctcaagtcagccattgtccttgaccttctgagttacaagtctctgagtcctgcccattctgcgccagctgtggtcatggctgttcgggaacctcatttctctactggttgggggtcctgtccttaagctcccatctgtcagtcctcgggggcctgtcctggggaactacctcccatcaactacacctttggtcttgcatccaagcctccggatgtcttgtccctgagtgcttcccaaatgttggtctttgatgttcttgtagccaaccgcctgaagatgctggaagccaactgcctgaaacccccgcttcggccagtttcctttactttctgttcagttaacatcctagacctctgattcggcctcagatttggctctcggtgcctctactcctctggtcctttcacctcaaactgcggtccagctctcgagtctcccttgtatgaactagagctcaggtattgatgacaagtggttggatgtgacactggtgagggagacaagggccaggtttgaagggacctgtagccagactaaggactctgaactttattttgagcccaacgaaggattgttgattttcttttcttttgtcagaagtgagacagccacactgaaggtaagttgctagggacaatagtagtggggttttctgctgcaagacaagaagagacaacaaaaatctggactggggatcatggctatggggatggcaaggaggaagccaatgggaaagccttcccccacctctgcccaggccccatctaatccattttccacattgtagccacagcgactttcatatagaaatctgtcattcctcaaccttccccacccatcatcccactcaccttaaaagtcttctctgtcctctcaaaaaaaggaccaaaatctttaccaggtgctgagcaatggggcctctcccacttccccactctcctctcccatcctagtattattgcaattcattacccctcagccacgatggccttcctggaagaccactcactttccagaggccgttccttagtcccttgaaggacattcctcattccttccacctcattcagagctcatacacaggacgttctgcctgcttagaaattgaactccccacctatgactttcatccatttaattcttaaggcaccctttagatctccccctttcttggggaagccttctctgtctcccagactaaacactctcttaacttaggatacatttccttcatgatattgtttccccagctggactgtaagccacgagggcaaggaccttgtctatttttgcttcgcagtagatacctaacacaatgcctggcacatagcaggtgcttgaaatgtactcactgaatgaccatctgggtgaattcaacaggatttagtgaacagagtgaggatggagtgagggaggaatcagtggtgacttccagctttcaagcttggcagactcttggtgccactgagataaaaataacacagggagaagagtaagtttggggatttggtgaacaggtggtgctggtgacaactttaaggt

SEQ ID NO: 587700 - DNA, 4001 bp, Homo sapiens
cccagtggcacctcgtctcccaccaggcccggcacctgctcccgcagcccacagccccacctcactcacgtgtacgagtgcatgagcaccacagccaggctgcggatgcctcgagatagcagcccctccagcttcccacgcagggcccccaggtccacaggctgctgcacttccagcaggtcccccgtgcggccttccagaaaagcccaggaggccccgttaaaggccagcaggaccctccggccccaaatcccacagcagcggcggcacacacacctttcacaggcgtcccggtgcccgcctctccacggtgcagcaccacgcgttcgtccacctccagcacctcttcatacagcacctcaggcatgggcacggcctgggggcgggcagagactcagaagaggcccaggcctgagggtccaggccggggtcctgtgtgagtgggtggtacaggtgagtggctgtgtcccaacaggccggtcggcaggcccaggagagtcatacctggcagccccagcaaggctcaccaagggggcagctctccaccccctaggcagctgagtgcagccaactgctccacccccacgaaggcagcttcttccggaaacgcagcagtaggtgcggggttccacccctcctctgcctgaacagggtagcttgggtggccccacaccagcatccagggtgggcatggcggcaggcaggaacagggcatcctgtgcccactccgagggctaggagaacttggggtcccactgggaattcgggagcttcctctttgtcggctggtgcccatgagccatcactaatccaacaactgctctccccacagggtcaaggcatccctggggggtgtacaccacacagcctggtccccagccaacatggagctcaccaggtcaaagaggtccccacgggcttgggtgccaatgtgcagcaggtctcggaagccacgtgtcaccagcagcgccacccgctcccccttccgctccagcagtgcgttggtggccactgtggtgcccatgcggatgctggcgatatgactggagtccagcggctggtcccggggcaggagcatgccggcctcctggggaccacgtggtcagtgtggggcttctggccgtggggtccctgtccacccgctccgccctggcccacctgctccaggatgcggcggatgccttcggttggcgcgtccgcatagttggcagggtcctctgagagcagttttaagacccgcacgtgcccccctgggcactgggcaaagacgtctgtgaaggtacccccacggtcgatggcaaagtggaagcggccctcggggctgcccatggtggtggggctggagtcccacaggagctcttcagctggtagccctggaaaaactggacggaggcggggtcagcccgggctcacctgcgagtgggactagaggctccccagccctgcgcatgcggggggttcctgagggagagacccacgggcacgactctgggaagagccagagccgcaggcccagctccgagggcagcctgggcccgagcgagagcctggccggcggtcagcggcctgatgcccccatgcccagcatcgcgcttctccgggccctggactgggccgaaacccaggcagcggagcaggcacgggaggtggggacgccgctggaccctggagccctcgggcggggtccctcagcacgaaagaggcacgggagtgcggggagggggtttggggcgagctggccgggggaccccacttcccgctttgctcgaccttcgacccaagcctggcgggccccgggacaggacggagcctgagcaccgacggggcgacccgaggcggggacgcgtgaggagcggcccgggaggcagcggggaaggggccgcggaggggaagcccgggaggcagcggggaagggccgcggaggggaggccgcccggcgcaggccccacctggcgctcggctccggctcggtcgctcgcggtcggctctgcctgcgctcccggcggccctgcccgcaccagcctcgcctcggggaggagcctacagggcccgccccccgcgccactggtcccggcactcgcggttacatcaggccgggcccgccccccgcgcctccgtcctcgccctgcgcttccccgggccacgggcgcaggatcaagggcaccttggctctgcggccctcgggtctccggcgccgggcctgggctcgcctagcgtgggcgccccaggatcccacctccaggtgtcctgggcaaggggagctggcagcccaggccacaacagggcttcccactggcggacgtccttccccgtggagggggcgttgaaggacagagaggagaggggaggccctgcggccttctctaccagccccagctcccggccccgtgggcctctcctgtgcggtatctctggccttcttcaccgggtctccctcatctccagccctccttgtgccagaggcgtgtgaaccagagcaactccatcttgaataggagctggctaaaaagaggccgaaacctactgggctgcactcccggacgattaatgcattctaagtcacaggatgagataggaggtcagcacaacacacaggtcataaaaacctgtatctcccagcccggccaacacggttgaaaccccctcgctactaaaaatacaaaaattagtcaggcatgtggcacgcgcctgtaatctcagctaccgggaggctgaggcaggagaatcgctggaacccgggaggcggaggctgcagtgagcagagatcgtgtcactgcactccagcccaggcgacagagcgagactccgtctcaaaaaaaagaaaaaaaaaaaccctgtatctgataaaacaggttgcagtaaagaagttggccaaacctaccaaaaccatcgtcctacactccccgcagcgccatggcggtttaccagggccacagcaacggcacgaagttaccctatatggtctagaaaggggaggcattaataatccacccctcgtttagcatatcatcagaaataaccataaaaatgggcaaccggcctggcacggtggctcacgcctgtaatcccagcactttgggagaccgaggcgtgtggatcatgaggtcaagagatcaagaccatcctggccaacatggtaaaatctgtctctactaaaaatacaaaaattagctgggcgtggtggcacgcacttgtagtcccagctacttgggaggctgaggcaggagaatcgcttgaacccaggaggcggagcttgcagtgagatgagatcgcaccactgcactccagcctggcgacagagtgagactccgtctcaaaaaaaaaaaaaaaaaaatgggcaaccagcagccctcggggtgctctgtctatggggtaaccattctttattcctctactttcttaataaacgtgctttcactttaggcactcgccctgaattctttctttcaagaaatccaagaaccctctcttggggtctggattgggacccctttcctgtaacatttgtgccaagggcagtggactccagctccccatagacagggatggggcccaggatcaggcacttaggaacccctccccatggatgggctgctgctcatgtccagatgactgccctgtaagtggcacgtgcctgctgtgatgccacccccagaccccatgcccatggacctcctagtgccttcccatcctgaggcccagctgaggccccagatgatcatgccacgcccacatgcaggagccccacctgcctgctctgagcagtccgtgggaagcagctctggtcagcaaccccacttcagccgaggaccttccccaccagccatacagcctctgcctggccagcccacactcctgcgggactgccctgccttctggtttccacccatccccagcacagcctcttggtcctgcctgtcagcccaggatctatcaggagagattcccacaccccacccacccacacccccaccatctgctgccctgtacgcactcaggct

SEQ ID NO: 587701 - DNA, 4001 bp, Homo sapiens
aaagtaaaaataaaaataaagcagtattttattatgataattttccaagagaaacatttatgctaccattcatgatatggttgttaaagttcataataaataaatggcctgtttcaaaactaaaatcaagcttaaaaaaaatcagctattcatcgtttcagagtccctagccagggtgacttgcatcccgcccttatttcatagagacttctcaaaggaacacaagcttcctactccctctcacaggtgtgttgacaaagctctagtgctcccagaaaaggaaacacatctatcttaagaaaagtgcagaacaaagttaggttttccttttcttgtttttctttcttaaagtcagaatcactttgcttaccaaaaaattagcatatatgtggatattgggatacttattattggaagttgacttgaagaaatttccacacacacacacacacacacacacacacacaaataaaaccttcaatttctcatggtgaaaaaaacagcgaagtagtttttgaaaatctccacaggccatgttttagaggataaatattatttactgatattcctaacaaatgggatgccatttgatactaaaaaggctcatatatgcatatcaacaacgctagagcatatatcaggttttgtttcataagccaaaacaccagtctgaggagtcccaggaaattcggaattatcttcagtgcattgggtgggcttgaaatttatcttaagaaatatttgcaaagggcataacaaagtgctccaaactggcgcaggcaaatggattagttcctttaccaggaacccctgaccctgttgtcagcaccctggcaccttgccctgcgcatagagttttcagcagaaacactgggccctagggtggggtcggggggttactctgaaatcttccagacgcccctggccgctcggattcgcctgtgtgaacctctcagcactccaccaaaaactcccagaaaatccttcacctcttctaggaagccaccctgtagcatttccaggatccttcacggaacagagtccccaccacctggctggctgcccccactgctgctccagtggcggggcctgaccctcactccctgccccgcccagcccccagcgctgcgctgtccccgcgctcaccggatgatcacgaacatgaccagcgagttgcccaccaagcccacgacgaacactacggagtagaccgccgtgatgatgaccgggatggccggggagatgtgcgcgggctccagctgcgcgtcctccgagccggcgctgccgttgctgtcgggctcggcccagccgggaaaccaggcgctgctgttggggggcaggcaggcgctcggggcgcaggtagggcccggctccccgcggaagatctggatcggggagtccatggtggggcgattgcagcaggaaggcgaggacaggcggcacctgcggcgctgcgggagcgaaagaaccggctggacgcggagaggcaaactttgcccgcgccctggccagcggcgctggggacccggagcctgcggactcccacccgggccgcaagtcgccgggggcaggacagggagaacggacttctcgctgcctttccggccagcaggcgcgccgctgggtgccagagaggggcgaagagcgctcgctccttctcccccagcccctgaggtgcctccctcaccaattctaggcaccggcccctggtggaactgtccccagactgcctgagtccccagggtcaagcccccttcccacctcccagcacggagctctacctagaactgcacctcgaaagcccaaagcttacctatggttcccagagacaggcgaaggcgaggttttttacgggacgccctggtaggtgctgaaccgcgcgctcacgagtcccgctcagctcttggcatcacctgctctcggaccccggccccgctctccgcccgagggctgctgttccgccgagcgcagcccccgcctctcagcgcacgtctcccactactggcggcggctctgcggggcggggcggggcgggaccggcgggacgcagccgggacgcggctgggcgctgggggcctgcgggcggagagctcgtctggtgcgcccgccccaggccggcaggtccctgccccgccccgcccgcccggagtcagcccccagctccccagcctcccagccccgcgtcccctccagccccgcaggctcgcccggcccactaactgcccgagcggcacaccgcctggtccccggccatgcagccttccccaagacctgagactgagccatttagatttagtaaaaaggaggagcatgcctatttagtgcaagtatgcacctggattttcatattgtgtctagaacttcttatctgcatagttcgcagtcaggaactacgcttattagaatggcccatccaaagaaagtaacaaaatgatccagttagaataagaccagttcataaaataatgacttaaaagacacataaatagaatatttccttgcgttctcttccattccgtctgctctaactgggatgacaggctgcagacaaactgcaccttacgggtattacctgaattgctgatagtatctgagaagggcaaaacactctccttacccgggcctcagtggtgctccagggaggtgacagtgtctctgttttacattaatccctgcagccatcacgttctcctcacttctccctcacagtagggctgcctccattatacggccgcgaatctgagcgtccgtaaataaactgtcaccatcatttctttgcaaaactctgctagtccaagggtagctgtcagatcctgctgagtgagagacattctcttctcaggcaaagggaccggcaagacacaaagggagcaagggctcagcccctgaggtgaaggttctgaaagggagtggggaagttccccttctccacagggtactggagacaggcctgggggagactgggggtttaggcacctcaatttccccagtggattcactgcctcaggctgacaaacacaggtccccactgcatcccacagctaatgtccatgccacacctggacacactaatgactgatacagcccttccctccatcagcggagggcagaagggggttcctgtctctttcaagacgccatgaccccaaagtgggatttgaccaccagcgtcttgccgcctggagatgaacaactcttttgagcagtgtaatatgaagagcataaggaaatcttccctttgttcaaccatatcccttcaaccctttcaaataattttgaaaattattatcaagtcttagagttcttttaagtctgattgcaaactgtcattgaaggatcacatctccttcagtaacacatcagacctgctgagacctcataagggcctcagtagttttatttcatttgagcactcttacctttcttgtttaccaaattaatggccaaaataaagggaagacaaaatgaacagagcattgagaagccctcaggtggctcaggttgccaggggaacccactcgagtctctaaatccaggaagtatggctgcttctgtggagtcatgctcttaggagtatgcaattttatcataatatcagataaaagctcataaaatagaaaggaaaagtaaactgctaaaatgctatatactgttacacactgatataaagcacatgtggttatacttggccattctactcaatgcaaacactatgcttataactaagtacatggaaagcacttttaaagatgaaaatgtggagatttttattggataatgctacaatgctaaggagcatcctgggtagtgggtggctttgacatttttgttagatagactagataacccaccagtaaattgcaattaactccctttcttgtggctccaacaacagatattgttgtgcagcaatgagtgcagagctggagggagcaacttcattagcttaagaccccagtgcagccaatggagtcttgctgagccgggatgcagctggcttc

SEQ ID NO: 587702 - DNA, 4001 bp, Homo sapiens
taccattcatgatatggttgttaaagttcataataaataaatggcctgtttcaaaactaaaatcaagcttaaaaaaaatcagctattcatcgtttcagagtccctagccagggtgacttgcatcccgcccttatttcatagagacttctcaaaggaacacaagcttcctactccctctcacaggtgtgttgacaaagctctagtgctcccagaaaaggaaacacatctatcttaagaaaagtgcagaacaaagttaggttttccttttcttgtttttctttcttaaagtcagaatcactttgcttaccaaaaaattagcatatatgtggatattgggatacttattattggaagttgacttgaagaaatttccacacacacacacacacacacacacacacacaaataaaaccttcaatttctcatggtgaaaaaaacagcgaagtagtttttgaaaatctccacaggccatgttttagaggataaatattatttactgatattcctaacaaatgggatgccatttgatactaaaaaggctcatatatgcatatcaacaacgctagagcatatatcaggttttgtttcataagccaaaacaccagtctgaggagtcccaggaaattcggaattatcttcagtgcattgggtgggcttgaaatttatcttaagaaatatttgcaaagggcataacaaagtgctccaaactggcgcaggcaaatggattagttcctttaccaggaacccctgaccctgttgtcagcaccctggcaccttgccctgcgcatagagttttcagcagaaacactgggccctagggtggggtcggggggttactctgaaatcttccagacgcccctggccgctcggattcgcctgtgtgaacctctcagcactccaccaaaaactcccagaaaatccttcacctcttctaggaagccaccctgtagcatttccaggatccttcacggaacagagtccccaccacctggctggctgcccccactgctgctccagtggcggggcctgaccctcactccctgccccgcccagcccccagcgctgcgctgtccccgcgctcaccggatgatcacgaacatgaccagcgagttgcccaccaagcccacgacgaacactacggagtagaccgccgtgatgatgaccgggatggccggggagatgtgcgcgggctccagctgcgcgtcctccgagccggcgctgccgttgctgtcgggctcggcccagccgggaaaccaggcgctgctgttggggggcaggcaggcgctcggggcgcaggtagggcccggctccccgcggaagatctggatcggggagtccatggtggggcgattgcagcaggaaggcgaggacaggcggcacctgcggcgctgcgggagcgaaagaaccggctggacgcggagaggcaaactttgcccgcgccctggccagcggcgctggggacccggagcctgcggactcccacccgggccgcaagtcgccgggggcaggacagggagaacggacttctcgctgcctttccggccagcaggcgcgccgctgggtgccagagaggggcgaagagcgctcgctccttctcccccagcccctgaggtgcctccctcaccaattctaggcaccggcccctggtggaactgtccccagactgcctgagtccccagggtcaagcccccttcccacctcccagcacggagctctacctagaactgcacctcgaaagcccaaagcttacctatggttcccagagacaggcgaaggcgaggttttttacgggacgccctggtaggtgctgaaccgcgcgctcacgagtcccgctcagctcttggcatcacctgctctcggaccccggccccgctctccgcccgagggctgctgttccgccgagcgcagcccccgcctctcagcgcacgtctcccactactggcggcggctctgcggggcggggcggggcgggaccggcgggacgcagccgggacgcggctgggcgctgggggcctgcgggcggagagctcgtctggtgcgcccgccccaggccggcaggtccctgccccgccccgcccgcccggagtcagcccccagctccccagcctcccagccccgcgtcccctccagccccgcaggctcgcccggcccactaactgcccgagcggcacaccgcctggtccccggccatgcagccttccccaagacctgagactgagccatttagatttagtaaaaaggaggagcatgcctatttagtgcaagtatgcacctggattttcatattgtgtctagaacttcttatctgcatagttcgcagtcaggaactacgcttattagaatggcccatccaaagaaagtaacaaaatgatccagttagaataagaccagttcataaaataatgacttaaaagacacataaatagaatatttccttgcgttctcttccattccgtctgctctaactgggatgacaggctgcagacaaactgcaccttacgggtattacctgaattgctgatagtatctgagaagggcaaaacactctccttacccgggcctcagtggtgctccagggaggtgacagtgtctctgttttacattaatccctgcagccatcacgttctcctcacttctccctcacagtagggctgcctccattatacggccgcgaatctgagcgtccgtaaataaactgtcaccatcatttctttgcaaaactctgctagtccaagggtagctgtcagatcctgctgagtgagagacattctcttctcaggcaaagggaccggcaagacacaaagggagcaagggctcagcccctgaggtgaaggttctgaaagggagtggggaagttccccttctccacagggtactggagacaggcctgggggagactgggggtttaggcacctcaatttccccagtggattcactgcctcaggctgacaaacacaggtccccactgcatcccacagctaatgtccatgccacacctggacacactaatgactgatacagcccttccctccatcagcggagggcagaagggggttcctgtctctttcaagacgccatgaccccaaagtgggatttgaccaccagcgtcttgccgcctggagatgaacaactcttttgagcagtgtaatatgaagagcataaggaaatcttccctttgttcaaccatatcccttcaaccctttcaaataattttgaaaattattatcaagtcttagagttcttttaagtctgattgcaaactgtcattgaaggatcacatctccttcagtaacacatcagacctgctgagacctcataagggcctcagtagttttatttcatttgagcactcttacctttcttgtttaccaaattaatggccaaaataaagggaagacaaaatgaacagagcattgagaagccctcaggtggctcaggttgccaggggaacccactcgagtctctaaatccaggaagtatggctgcttctgtggagtcatgctcttaggagtatgcaattttatcataatatcagataaaagctcataaaatagaaaggaaaagtaaactgctaaaatgctatatactgttacacactgatataaagcacatgtggttatacttggccattctactcaatgcaaacactatgcttataactaagtacatggaaagcacttttaaagatgaaaatgtggagatttttattggataatgctacaatgctaaggagcatcctgggtagtgggtggctttgacatttttgttagatagactagataacccaccagtaaattgcaattaactccctttcttgtggctccaacaacagatattgttgtgcagcaatgagtgcagagctggagggagcaacttcattagcttaagaccccagtgcagccaatggagtcttgctgagccgggatgcagctggcttcagctcacttcactcagcagatattgcagagtatccccaagtggctgaagaaaaggcaccctct

SEQ ID NO: 587703 - DNA, 4001 bp, Homo sapiens
ctattttctctcttacatgaagcatttcctacacacctcttaatcacggtagcattgacatcattccaccagattctatctccagtgttaaaataatcaagaacccagaaatctccaccagggggcaaccaatgcgtatcaaagtttcccactttcctttagatttacttacgggtaacttatgggaaaaaatacttaagtacttccctttttaaagaaaaaaattatatgaattctacaaaattatggcagaaaatttaagaagagcagatgcttcccaactcattctaaagggccagcattaccctgattctgaaatgaaaaagctttacaaaatccaagatccattcctgactaaagataaaagaaattttcagcaaactgtgaatacagaaaactttctcagcctgttaaagagtacctatgaaaaaaattatagctaacattatacttaatgatgaaatatttaatatatttcataacaggaacaagtcaaagatgtctgctctaactaattctactcagcattcaacaaaatgaatatagtgaattcatactagaattttaaaagcaaatgtctttattcactgacaacataatcatctataaagaaaatcctacataacctataaaaaactgatggaactaataagttttgcaagtttacaggatataatgtcaaacaaagatctattatgtgcccataagctaagaataaacaattgtaaattgaaataaaaatgtcacttaaaagagcatcagaaatataaaacttagagataaatataaagtacatatgcataaagtacctgttcaccaaaaactacaaaacattgctgaaagaaattaaatgggcataatatagatgtagagatgtgttgaatttatgactcattttgaacaaggaatatattcatcatatattcatcagataagaattatgttacaggtctaataacattcaaatcaatacataatgtctcatagttcctgaatctaaaatatcaaagaaagaaacataaagccatatcatgtttaacgagaagggcttattgtatcatttatgagatcttcttgtaaatcactagctgtttgcatactctctttattgctgccttcatctccttattcctgaatgtatagacaactggattcagaaaaggagtgagaactgcatcaaaaatagccagaaacttgtccatctgtgaattagggtgtggccgtgtatacacaaacatgggtggaccaaagaacaaaaggaccactgtgctgtgagctgaaagagtggaaagggccttggatgaaccacctgaggaatgtttccaaacagtaaacaggatgaagacgtaggagattagaagtatgaagaaagtacccacacagataaacccactgttaacagtgaccatgaactgcaatctgtaggtgtcggtacaggctagtctgagaagccgaggaaggtcacagtagaagctgtccaacacattagggccacagaaggctaaattaacaagaaatgccagttggaacagggagtgactgacaccaagggtccaggcaacagccagaaatgaaaggcacattcttgggctcataatggtcagatagtggaggggcttacatagggccacatatctgtcaaaggccatggctatgagcagcaccatctccacaccaccaatgacgtggatgaagaagatttgagcgatgcagcctccaaaggagatgactttgcgctttctgaacaggtcataaatcatcttgggagaagtgacagagcaggctcctaagtcaatgaaggagagactggccagtagaaagtacatgggggagtgtaagtgagggtcagtggtcacagaaaacacaatgaagatgtttccagtaatgcttgccacatagagcacagaggaaaacactaggaggaggagctggatctcccatgaatgagtgagtcccagaaacaaaaactcagataccactgagtgattctctccatccattggtccagccaactgggctgtggctaaaattatgagaactaagaaaatggggaggaaattgtgattatgaagataataatatgtactaaaatcaatattgcaatgtcactatgaataaatagtatacagttattctgttcctcacatattaaaaacaaaaaatcaacataatattatcacaacatgtgagctgcaacctgatttaaacccctcatcaatactttcagtgtaatgtctgatctaaaattaacagattaggtaagaacaagattcctgactatccatgaaattcatcaggtgtttaaatgacctgtgatattaactattcctcatttccaacatattccatttgtacttatacatattcttataatttccttcccttcccagtttgcacccacaattctctgacagaaagtagacataagaggaaaacatgattaacagatggattatcactgcagtaagaggtgcctgggacggacttagttgaggtaggctgtggattgagagaatatagagactggggtatgtgaaatcggaaagcccacaactgtagcagactagagtaagtggactttcacaagaaatagaatcaccaccattatctaccacattttctcatgcttactgctatttaagtgcctcagtttctatacaatctttcacaattacgaagccctaaatggcttcccatcctgcaatgatttcataaggagcctatgccacctgtcatgtaaggctttttccatgcctaataaatatgttttggagggatttcaccagtgtttctgctaagatacatgcataaaatggacacagaggttgtgagaaatctctgcagtttctctttgtctatacacatgaaagtattgaagaccagcacttggattagttaagataatgttttaattcatcactgtctcctcctccccttggtaccagcttttatgttcattgcattccccacccctttaagtactcagtacctcctgcatggtaacctattctgatatttgatattatcatgcttaatttgactgaatccatttggatattttatctttaagaaatttgtagttttatacttttaatttatgataaaattagattaatatcaaacattaataagtgacttttaggaaggtatatgagctttcttattgacttcaaactataaagtacaaactgtgacactagaaatttagtcctttaacacatattgtatttatatgtgaagtggagggtgagcagaaaacagtgttatatttctctgtgtccagatggatactcacctcaatcattttcctatagtagaaagtagttcctgaaaacacttaatagagattattttagaagttgctgaggtacaaataaaactgctatgctgacatcatacttttttgcaccaacaactccagttcttctgacacaaaggaccatcttcctagtgccataatttatcttagaccccaaaactcacagaggcacacatcatatctctaatacttgctcaccaccactggcatgagtctctctctatcctcttctacgtgaagtgattatactgtcacctctggagctaactgtccacagtctcaagatgcacactttttacaaccagaagcctatggactgggtgagggagcagaaacagccacaggtactgcccatcagggtaatgtaagtcagcatgcaaacaactgatcagatgaacatgaatagcaaggtgctgaggcactgggaagagggaccggaaaactctataattgttgaaaaagactcaagcccttgggaagggaaatgcctatggaattatataaagaccattttatccaagttggtcatcattcagatgaaaaccatgaggcccagaaaagtaaactgagtttccagaattcacacaattgatagaataggaaccagaattcaggcctcttgcttcctattccagaaagacaaattgcaataataatcaaataatatgagcaatcatccagt

SEQ ID NO: 587704 - DNA, 4001 bp, Homo sapiens
aaaaaatactttagacacaacagaactgtttttgcaataaaaagtgtggtttattaatcataatgtttatctttggcagctagcttgtttttctttctgtccctccagaccaaaacatagcaaatactttgttttcactccctactccaaatttctgtgcacggcaggaagcaaatggtattcaacacccagtattagtcaaaagaatatgaatcctacactgtgcatcaaaaggtgtcaaatagctttcacacaatattttctgaaaggcatgttagattctcatgggctttatttagtttaacaagtttcactaggggaacctatttcctaaaagtttccatagtgaatctgataccttcaaaccgctgtctcagtagtcaacaaatttgcctaaaagttaaaatcaagcagtttattatatgaaacaatttttccttaatatccacaacctagagactcattctaaactcactgagaggttagacaagcttggattatcgctgttacaaaagaagttccaaactttctctatgccttacatctcttttactataggatgacgcttcttaacctcttctctgaatactgttcttaaatatacacaggatttacaagaaaactaattctattaaaacagtcataaaaagtaaacgcgatatatatatgtgcttctctgttgcattcaataaattcagtgatgtgttactataattttgaataagtataaacagtatttctatattaactgcaatgtgatataaacatattttatgatctctactgatgacagtcacagatactactgtgatttgttgcttatattttaactgaatattagtttttaaaatttagtgaaatgatatacctttctttccatccaagttcatgggttacctaaattgtatgaaacccactatttaggaaggcttgatcaaaatttcatattttaccagggaagaagtcttacatagaattattctggaacatcagtatatgtaaagcaaggtactaaagtattccctatgcttaaccattcttcaccccagggttaaaatcagtttctagtgtctggtctttccaccaatgactgaggtgttgaccaaatgtgctagatctagaaaacatacttttattttagaaatgtattatattttatcacccctaaaacctttccccataaggtgattgtaaaaccgcctcattctttaaatttctacaacacacacgtcttaccatggctaacatcttaacaaggcagaatctatttgtgattagatgacactgaaatgtagttccctaccttccttccactcattacattatttagaagactttttaagaaataatttttttttagggaggcaggcacttcgtagaacccccttcactaaaactttgcactactgggaagtctcagctcgccgtaaccgactcagtccggcctagccgatcccgcagtcccgtgacccgcgcggtccagagcgagaaaagggaacagcgcagggctccccggagcaaggaccccaccacaccgcaccccaccccacccccacgccaggcaggacggccgaggcgggaggacgctgcggtccaggcgctcgccctccaccccggtcccggcccgggccaggccaaaaagctcgagagcgcggcatccccgcctgctcccctcccatccccggcgaggaagtcacctgaaatgaccggccagggagcagcggcagcaccacacgggcatggagcgctgcgcgaggggcgcccgagcgcggccgccgtggccgcctccgcctcccccggcgaggctgcccgctcggggcgcccgctggctcggggtcgcggggtctgccgggcgcccctgcctcgcgcctcgccgttgccgcggctgccccggctctgtggcgccggagtccgcctccagatagcggcttccgctcctcgcctgcagggagccaggcgccggaggcgggtgatctcggggcgccgcgataggggcggagcggggcggggacgctgcgacggcggctgcagcggcgcgcgggcccctcctcgcaggtgcggctgcggcgggcgaagtctgcgattggtggagccacggcccgggcgaggggccgggcctgatggagccgaggctgcgcgggcaggggaccgaggtctgcaggcaaactgcgcggctcgaccggcggcaatcgagacctagacctcggtcagcgccccgccgcccctctgcgtgcgacttggtgaggccggtgggtgcgcgtcgagagggccgagggacgagcggaagagaagctgctgcgaactcgggccacccagatggcccggcggagttccctgcgtaaggcgcggcctcggccacttcgccgaggaccccgggaagggtcgagcttcccacgcctgagaacccacctttgggcatttcctcgcgctgccggggtgcagacgccgggagcttccgggtgcctctcccgctgacccccgcatcacagttacctggaggactcaccaaaccacaggtgcccgggacccgcccaccacgcttcttttatggaagtcccgcttccgggaagaggtcatcctcccctcttcatgtctctcaaacacccacaagtgtaggaattaccagcacgccgggtgaaaatccaggtgctcatcaggcccgccccagaccacaccggccagtgtggggaagggcaggaacccctgctgctttttaagcccctgcgggcgtttgtgatgcaatagggagttagaaaagtactcaatagtgagtgtcgttattcggtttgtcaaaaattaaaggtggggaggacaaaaatcaggagagattgattgcatctacttttctacggaaatgtctaactccgcttccaaaaaaagccgtaattatttttgtgcttcaaatatacgtttatgtttatatctttcaacataattttgtaaaacaaatgttaagttttactgaatgttgtcactgaacaaacttgtgatgagcaggtattttagagtcttggggtcttaaaagaaaatcataggactcagactgccccagagttatgcaatctaagagtatattaaccacttttaagtattatatgtttttctcttttttgagcttttgtcgatttgacacgttcatttcatttgaatgttggttctgaaaatgaagcatgtagttacttttccgttaacatacataacagcattttaaagtacctaaattccttttggaaggccgaggcggacggatcacctgaggtcagaagttccagaccagcctgaccaacatggtgaaacccgtttctactaaaaatacaaaacctagccccgggcgtggtggcacgcgcctgtaatcccagctactcaagagcctgatgcaggagaatcgcttgaaaccgggaggcggaggttgcagtgagctgagatcgcgccactgcactcagcctgggccaaagagtgagactccgtatcaaaaaataataataaagtacctggccgggcgcggtggctcacgcttgttatcccagcactttgggaggccgagacgggcagatcacgaggtcaggagatcgagaccatggtgaatggcgtgaacccgggaggcggagcttgcagtgagctaagatcgcgccactgcactccagcctgggcgacagagcgagactccgtctcaaaaataaataaataaagtacctacattcctaaaagcagtgcttaattctgcagcacatatactaaaattagaataatataaagattagcatggccccttcccaaggataacacgcaaattcgtgaagcgttccgtatttttaaatatatacacctactatgtaaccaaaaaaattaaaaataaacatataaattcctgaaagctatgccagtccaatccagataattcttttaatttttaatttttattttttgtgagtacatggtatatatatttatggggtacatgagattttgatacaggcatacaataagtaataatcacatca

SEQ ID NO: 587705 - DNA, 4001 bp, Homo sapiens
atgtgcttctctgttgcattcaataaattcagtgatgtgttactataattttgaataagtataaacagtatttctatattaactgcaatgtgatataaacatattttatgatctctactgatgacagtcacagatactactgtgatttgttgcttatattttaactgaatattagtttttaaaatttagtgaaatgatatacctttctttccatccaagttcatgggttacctaaattgtatgaaacccactatttaggaaggcttgatcaaaatttcatattttaccagggaagaagtcttacatagaattattctggaacatcagtatatgtaaagcaaggtactaaagtattccctatgcttaaccattcttcaccccagggttaaaatcagtttctagtgtctggtctttccaccaatgactgaggtgttgaccaaatgtgctagatctagaaaacatacttttattttagaaatgtattatattttatcacccctaaaacctttccccataaggtgattgtaaaaccgcctcattctttaaatttctacaacacacacgtcttaccatggctaacatcttaacaaggcagaatctatttgtgattagatgacactgaaatgtagttccctaccttccttccactcattacattatttagaagactttttaagaaataatttttttttagggaggcaggcacttcgtagaacccccttcactaaaactttgcactactgggaagtctcagctcgccgtaaccgactcagtccggcctagccgatcccgcagtcccgtgacccgcgcggtccagagcgagaaaagggaacagcgcagggctccccggagcaaggaccccaccacaccgcaccccaccccacccccacgccaggcaggacggccgaggcgggaggacgctgcggtccaggcgctcgccctccaccccggtcccggcccgggccaggccaaaaagctcgagagcgcggcatccccgcctgctcccctcccatccccggcgaggaagtcacctgaaatgaccggccagggagcagcggcagcaccacacgggcatggagcgctgcgcgaggggcgcccgagcgcggccgccgtggccgcctccgcctcccccggcgaggctgcccgctcggggcgcccgctggctcggggtcgcggggtctgccgggcgcccctgcctcgcgcctcgccgttgccgcggctgccccggctctgtggcgccggagtccgcctccagatagcggcttccgctcctcgcctgcagggagccaggcgccggaggcgggtgatctcggggcgccgcgataggggcggagcggggcggggacgctgcgacggcggctgcagcggcgcgcgggcccctcctcgcaggtgcggctgcggcgggcgaagtctgcgattggtggagccacggcccgggcgaggggccgggcctgatggagccgaggctgcgcgggcaggggaccgaggtctgcaggcaaactgcgcggctcgaccggcggcaatcgagacctagacctcggtcagcgccccgccgcccctctgcgtgcgacttggtgaggccggtgggtgcgcgtcgagagggccgagggacgagcggaagagaagctgctgcgaactcgggccacccagatggcccggcggagttccctgcgtaaggcgcggcctcggccacttcgccgaggaccccgggaagggtcgagcttcccacgcctgagaacccacctttgggcatttcctcgcgctgccggggtgcagacgccgggagcttccgggtgcctctcccgctgacccccgcatcacagttacctggaggactcaccaaaccacaggtgcccgggacccgcccaccacgcttcttttatggaagtcccgcttccgggaagaggtcatcctcccctcttcatgtctctcaaacacccacaagtgtaggaattaccagcacgccgggtgaaaatccaggtgctcatcaggcccgccccagaccacaccggccagtgtggggaagggcaggaacccctgctgctttttaagcccctgcgggcgtttgtgatgcaatagggagttagaaaagtactcaatagtgagtgtcgttattcggtttgtcaaaaattaaaggtggggaggacaaaaatcaggagagattgattgcatctacttttctacggaaatgtctaactccgcttccaaaaaaagccgtaattatttttgtgcttcaaatatacgtttatgtttatatctttcaacataattttgtaaaacaaatgttaagttttactgaatgttgtcactgaacaaacttgtgatgagcaggtattttagagtcttggggtcttaaaagaaaatcataggactcagactgccccagagttatgcaatctaagagtatattaaccacttttaagtattatatgtttttctcttttttgagcttttgtcgatttgacacgttcatttcatttgaatgttggttctgaaaatgaagcatgtagttacttttccgttaacatacataacagcattttaaagtacctaaattccttttggaaggccgaggcggacggatcacctgaggtcagaagttccagaccagcctgaccaacatggtgaaacccgtttctactaaaaatacaaaacctagccccgggcgtggtggcacgcgcctgtaatcccagctactcaagagcctgatgcaggagaatcgcttgaaaccgggaggcggaggttgcagtgagctgagatcgcgccactgcactcagcctgggccaaagagtgagactccgtatcaaaaaataataataaagtacctggccgggcgcggtggctcacgcttgttatcccagcactttgggaggccgagacgggcagatcacgaggtcaggagatcgagaccatggtgaatggcgtgaacccgggaggcggagcttgcagtgagctaagatcgcgccactgcactccagcctgggcgacagagcgagactccgtctcaaaaataaataaataaagtacctacattcctaaaagcagtgcttaattctgcagcacatatactaaaattagaataatataaagattagcatggccccttcccaaggataacacgcaaattcgtgaagcgttccgtatttttaaatatatacacctactatgtaaccaaaaaaattaaaaataaacatataaattcctgaaagctatgccagtccaatccagataattcttttaatttttaatttttattttttgtgagtacatggtatatatatttatggggtacatgagattttgatacaggcatacaataagtaataatcacatcagggtacatggagtatccatcacctcaaatatttatcctttctttgtgctacaaacaatctaattatacttagttattttaaaatgttcaatgaattatcgttgactagtcactctcgtgctgtcaaatactagatctaattctgtctatacttttgtacctattaaccatccccactctgccccttaattccccactaccctgcccagccttgtaaccatcattctattctctgttagttccgttgttttaatttttagctcccacaaataagtgagaacatgcagagtttgtcattctgtacctggcctatttcacttaaagtagtgacatcagttgcatccattttgttgaaaataacaggatctcattcatttttatggctgaatgctactacgttgtgtacataaaccacattttctttatttgtctattgatggacacttaggttgtttccaaatcttggctgttgtgaacagtgctgcaataaacatgggagtgcaagtatatcttaggatatactgatttcctttctttggggtatatacctatcagtggcattgctggatcatgtggtagctctatttttagctttttgaggaatatccaaactattctccgtagtggctgtactaatttacattcccaccaacagtgtacaagggtt

SEQ ID NO: 587706 - DNA, 4001 bp, Homo sapiens
cacactcccattgagttgctggaaatgtatgtcaaaagaagtattttaagtgaatgcagagatcctaaagtactttcgttttgtctagagctgagccttgtagttcccacactccctttcaggaaataacagcgatcatcatctgctgtcatttctccaccgtcccgtttcagaccactggttacttttaatcttgcaaggaaagaaacttaaaccaatgaaaagtcataaatatgttggtggagctgaggctacttttctttcatcagtcttcttcacaggaatttccaggcatgtggagaaattttgtaaaatttacttgactggctgtcaccaaggaagatgtgtacacacttatttcagttcagtgaagctttcaaaacattggagaaaaaaattaagaagtaacttgataaggagtttcgctctttggtaatggtaatattacactgaattatctaaaaataatatacagtcagggttcatctgctaaaacctgtgcactggtatatgagataaatgactgatggtcggataggtaggctcactgaatttcagcccaaaccacagcagaattttatataaattagagagctatagactaagtagatcaaagaagatcattaaaaagaaaaaaaattgttaaaggacagattgttagggccagactgtatcaggtgaatagagaaacggctgcgaagttcctgccccttcagagcgcctctgccttcccaaggagttaattaaattaagatgccttccgcataatctaggttctgtttctctgtgctccccttgctccccctgcgtgagtaattttcttgttctgcccaggactgcagtttgtttagcagagaaagtggctgtctgcgccctttcgcttcgggaaacgccagcccccttttgttctcggctaacaggtaggaagacagatccggggctccctccacaaacaccttttcctcgctccttcttcgtacaactgcaactcctttctcacttgccgtttctcaggaatccgagcgtttaagcccccggggagtttgcttttgggccccctcagtcaggactagaaggtgggaggagaattttaaagccagcacgaggttgacaaattaccgaggactgaactatttccctcttgaaatgtgccttcagcgtcgctggctgggcaggcaccgggtgtccgggcccgtccacgctgcgctgccgcggctgccccgggacaagtcgacccaggcttgctagggcaggagcagaaacaccatgggattgtggggtttgatctcagtgtacgtagaccagcttttataagaagtcttgctgaccgcttagattaaatatcccaaaacaaaattaagaaacagtatgtagaaatgtgtgtggttgggtgttagctgggagtcgcgtgccagggacccaaggaagtgagaaatacagtgccctgggattgcatccccatgatctattttcacatctgaatttggggcacaccagaccgagaatctgaacgcctcttacacccccaaacccttccttccaaagggcagctacagccccttcccagagcgaacactcacctcccgcagaaaggtcaacctgggcagccgcgctcagacccggtccaggcagcgaggcgcacagcttggaaaggtcattgagtccacgcctggcaaacttttttttccgcgcggagtcgcaggagtcgcggacatgatctggaggaccgcgagcagctaaagcgagagcagatccacgtcttcgtcagagtctgtggacgcggactgtgtaaagacccggggtgcttggggccggcgttcagcgctcgcccagaacctcgctcttcggcgaacctctcgctgtcgactcccggtgaggtcggagcccacagccttgcagggccatcaccctccagcagcaagcacgccgagctccgtccccgcccgcgtccctccccaggctgccccaggccgggagtcttgggctttagtagcggccccgcctccccttcgggcgggcgtcccgccgccgcgcggggccctcagcgccctggctccgcctccgcgcccggcgtctgctaatggtccactctgtttacttctgtttggatagcaactgagtcttaaaggcacaggtttgctcgaggtttccctgttatagagacgcagccgtaggtgactcagttcaaaactcacacacaaacacaatacccaccccctttcttctcgttgccacttttccttataccattagaaactcaacaactgcttctctgcctctcaaagactccacagagaatcccaaagggcatttagtatttttatttggttcgctcgccggcttaatttgcacatcttaacacattcaatacaactaccttcaccgtaaagtaaaataattcaggtctagactgcattctccagcataaatcactctttccccaattttaaacagttttgtacatacttttggtcaattatgactacatgtgtagtctgctttcgcctgctgttttctaaacgaagtttgtttacagaggtggcaattgactaatttagtaattattgcaaagacgcgtggaatgccccaggagaaatttcttccaatatttaagctttaatcggcaaatgttcatttcatacgcagtaaaccaacttggttaaaacagtgggcatctgcaacccattggcaaagaataaagaatccatctggaattggtgaagaacaatcatttttaaaatttaggaaaatgcgattctagtttttcaaaacatttacatcttcattcccagcaaaaattgagttcaatgttcagtctccaggaaagttaatagaattcaaagtgcagtgatacatttttcaggtccttctaaaggtttggtcttgtgtgagtgtaactgcaaaaagcacttcaacctctctggaataggggtgaccgagtgacaggaagggaatgatacacacccattttaagcagcttcttttcagatgtgatttgcgtgatcaacactaagcaaaaacgcccttcgtcccagacgagttgccagaggggatctgtgttactccacggcaagcccgcactttgaggacgtagatcttcaaccaagaggctgtacaattcaaaagtgttccgtcgaaagatggttttgaatgagacgccccaaaggacaattcaaaaaatctcaatcgtgcggggaagtagataaatacaagcagaggctaaaaactgtcaaaaggttaagcagtaattggggagtcaagcagaagctcccagatattattttattaagataaaattctttctattttatttatgccgaggtggagagaatttttcgttcctttggtaaaacataacaggggtcgcagattttttttctgtctttccaattttaagttcgcaaagattaaaaagtgagcttgaaacggagattcgagtgtttaatatcctgcagtacttaactgcttcaaagtagatttgacacacagaatggaagcagcagaatgcctaagcattcagattttttttttttttaacgttttgcctggtgggtcccataggggtgctttcattttagagctcagtcctgagcctcagctgcgggatgcctgcggtcctctctctccaactgcctcattcctcctgcagcttttctcagtttgggagatttggagggagctttctcttccttcagactccccaagcctcccactcacggggtggtgacctgaagagcgttcctacgcttcgcacttccttttcatcaaaggggaggcaactccccagcagcgggcttcacacctttcccgcccttaagtatgtgtacgttgggtgcagaaccgtttggttttcccgaggggtaggcagaatttccaaccccacgagctgctccctctttccgcaaacctcctaaccccggggtttttccataaatgtgtttacttcgtccacgccagcctgcgaagttccaaaatggagtctgggccacgccggcgttctg

SEQ ID NO: 587707 - DNA, 4001 bp, Homo sapiens
gaggttaaatgagataatacatataaaccaaagtatttgacacatatatattagatccaacgataaaataaatattagttaaaattatgaaagttaggatgctccaacttacccaagaaacatcagtaaaatttcattcattacaacttgttaataaagcacttttataacaaaaatgacttcacgttcactttcttgattcttacaaaaacctgtgcttagagtgtagaaatatttgtatcgtattatatatgtgggaaaatttgagctcagaaagattaagtaaccttgctcaggttacaatcccattcagtcgcaattctgggatcagatgcctggtcttccaactttgatttggtgaagcttcatcttttgggcaagtaaataggtaaagaagtatagcactttctttgccgatctcccttatagaaacacactgccctgtaaacttggtcacaaaaacattaatgagaagtgatgcatgagcataactaagtgatttcatttccctaccaattttatgattttagataataaacagtttaacagggccgggcacggtggctcacgcctgtaatcccagcactttgggaggccgaggcgggtggatcacaaggtcaggagatcgacaccgtcttggctaacatggtgaaaccctgtctctactaaaaatacaaaaaattagccgggcgtagtggcgggcgcccgtagtaccagctactcgggaggctgaggcaggagaatggcctgaacccgggaggcggagcttgcagtgagccaagattgagcgtgttttgcaaagcgagacaccgtctcaaaaaaaaaaaaaaaagcagtttaacatttaacagaagtggacagctgttttcaaatggtgtaggcaacgacaaacatttatttcacataccttattctccttagtagtcagcttcaattgctccagttcctctctatgtttctgttccatttctttttccaacttggccacatcttcggtgagttgcttcctcctcttcttgtcattcttgggaacagcattcttcatgccctgaattttggctgaaaagccattaaaatcattaagtcagacacgcaggagtaaaaggagatgagaaacaggaaccaataaggggatggtaacgggcgaagggtacagaaaaagtaattatggaagaaagagtcatcacgtaacaggcagctacagagagagaagatcccagataaagctgagaccaaaaaaaaaaaaaacttcattaacaaaatcttgaatatgtttcggttgtttggcgagataagagaaggaaaaaaacctgactgtagccagttttaaatctttccggtatcctttctgaacctcctaaactgaggcgggtccattcaaaatacacccattagggacaagtatcggtaactggggcaggtatagaaaagggaggcatcgtgggtttgggagcggaccaagacggcggcttctaggtattttcagacacctgcaccccggcggcggcgcggggtagggggcacgccgcaggcctcagaaggggaagcctctgaaggttggggaattaaagggccgccggggtaggtgaagagagaagaggccacttgctactaggggaagtctagggtgatccagataagtcacgccttgagattccccagaatcgacccgccacgcgcccttcccccagtcgcggcggcttccagattcccacttccttccgcctcaccttgcaactccttcttctctttgcgatgccttctcagcagctgctcttcctcatcaagctcttcggtcaataccgcctccatgacgaccaggtaccccagcacacgcgctagaagaaacctgcaccggctagtaggcaccttccacccctcaaccctcacccggggctccattggctacggctgggacccagccccgccttcaaggcggcaccggatctaagcaaagccactgcaaagacgagaaacttaaatggggtgctgcgcgtgcgcgctaccgtgaccctgccgtgatgggcggggcggcaggggaggaaccagactgcgagcggagaagcggagtttgcagcctcggaattggctagagcgccagagccgagtcagccataaagctacgcgctaggctcttggccctgacgtgaggcgcgcagagatggcgtaacgggaatagttttcaacgtctatttcattccctgcttcagaggacctctttaatctttgattttggtccctgtttctaagaaaagcaactgaaaaggtaagaaagaaaaataacgcattttaataaagccgtcgataattatcaatgggaatctttgggctgtttggggctgtgtggaattaaattatgtttattgtctccaaggtcgtaataccgcccctgagaaaaaaggagcagcgctaaataatcgagaaaatgcctcctcttgaaacggatatagagatggaaacaagatataagaaggattgagaatcatataatacaggagcttaaacacctatgcgcgatgataaagagggtactattagagcgcttggaaaataccaggaagttgagagagttaacagaagggcgcacgctggattggccacaaaatcgaattactgaagtaagtgcaaaacgacaaattgtcacagaatacagagaaaaggggaaaagaaattaagaggagaaaaagagagatctagagggccggtccaggagatacaatctatgcataataggaatacctgaaactgaggacagagcaagtggagctgaaacaataaaggatctacttgaaaaaattttccagaattgaagaacgaactagatctacaaatggaaaaggctcataggatacctttaaagtttaatgaaaagaaagcagcatctagacatatccgggtgacgtttttgaatttcaaagacgaaacattttacaagcatccagtcagagaaagcaggttacttacaaaggggcaaaagtcaggctgacctcagatttttctcctgcaattctaaatgccagaagacagtggaacaatatctagagtgttaagggaaaataattttgagccaagaattatatactctgccaagttatcatttctttacaaaggaaactggaagacattcttagatatacaggggttaggaaagtatatcaaccaagaactttccctgaaaattttgctgaaggatttactgcagctaacagagaacctgaattaaaataagaatagggaggcaattgtatgaaagaactgatggtatgcattaaaactagttaaggagcattaagtttaaattgttatgtatagggcattaaaactaaatacaaaaatagaaacataagctgggtgtaaaatttcagtttacgtttaaactggaagggcataccacatgttcaatatattggacaaatactgttttatttttagcatgtagtattgtagatacaaatacgcatgttcttaagctaaacctaagtaaaagggctttgtcactgtagatttgacaaataacattctaaatgtcaaatctgacaattggaaaacagtacagttttatttcccttatttttaagtatagcaggaaaaaaataacaagtttgtccatgttactactgatactgtaaagaaacttccaaatcactggtttgggagggggtggatacatcctcattttctgtacatgatgcatggggaaaaacagtagttactgcatcatatagttccaagtaaatcatatagttccaagtaaatttgacatggaaataagtgttaactacaaaaatagaatatatacattccaatgtttggaaaagaagtggtaaaaagaaaaatagcaaaaagacactaaaattagcaaaaagtagattgacagtacagatgacctataaactggttaaatagccctattacaattgaaattgggtcaaaaatcaatctctaacctgagatacatttgtataaaacaaatgatcaaagagtttaaagataatggaaac

SEQ ID NO: 587708 - DNA, 4001 bp, Homo sapiens
catacatgtggcaagcatgaagaaaaatgtgaaagtgctctccatgcccagagagtaggattagaaaggggatgtggcccctactgactccaagggacagcaaaaaaaaattaaaagacaaaaaagtaaaagaaatcctcttaatgtggcatcattaagatttttcttttatttgtatcaatatgtacatattttgtaatttgaatatctaatgaaggaaatgtaaaaggaattttaaacaagtaatttgggattggatttattttaatttttaagaaatctattaccaagcttctgtggactctaccatcatcatttactagctgcgtggagctggataatttgcttactcttttcttatctcagtatgctatcagttacaatgggaattataacaatacaaactttgcaggagtggttgtgatgatgccgttaacacaggcaaagcatacagaacagtgtgtagcctacattcaacaataactttggctttgagtagaagtggtgttgtatctgggactacttctaaaggaataacttgctgaggtttctggtaattctattggttctgtgactaaaccatattctatgtagctagctgcatttggctcacagctatgaatgcttttccttgtttaaatattgatggaagggaggcaagaagcactgcaagttatttacttataattaaacgaagagtcaaaagtgatcagaggggtaacatcagctgagggaggttaattcttaacaaggcaatttcaacccctaaaatataagtcaggcaaaatttatattttttaaattaagtttccagataattgttgttttctggcttccaagatgcaaattcatgattaactataaatgtcaagccaggcagaagagggtgctaattaagtaatctggttaagtactcaactttcaaaaattgtgtttttcttacctgcccacctataaactttataccagagaacaaaatagctttaattatataagagcataatataatcttgaaatttaaatgatgttaacaacatcaatgatgttatctatacctgacagaaataacgaaaaagaaaatgcattcttacagtcaggaataatgagaattcatgagtaaaggtagtttgcttctgggggtggtagatttctgcacttttgttttaactgattttctaaaagagcacctggtcatctaccaagggcaatgaggcctattcctgtaatgaggtctatgccggtaacaactgaaagtaagaatttccaataattattttttgttgctagacctatgctattattagtttaaaatattaagtggttgaaactattattcacagaataatatagacaacatttttcatgattttgtttttttcaagtaattttagattattttaaataatatatttaagctgaatacaacatactgaaatatatgtgcttaatatattttaattgagaatacaaattatgattatctctctaagccatttaaaaccgcttacaccaaacaataaaactgtgttcataaacgataggtggtgccgagctgaaattaggaaaaacagcatttaaaaatacgaagaactatgactttgaaagggatcgtatgcaatgaatactgcacagcaaacatatcagaagggttttccctttctttagtacctatgttttcggcagtctgccttgttcacggtcccacttcgccaggaaccaaatggcaacagaaatccatctgtttggtcccataaacacaaagatttgatttctcacttgcacagaaatcagagagctattttataatggaactaggaaacgttttcttcataacacaggaagtaacaacagatggaggctgatagatcccacctaccctgggctgtttttgtccttcgtcatttctgtgcaggcaggcaggcaaccttatagctgtgtgggagccggggcggatctgatcagagttctgttacctgtgagccccgtactagatgtctcgttagctccacccactacctccgccaggagcccggctgttggggggtggggctagtatcagaccaacatctaaggcaaaaagagacccaaatcccacacagcaagctgttatcacccaaagaatatgccgttcggtgtgtacaacgaaggaggttattaaatacgatgactcttcagatatgtatgtgagaaagatcttctggaagtgtatttttctttgtatgctacaaggaaaacacagaagcgatttagagatagtgcccattatcagacttttaaccaaggaacacaagtatattgatattgacattgctatcactgtaattcattgtgttcttacaatgtgctaggcattatggtaagtgatttaaatgcatgacttcgttaatctcacagtggactctaagggaggtgctattcgtatttccatcgatcagaataaacaatagaaaattaccaaggttgaggaacttgcccacggttacataactagtaagtggcagagatgagatttgaattttgtcctgtaagaacccagacactgacttcttcagcactttaccatacttccctccccttcatacattgctttcagatctttttatatcatcagaccattttccctttatattaaaagaaaaatcagataaagtagattaatgatttcttgtgaagcattctaatagagattagcctcagttaccaaaagttaccaaactgattagcctcaaaaatttgagatgccctcaaagtaacgtttgacttttaatttattttagaaataagagatatgtatgatgatacacaaaatttgtaaacatggtcttcagctataaattacacaacattataacaaatagaactaccagaaagaatgaactatgtgtcttttaaggaatatgttgaaggtgggataaaagcttattaagttttcttccaccagaggtcatcacaaaaattcagtttcctttctttgttttttctgttttggtttggtttttgagacaaggccttgctctgttgccaagattggagttcagtggcaccatcttggctcactgcagactcagcctctcaagtgatcttcctgtttcagcctccagagtagctgagagtacagacacataccaccatgcctggctactttttgtatttttcagtaaagatgaagtcctgctatgttgcccaggctggtcttgaactcctggccctaagcaatcctcccacctcaaccttccaaagagctgtaatagcaggcatgagtcactgtggctggccaaaaatttgattttttagtttttttttttttgagatggagtcttgctctgttgcccagcctggagtgcagtgatgctatctcagcttgctgcaacctccgcctcccaggttcaagcaattttcttgcctcagcctcctgagaagttgggattataggcacacaccaccacgcctggctaatttttgcatttttagtagagaaagggtttcaccatgttggtcaggctggtctcggactcctgaccttgtgatctgctcgcctcagcctcccaaagtgctgggattacaggcgtgagccacggcacccggcctcaaaaatttgatttctaagtggagaagttccctgtggattcagagaagtaatgaaacaggatagccccagggtatttccacaccttaacttgtaaagaaaagtagaagtgagttacagcaatgttcttagactacaagtttatttgttaatgaaccacatttgaacacaagtgtccaccttgcagatttctagagggtatcagggttggggagacaaaccacttctcatcaccctcatatttttcactctcattcatctgcctggactggaaaagaaaactttcacaaagccaatctctatttgatagcctagtaagaaagggttcttcttgcttccctctgcagatagtagggtctgaaaaacattgtaaggccctggtcttgttactgtttctgttaatcagcatgtccaa

SEQ ID NO: 587709 - DNA, 4001 bp, Homo sapiens
atctttgctgttcaaaaaggtgtttttgcacagaaattttaggacgtgtttattctagtaacgtagtgttttcttttttcgctatatttacatgtggagaactccagggaggcccccaccagagatcccttaaatgctggtctctgtccctgcttctcggccccgctggccttttggagccatcgtgcttcccagtccgcaggcaacaatcacagcatcacctgcaaggggcagcaaagtgaaccgcggacccctggagtgacgccttggagatggaccctttggatttgggaacccctctgacggccgggactcccaggattcccttccatagagggagtccacggtggtcgcagccggcggctgagtcctccttagagtgccgaatcagagaagacccgcatcaggtttgggatgtaagtggagagggagaggttagaaagaggcatcattggataagcaaagaatgctaccctgggaaaaggaggcagaaaagacgtagggaagtatgttccccttaatcccttccccgtgccgcccgtagatccctggatcttcttgtcacggagacaggctgcagccacacacgcgaccccgggccggaaacatgcacacgcgcgcgcacacacgcacacacacgccccgctgcgagttgcacgctgcagacttctgcctgacttcccggccaaaaacaccgcacctctggggccagaccacgaattcctgtggcctagaactgacaccactccccctacccccgcaatacacacattcagaccctacactgcaccctgagcgtgccgggaaccactgaacggaagcccgagcagctccccccgtaaacgactaccttccccactgcctaatgtctatttaaatctcctaaagctcgcctacagcgagccgaggtgcgtccaagccgggtagtagacggaggaggagccaggggtgaaagtgaacctcagataacagtactaaatcactattcaaggggcggcacggggaagcctccaaccctctcctgaacctttcaggccctaccagcagcccagttcctccgcccgatactgcacagctccccccctcttcacccaaatccctcagcgattttccagtcggccctccaggccactttctacatccatcctttccccagccagttcccaacatgtggcctcgggtactctagcgggagacagattccaggctgactccatcatgatgtgccccctagccttttactgattccccaaattatccgaatccactcgcccctccggagcccactgtcccttccaccggcgtcctttgctctcgtccaaatccgctttccacgcgccccactttccacccatcctcctgccgttctgttcaagacacgcttgccctccactctgcgcccccaacactgctctcacgctgctcccactctatcccccggcgacacccccactttccttctgcggctgtccctggccgggctcccgcgccccaaacccagcctccccgcccggtctcctccctcgccgcccggtctcctccctcgccgcgcggtctttccttcttcccaagtccgccctctgggcccccgctggagctagttctgccctcctgctctgcccgtcgtccccgctcgagcatcccaatggccacccgctttcaaattggctaagtggctcggagaggcgccaggcacagggggcagaggccagccggctctcccgggcgccagccgcgcctctcgctatccctcctggactcccccgggcgccaagccctcgccctaacgcccagcagcctcacaaacttacttgcgggtcgccaggagggggctgcggtgagcggcggcgggccccgcggcggcgagtgcgcccctctcggcggggctgggcggcgcggcgccggcgctgagctcctgtggccgcgaggtgaatgggctcagcctgacgcagcccagctctagccccgctgctgccggcgccgctgagcgcttgcagacatgctcagtttccggacctgcccgcgtggaagctaccaagagccggcagcggcgggggagactgagaggagccgtggggcgccgcgagccggaggctaccacgccgggggcggggggaggcacgcaccgctaaaaatagctcctgcggaagccacgctggcttagcgcgcacccctccccgcgcgcggcccctctggctggggttcgggtttctgctctggctaccgcggtggggaccccagctcgccgagtcctgccaggcgtctgcctgcactaggatccccatcccggtggagacggcgcctccagttcaggcgcccactcgaatagcctggactaagccagagctgccccgatttcggggtcccgcctgtcgggcagctctaatactaggctctccctagagaagcagaggaaagttttgttaaagcgataaaaaagcttctgcaaggaaagctgcaaggaaatttgttcagatttacggaggaaaaaaatgttcttcagatgctttggttgctgggaaaaacaaggaggaaaggaaggcgaagtctgacagcctagaaagggacccaaggcagcttggagcgggctgaagggggttctgcaaagagcttctaaaattcagaattctttgcaaggcgtttgtgactcctcattccgcagtgttttgcataattcgttgacaccccaccctgaccttggagattttcttgttcctgtcacctgaactgtaatttactttctccgcatgctgccttcactccttccccctccaacccggttttaaattgcaaaacgaaaagggcgcaaactctggatgggtagattcccagacctgaactggaacctggctgttctgtaaccctgaggaaaggagctggtcctgttgccgagttcgggatgtatcccagatctcctgtgcatccagcaaacacttcaagcgtaggagcctttcagccacctcacctgcaaattagctatttcccgctattagtgttcactctattctaccttaatttctgatcatttattattattttttaattctgttctttaaagtaagaggtacagatatttcctgggtcaaatttccgtcttgtttcactcacctctcacagccacccaatgagagaatcattattattcccatttgacagacagggatgttgaaatttagcgacaggagctcatcgcttgtctggaataatagagtgttgaacctagggtcggccagactagaaactttcatggtttccgcataacctatttccccgagtcaatagctttacctgagataagggatcaagaaaattagatactattctgagtggcgtggcgtgtcaacagtaagccgattgataagccgattgcgggttttgttctccattatttttacctaatttctttacgagcattcgcagcttaaattttctgttatgttgaaactgatagcgtttaatttttattctatcagaaagattttactgagaatcttctacaagcaatgtatagactaggtatgtattttataattatctcagttcagactctgtgataaagctactttgttttcccagtattataaattagttagactttgctaaccctactaagtaatgtacatgtgattttttcatagaactgtagtggaatctgtctatttgggtcaagatgtcctccctcctaagatatttgcgcccttccatccccacttgcaatttagtgccatgtgcaccccaaaataagtaatcaattaaggtttgatcttttacttttttactgaagctgcaaatattatctgcaggaccagggccactttataatgacaacatcatgtttctaattttccataggtgattcattgggagatcaaaatgtgaatttccttagactatcaacacaaatcattcctttctatcagtggtgaaggaaggtgaaaaataaactttactttcatcctggttgctttcattcttcctctttcagtaattattcttaaggt

SEQ ID NO: 587710 - DNA, 4001 bp, Homo sapiens
tgcctgccctacagctcctagaatctctgctttaaaacaaagaaaacaactagaaaactgggacttcagcttgtctacacaacaaaacacatcatattgttctatttcagaaaaacttcaaagtcatcctggtgaactacaatatgtgctagggtcaagctgtctctgtactacatgacaacttagttcagtgaccactccatgcttcaactagtcttcaaaatgggaaataattctactaaactttcagggttactgtgagggttcaattaaataacatatatgtatgggcagagctaatgaccaatgagtaggaagcattcttgctcaggcatgaaataaagtatctgacaaaattatatagcctcccataagaatgaacagaacttggctgggcgcagtggcctggaatcctaacactatgggaggccaaggcaggtagatctcctgagctgagctcaggagttcaagtccagcctgggcaacaaggcgaaacctagtctctataaaaaatacaaaaaaattagcgggctgtggtggtgcatgcttgcagtcccagctacttgccgggctgaggcaggaagatcacttgagcccaggagcccaggttgaagtgagccaaaatcccgccactgcattccaacctgggtgacaaagtgagaccctgtctcaaaaataaaaataaaaataaagaatgaacaggccttggacgtggtgactgtaataaatgtaagtgtttgatgcacattaattagattgacctataaatttcagaataaccacaatttattttgcttgtatttgtaataaactgtattgaagtctttgcaaactaagaataaatgattattcaaacttcaaataaaaaaaatgtatgaatagcttcattgttcttggtttaaaaaaaaaacaacggtgttaactgatttatctggtaaatctaatcacaaattttaaaaattcaatcatttcaggtgcctaaatccctctgtgctgatgtaacatataaatgaattttgaaattacaattaaaaataacacctattaaaattttaatattttgacacacttaacatttaagggcggcaagctgctttgggggcatcttccaaagtccttattggattttaaatcatctacaattaagtgaaaataaaataaacattcataagcaaaatataatcccaaattaccacagaaagagcaatggacaatacattttataacaatgtacacgtacagaaaaataaataaaattcttacaatagtatggttgactgaatttccttactaggatatcgtttgaagatttgtattaggtagcattgcctgaaaactttttgaacagcttaaaaaaccttttagtcagattcttaaaattatacccttaagtaaacaatatcataaaagaatctggtttgagatccagtcaataataattaatttactctgttctattcaatttattttcaagcaagagaaaattctgaatatttttctaaaaagttaagctaaaataaaaaacattaaggcaacaattaagatttgatatcttcctgttggtgtagaacatacaaaacacttaatatgaaacaaaattacagtcccttattaatttccctttttgaagatactcagaattaacagaaacaacttcaaggtactttgtacaatcataaaattttgtattctataaatatcctctatgcttaaactttcagaaattgtataatttttcataatgtcaccatgaaaagactagtatatatacaaattaaaataattgactaagatttaccagagtgtatttatgattaattggttgatgtcttctcccttttttcccataccagagacgagacatttcctttccagggcaaattaagttacataaaatcacgtaagaactgttttcaaaagcattcttcctctgtcaaagataaatttccagcactagagccttactacagtgacaaaacagtttgctagagacaaagatttgattgacaagagagagagctaatcactaagtagtatccatagcaatgatagtcctgagtggaggctgtaaagctggggagggaagagagaatttcccatgcttaagtttggttgcactgtacccaaatgtgcaaagaaagggctcaaaagtttaaagacacagagcctatatttccaaacatcagtacatgaatatactaaaagtaacccagtaacaaaaaagtagtaaatataatttccagagtctcttaaagcacatgaatgatttgaatgaacattttgttatttgttcatatagtcataaaattatgttccttacttacagctaacagtactataagattgtatcttttatgtgaacattttttaagcaataagatgccttttgtggactcttccaccctaaaattttacagaatgactgtgtaaaaaccaagccaatatgctacaaataaatcctacacaaatattcaaagtgacctgaaaatccctctgcctgttacacagtctgtttttaaattgcattttctaacatctaatttcttgaaaaggtagttatattcactatgcctacatatacttcactaaccagtgatattttgaatataagcaaagaagtgaattttttaaagattaaatataaactacaaatacatataaactaaaactatctagaattcagttttaatcagaatatcaatatcatgatgatacatttgaaaatttcttccattttaaggtaaagcagctccttccacttcactttgttgtatgcacacatgatgccaccttttcacacacacactacctttctaacacgcaatactgcatcccaaccaaacccccactcccatctccttcctccacattccagcatgcactcacacagggcacagcacaccccacagtaacaccctacctcccccacataccaaccatttcccctattcctctcattcagccccactacatttaccctaaaatctctcccacagtccctcataggaacaccatcattatcttcacaccaggaaagttctcttctacatacagtgcattgtggtcacactccacccctccatcacagactctcctaacaaccatcagcaatattatataatttggtggtggtggtggtggaagcagcattttgaaagcttgtcataacttccagctacattttctaaaataacaaatatgacgtgtgttccaaaatgaggtttaaatgagatattaaaaacaaaaccaaaaaccaccaagcatggcatagtctattctgttggttgcctattcaatatccacccttacaactccttcctgaagtggccttgattttgctcaggtatccttccagccatgtgtttctgaggaggctggctctcatctctggacagaactagtcattagagacctaaatcagtggctttcaagttttagccggcatcaatatcacctggagtatttgttataccagaatgctgggctccaaaaatggtttctaattaatcagactcaaatggggtctgagaatttgcatttctaacaaattcccaggtgctgctgctgctgatggtctgggaactacacttcgagaaacaacaggtttaagctattctgagtgtggttttctgtttctcgaagtcatccaaatttataaatacagtgtcaggcaaacataaaatgagctcagtaagtctccttcttgccctttctgtttttgtagtatttataatacatattgctaagtcatttaaatttgcctagatatccaagaatttgaagcagatgtcaattgttattattataacatgatgggatataaaacaaagcacttttgaaaacactaccagtttacaagttgaacataatctgttctcataattcagatattcaatttaataatccttttcctttactttattcgaactgaagttattaaattaccttatatctcttcctatttgagttgggaatggtatgatagaagctataatatataa

SEQ ID NO: 587711 - DNA, 4001 bp, Homo sapiens
ctgcccagtctggattctcctcctgggctcaaaggatcttcccgccccagcctcctgagcagagtagctggaactacagacacgggccaccgaatgaatcagatacacgtgtttggccatatttattaaaatactaaccatattcctttttagttaagttaccccacatatttctgaattctccacccatttcaaggctggtcacacatcaactgttttcaattaggctactgaaaactcattttaaaaagtccttgatttgaacactttaaagtccctttcctatgcctggtcccacctttaagaggattctgcatttggttaacgtccttcagagcagaaacaaaagtattcccctccccttttcatttcctaattccataaacagcatttctaaagataaaaaatattttatgtaaagtaaggaaaatttattttaaagggctatgctaaaatgagactttaatatttcttcaaagcttaaattacatacctacacacatagatcaaaaatgtcctcactgttttactgctttaaaacaactggcagggcccagcatggtggttcaggcctgtaatcccagcacttgggaaggcctaggcaggaggatcacttgaggccaagagttaagaccagcctgggcaacacagcgagactccatctctacaaaaataaagtaagataaaatttaaaataaaatgactggcacgatgtggagttataaacagattttacacactttgtgcctatctctattttctaaactctctaatgctcatttattttcataaccctcaaatattaaagcaattaacaaaaataaaaatcagacatggctaggatgtctgctacctgttaaacgaagccaaggacactggaagttaccctatgcattatgctaaaactgttcagcagcactttcaaaaattctttaagttatcaatatcatgtcgctacaaatgactgttttaaagaatggtacaaagccactgtggtgaaaaaaatcggccaacacaacacaaaataaacaggaactgagaaagtttctaggttctgccaccacaagacaacgtgcagccgttcaaaaagtacacgacgcaaaatgtcaactagcttccaatgttaatgaagtgttttattttacaaagaagtatctggctttttatttttcggttaggaagtgaatcctaacaactgagaaatattaaggaaagactgacccaaaccaaaaccaaagcaggcacagcgctcttcaagaatccaagactgaaaacacggacgtcataactggttcagtcttcacctcccagtgggagggaaagagagaatggatcgtccccttgaaatacttggcggggaaagaaaatcaagtctaggtgaggaaagcaggaagagcagagcaggaagagctggcacgcagctgaaagtcttccctccccagagccgaacgagtccttccttcctcgcccccggcggccgccaccccggccacgttgcccgccccggcccaggcacacctgccagagccgggcagcgacccccgcccggcgccacgaccgccgcctccccacagccctcagcccaggtcggccgcgcgggaggcgaaagaaaggtgggctcaccaggtccctccgggctggacggcgccgggggccggtggggcggggacccgcacccgaggtccccctgggctggctccctcaggtaatcttcgaagcgcacctgccgggcttcgccgccgcccccgaaccccaacaggcggttggccgtgccccgcagaaggcgcccactcttctcggtgaacgtcgtcaggtagtccatgctgccgcggggctggacgcggaactggggcccaggaggtcgacggtttcggcggtggcggccaccactagcgcgcccaccggcccatcagacctgacccaggggaggcggctccgcgcgcctcacaagaggcggggaggaggagggggcgtccctctctctgcccggggacggaccatcaggaaaccacgcgtcgggggagcaaaagacggacaaaagttttcgaaaagtttttcttgtggcttctaaatgcaaaatgaggcagaacttagcttgtcacataggtgtattcttcctggaaccgatgcggggtcagaaaactgatggcttttaagcaagctggacgggtcctctcagcgcattcccccacccgcctggcgccaatggagctggcctggcccgcccagcccctccccgccccgtccgcgctcggaccggactttcaggactgcaggggaaagggtggacacccagcctcccgccaggtcagagcagaggctaaaaatggcccaggggagactgctggagttgcatggagttcgggagcctaggaggggtctgaaaataactgtcaaaaagtttgaagggtgtgtgttggcttggggaaaaaagagggtggagtgcattacataaaacttttgcagcttgtatttcctttttttttttttatgtttaaggacggcggagataccttcaacgtaagactgcaatcataattaaaacatgaatagtaacattttaagttcgttgtgccattatgaactcatgttagtgttggacattctatgatcccagtcctgtttaggcaacgttattgagggatttagtttgcggatctacctttcagggacaaagaacctagacagggaaagaacagtaacttttgacagaaattttgcttcctgtgagatgtggttattctcttcctttcacatctgtttgtagttcttttagttttcccaggcattaaataaattaaaccctctttcttggaatcaccaatatattaatatattggggggaaaaagatttgaattacttaggaagttgatgaactacccactccaacaatagagccctgaaaatcaggcttaagcttttggccatactactaaagactatccctcctgacaaacacacaccctctttttttttttttttttttaactggttgacagatcttttttgcatcatcaccattttcagtttagattcttactaggtgggataaatttcaccattctaatatcagccatcaccattatgcctggtgaaaaatacagaatgtctgggctgcatcctcagagtgtctaattcggtgtttatgggaaagggacccaggagaatctgcatacccagcaatccatgttttcagggttgtggcttgggaaagaactgttccagacttctgcacttcctaaggacctattttgtagatgttgcagtggacggaatgtttgtgctttcccttaaattcatttgttaaaatcctaaccccaatgtgatggtattaggagatggggcctttgggaggtaattcatagcatagaggccgcatgaatgcgattagtgcccttataaaaaagggacccagagagctgtctccatctttctgccacaggaggatacaaaaatacatcagtttgcaaaccagaagaaggtcctcaccagaaaccaactatgctggcaccctgatcttggacttctagcctccagaactgtgagaaataaatgtgtgtttataaaccagtcagtcagtctatggtgctttattatagcatctggaacgagctaagacagctgctaagtagcattccatttgacaaggaagacttaccattcacactacttctgagttcaatgaaagagaggctcggtaagttttaaaaatcaaatttcaatgacttagtctaattctcattaataatttaaattatttttctaagatatgttttacatcttctaaaaatttaccggtttgttataagcatatccaattaatgcttgagattttacctgattagatctgcacttttacatccaacatttgcaggaagcttcattctaccagttcaaatccagatttacaggtagttaacccatctgttttgggttttttttctgcttctatttcatagaaggctagagctgctggagaaaaatgtataaccttgatgac

SEQ ID NO: 587712 - DNA, 4001 bp, Homo sapiens
aggccttttctaataaaaatgaattcttcatatttcgattatttgacatgtattcaagtggccagcctgtagggggggaaaaaggcaaaattgggccgtaaaatggaattaagctgacttctcaaagccaattgatctaaagacaaatcctagcaactcaacagaccacagatattatctgtttacaaaattgtgtttctgttaactgtttagcttcaaaataaaagcacaaagttagctgcatttcccccataaatttcaagctcaatttaatctccgttattttgtactcagtcatttcccaagatttacaggtatcatgggccacttttaaaaataaaagagaaacttgaacttcttgcatgctacagataagactggtccagttggaattacactaaagtaacattttatagccaaagttgactattttataaagaaaagcccctcaaaacgacaggaactatttcagaaggtaacataatatactcgaaaaccaccagtactgtgaatctaagataaaatttgactaaaaatggtctaagttgcctgagaaaactggccttcaaagtggtcggctgccacatcccctcctcccactctgcccttttaatgttagagaaatgcttgatctaggggaaaccccaaatgcatgtctccggtaaattccattcctagatccatcagtcactgatgagttctgggaagtggactcacaagcctgaggaccaccaccacaccacacatcgccacaggaactttatcctaaggcctggtggctcccccaggcgactgggccaggagcaggagcagaagcaggcctcgggcctgcgaggttacagggttcaacacgtggtatttttcgagcacagaactgcacttcctccccaggctggggcgccggcaggagctccgggtggtgggagcgcctccacctcttacccacggaaggagctcagcgttcaacgccccagaatcccggggccactggcgggagcgccgcggaggaaccgaatctcacccaccctcccggcgcgtcatcaccctaaagtttgagagcgtctgaggccgagaaaatggtcgcaaaggaggaagtagccgggcgtgtggctgccggcagcgcgggtccccgccggctcgggaaacgcggctccagggaccccggcgccttcccgccggccgtcgcggggtgacatgccctcccgcccccctccccgggcccgccggcctaccccgcccgccgccgccgcccgagcctcatggccgcccgcccgcccggccgaccgcggagcccggcgctcaccgtccgccggctgctggaagttcacatacgcgtagcccaaggagcggcgggtgatcatgtccctgcagacccggatggagaggatgggcccggccgggctgaacttctcgtagagcatcgcctcggtcacgtcggggtggaggtcccccacgtagagcgaggccatggggtagctgggggcactggggttcatctcggcacggctgcccgcagggccacaggccgcgacctttccgtgagaggaggagagcgagtgccggggctgggggccggagccggggggaggggagcggggagcaagcgcagagggacaaaaatcaaccggaattgaaaactactcaacggccgcagaacggggtcgatccactgccgctggctgccggctgccggcggggagcgagggtggcggtgtcgggtccgggcagcgggaaggcctcggtctcttggttccttcttggagctgctgcggggccgcgggcgggcgggtcggtctcggctgcttcaccgggttattttataaaagaggaagaaaaaaaataaaagtctccggcgggggagacgcggattttttgtaaatttttttggggttttttaaaagatttttttagattttttttggattttttaataataaatgtgtgttccgagcccggagcacacactccgcactctcagcactaaccgccggggagaaggggaagcaccgcctcctgcaccctctacttataccccgcgccgcactcgccccgcccccgcgcgtctgacgccagggcccctacgcgagcgtcagcgccggagtaggaggagacgcggaggccagggggaggagggaagagaaaacaggaggaaagagcagagaggaagggagaggtggcggcggtggaggctgcggtgtgggggtggggctcgggcgaaggggcggggcttttgcgcaggcgccgcggccggggaagcggagcccgcgctgcgtcgcgtccgtgggggtggggaggacggctcgcgggcggtcctcgggggtgttggctgaggcgtccccgccttccgccccgcccgcccctgcctccaccaggaggagcgttaacccgtcaccgcggcggtgggcggtgcaaagggcttccgggttcctccgcgctaaccaccccccacgtgcgcggccgcctgtggcctcttcccgctgcggccggcccggctcctctagccccagctccgggggacgccgggcacgggtgagcgggcgtggtcccctccgggcccggtttccgaaacgtgcgtagatggagccagcgtggccccctgctctctcctacccggaccgcactacgagtcccagccggcaccgccgccacgcgcgtcggccgcagaagcggtgcctgctgggagctggagtccccaacggccgcggcgctcgctgacaccaactggctgcgcgggtcctggccgcccgctccgggaccccccaaccgtcctgcgcgctggaccccggcaccgctggagctcccggcgcggggttggggggcagggagagagaggggagggcccctcgggttcctcgtcctcttcttttccagcccgaccctcctccgtgtcttcactggacgttgtcgttggtcaaagtggctttaatttgggatagctgtgttgggggtctttggtcacttcttaccttaaggtgctaggctggaatcattgatttgtgctgcttctgccagacatttcttggcgatagaaaccaggagtggagaaaagtgaatgtttttcctgaaagtacgggtttgtcacaatcactactatatggcaccacagccctgcaaccagacaaaattaggaatagtctaaaacaacgtccttataaataactaaaacaattctgcacattagtagtgggttttaataggaatgctaaatttaacgaattgatagtaataaaaaccggctctaggaatgacattaaatcaacatacaaattccactcgaaagtagtaaagtgcttttacagtttttaaagcactcgcgtaaacatactatcatttgttcctgagagcaatctggtgtgggaggtggagcaagtagtaataattttactttactgttacaggaacagtctcaaagaagttaaatgattgcccaatttattccttaattcaataaactttaatggatgtcaactgtattgctaggtgtggaattaagtactttatatcttgtctcatttaattagaatttaaaccagtggaatcccacataaatactattttgctcctattaaaaagaggataaaatgtgaccgggcgcggtggctcactcctgtaattccagcactttgggaggctgacgcacgctgatcacttgaggtcaggagttcgagaccagcctggccaacatggtgaaaccccgtctctactaaaaatacaaaaagtagccaggcgcggtggctcacgcctgtaatcccagcactttgagaagccaaggggggcagatcacgaggtcaagagatcgagaccatcctggccaacatggtgaaaccccgtctctactaaaaatacaaaaattagctgggcgtggtggcgcgcgcctatagtcccagctactcgggagcctgaggcaggagaatcgcttgaacccgggaggcggaggttgcagtgagccaggattgcgtcactgcactccagcctggtgacagaacgagactcaaataaat

SEQ ID NO: 587713 - DNA, 4001 bp, Homo sapiens
acactttaaataaggtgcctataactagttcatcttgttctgcatgctgaaataccataaataaatgcacttctctcttcaaagattatgtaaataaatcttacattaaaacatacccctgagctttggtttaaacaataatttcaagtccaaattaaacatttatgtatgtgtatatatatttagcaggaaagtcttaatatgacctattttgttaaactaatgacatctatacccaatactccaaatattcctcttatttataatattcgctgtgtaacagtcacacagcagtactgcatggtacttcaaagtactattccttttacaagtttaaccaactcaggtattaaacatcaatgatgataatccatagctctgcttaaaaggaatctctcgggaacagctgagaaagaaaggttaaagatttctatccttcaaagtagggcactgcagctacctataaatcatgctctttgtttattaagataattaggcccatcagtacacttaacttttagactcaacaattgtctggcatgaacaatttccactttttctaaaacaaaggggatgtgttcaaaaagcggtcctctgcatgctctctgcacaatgcatgctattttaaaacatgatttatgggtctaattcctggagctgccttgaaaaatatagtgggttgttcctcccatgctccctattaggagaagacactccaatttgaagagtgcactctgtttcagacttcaggccgctatatcatgtcagcattttcagtaaatactgttcaattggactttaaacaaatggaatggagggccacagctgcagccactgcagagataaagttatccagccgggaggcttacataagaggtgcaggacaatcagggtgaaatccaagtgtcattatctgaatcctatttcttgagacttgcctacattcttaaagtgtatgaattcacacgcccagagctcgttttatttgccttagggcataaaacaccgggtcgacatataagttgttttttccctaaaggactaggctccaattatgaaaaggttggcaacttctgcctaggggaagagtaaagcgggatgcgcgggaagcctgcaggcctgaaagaaatggctcgcccaaagatccatcgcagtgctggccacactccccagaggaattaggatggaggtgacaagaccctgcccagccccttcaccccaacgtaaacacagagtcaaggagcttggaatgaataattagcacgcagcagtcgaaatgccctaggagtacctgtcctctcccagcatatttccaactggcacattcgtgagatgctgaggtcagccagccctggactccagaccttccagctgccttgtccccttcttggcaccccgcactccctcctcgagctggaactctgttaacaagaggtgccaccctcggcttcccacaagaagataaaaacgaacctctccttcccacggctccctccaacttcagaaactacagtcaacttactgggactcaggaggcagggagtcttcctggcggacggcgctcggaggcagcctctgcaaactccggcgcgcagcgccgccgccccggcacagcccggcagcagcggcaagtgcaggaccaggcgccgccgctctgcaccagtcgccttggctcagctgtgccgggcgccgggcattcgccagggcacacgactcagcgaggcggcggctgggactgaggctactgcacccggccgcgcggacccgagcgctgcagctgcctccagccccggagcgcggcgctccgagcccctggtgggtgtctctggctccaagggaatcacggctcaattagggacctgccaggagaaaaaccgatgcgctgccgcaggcagagccgccagcccgcccccagtcggctggtcacatcgcgggcgcgcagacggacaagcgagcgggagggtaccgcagccagcactcgccgccgcgccgcggagaatgacaggcgccgaggcggagcagccgcgcggggagcggggcgcgagtgcgcatgatcctggccgcagcggcacgtcacgggggaggaggggcgggccgcggggcgggagggggcgagccgggcggggccgggctgggggtgcacacgggtgaggaccggcgcggggcctggcttgctcgcgggaggatgcaggaagtcttccctgccctgattttatgaacccaaagctctgtggttgaacttgtcccaggagcccattgtcctttaaacagcaccgtttaagcggtccttaaggtccctggggagcccacaaaagccaatttaattcaggttacagcttaaccgtaaagggttgccatttgggggacagtgatcttctattgtggctgtgcattaaaataacttggggagcttgtaagaaccctttgccccggacgcatcccagaacaagtacaggacaatgtctgggtggggcccacccaggtatcagtaggtatctaaagataccaaggtacagcagtgcttctcaaaccctcagtgtgtgacagaatctcctgcggattgtgatgagatgcaagattcagattcagtaggcctgggataatgagggagacatcctttctaacaagctctcggaggatgccaatactggaggtccagacccccatccttgctacttaacgtgtgatctagagcctggagcagagcttctgaaacagttggcctgtctgacagtcacccgaggggcttataaaaaacgcagaacaaatgcccaggccgtacccccagtgatagtggttctggctcagcccctggcaaaggtgggcttctagaattccatttggcatcaacactctaaataaatctgataggggttttgtttgggccaaacttcaagtttacactagcaacctggaattgggaataaacttttgcacttacaaggagacaaaccaagtctagaactcaggacatctgactttgagtcagggattctaaaccaacgggtgctttatctgactagtcccaattttctaaaattatgatgcattacttagcaagaaaaaacatataaatggcattaaatatacacacacacactctattgaacactcgttacacatatcattaatgggagcttaaaggtggctggggaagaaggctcatcaggagagggtaaggaagacagtgatggagtaagggatgttgttagtgtgtcgcagagggaagggtatgtgggaggaaacagtttagactcagcctacagcttggaaaagcccattggggaagcggacccaggaaccagacttggcctcttgcttcagagcatggtatgaaactcaggtgtttaagaacttatggagtataacatttcacatacgttacctcactgaaatttcacagtggtctcttaagttgaataataatataaaaaagtatccccattttatatattaaagaagacatcctggacatgagttgactaatggtggaacttgaataaaagtagggatctccgtgttggacttggcttctacaactctggagaagaggacaatttagaccttataaagcaaatggtttctgtgtttactagtcacatcttttacaggctgtgcctaaatttggagttaggaaggctttcattcttgtggggaggaaatacattttgtgtcttccagttttgctacacttgttaggatacacttagaacaaaatgttctaagagcaacccggtcctaggacattgcagttccacagtgcaggcttcattgaggagtttgaagggcaatattcacgttatctggtgacaagtgtaattaccatcctcattttacccaggctcagaagctaagtgatttagacaaattcacgaatgcaggcaggagccaatctctagcctctgtccttttcctctgctctcttttcaccaagtaacatgctgaggattgtttttcatttccaaatttttcatatcaggatttgccatcagtaaattgga

SEQ ID NO: 587714 - DNA, 4001 bp, Homo sapiens
agagcacaggaaaggtactttgagtccccagtaggaggagggggctgaaggtgaggagtcctgaggggtcactcacccgaaagccagtcatatccggtccttcaagtggcaagagagcgacgtctcccaggcccgcaagaaggtcctcatggtagagctgcaggaagcgcatcgcccctggctccatcaatagcaccatctccaccaggccctcctgccctgccagcttcacacatcctgggctcacaggccctgccttctccagagaccccatggtgatctccatgggacccaccagcccctcttgctctggtgagtccatggcaatttccaccaggccctcctgccccagcaaccccttagaggtctccactgggcctgcagaccccacaggccccaggctcatgggcccctcctgttcctgcaaccccacaggcctcaggcttaccagcccctcatgttccagagaccccatgggcatcgagctgacttgctctgcctgtcccagagaccccatgggacctgtcctcagagaggtccctgactgccctggttcctggccagagcctgttgtcataatccctctaccctgcaccatgggacctgtcctcagagaggcccctgactgccctggttcctcgccagagcccattgtcacagtccctgcaccctgcagagccgtcaccaaccctccggtcctcaggagagcatgcttggtagccctaggcccctgggtggacgggtggtcccctccactggtgttctcagccagctcctcgggctccaggatgtcgtagtgggggacaaggctcagctctgagccctgcaaccggtgctcctgctgcaacactcgttctgccacttggaggaagggaaaggacagaaagcctgtcagatttctgcaggagagggacggtcggctgggtctgcccagccccactcaccttgccactgctggaaggaggcaacagtgcccaggggcccgggtaggcgttgcaggtcctccaggggccccccaccactgcggcgctcattctccaggtacaactccagcaacagcaggtccacagaggcaccatcccccaccacacgcaccgctcgggcctggggaacccgggccagggacaccaaggtcccctccaggcccagattctgggcctgctcctccaggacacggacatctgtggggtatgtgcaggtcagctcagggaatcccccctagccagcacctcaaccccaaccctgcctctcacctgcctcagaaaggggcttgggcaactggaccagagcccggtctggccgggggctggccaaggcacagcaaggctgtactgggagccccgaggcccgcagcaaggcctggacatgctgctccaagcgctggggcgtggtgccagggggcagtccttggagcagcaggcgtgcaggggctcgtggtggagctggccgcaggctcagctgggcaccatgtagttcgtgatctgcctgggccaagaccctctcggcgtctgtgggcaggggcggggcaggatgtcaggcattagaatatcagggcacccaggctgtcccttcagccagccctctcacctgcaggctctctgaaggtgaggacgcccccacagcccagtctctgccagctcaacacaggtccccctccagagcgtcggcggttttcaaagtagagagtgagcagctcgtcgggcacggcagggggcagtccacggacctccactgccacccctgcctctgcctccgccattgcaaccctgggacggggcatcaggtgggtagggaaacagcccattccacccctcctgcccctccccaggcccctccaaggtgtgtcctcaatgctcccccattatgggtggccccacatacagcacttacattccccgtggccgctaggcagcctcaggccatgagctcagccaggactcctgtgcctgcccctcagcaagcctaaccctgctgggagcaggaaaacaaaagtgaaactgaaagacggaaggagggagggagcagctgggccctgggcgctgaggcctgggtactggggctcagatgcttcctctcctgctgcagcctcaacccccagctgaccaggaggtattggccaggctggacccctcaggaccctccagccaacccagcccagcccaccggccctacctggcccactccagcccctggttggcagggtagacaggagtgtcccctggtggccctccactcccctggcctccatggcctgaaaatggccaatcacccgccccactaaacccaccaaggggcctgagtcactgcccctcactcaggatctccaagcctctgtgtccatgacaccctctgcacacaaagtgctgggtctccaggcccgcccccggccaaggctggccttcaacgcccccagcaaccttctcaaccctgctcctggtccctcacacctgccaggtgctgagcatgggcggttccccacccttggtctccaagaatgtgcattgcagcacagccttcctcccgcctcaggtcttgcctgcccattcctgcagctttctgtcctgcctgcacctccccatctcacaccatcattggcatcgtcacaagtaacctcagaaggtgacaaggtaatggctccactgcattccttgctgccgctaatcctcaccacagaaagggaaacggaggtgcagacaggcccatagcagcaccaggcctcaaacctgggcggtgccttcagagtccacactcccactcgccacagatctcccacatcacccaagctccgtttgcttccagcctttcaaagagctgtggccactaccactctccatctcctacttcccactcacccctcagcccaccaaaacccagccccacccctgctgttcctccctccagggagctgaggaccctggccagcctgcactcctagccctgcacatgccacacctctgctgccccgaccctggtcccagcctccagcatctctcgctaggtagctaggctaacctcttaactagtctctgtctgccactcccatggtgggtcctcaacagaggtgtcagggtgagccttgtaaaatgacaccagcagctgctacagctcccagcatcagcaacagtagaaaccaaagtcctgggggccgggcgcagtggctcatgcctgtaatcccagcactttgggagactgaggcaggtggatcacgaggtcaggagtttgagatcagcctggccaacatggtaaaaccctgtctctactaaaaatataaaaattagccgggcatggtggcaggtgcctataatctcagctactcaggaggctgagtcaggagaatagcttgaacctgggaggtggaggttgcagtgagctgagatcgtgccactgcactccaaccaaggtgatagagtgagactctgtctaaaaaaaaaacaaaaacccaaagtccttttgaggacctgccccctgcccagctgcacctgaccagacctcagtcccttctctggccccatgccccctgcacaccctgatgctcagagggctccaggctctcagctcttcctgcagagctacaggccactcctgcctcagtagcctgggactggcccttccctctgcttggccctaccttccccacaaacccccatggccacccctctggcatgatctcccttactctgccttttttttttttttttctgagacggagtttcgccctttcacccaggctggagtgaagtgccgtgatctcggctcactgcaacgtccacccactgggttcaagggattctcctgcctaagcctcccaagtagctgggattacaggcacgcaccaccatgcccagctaatttttgtatttttagcagagacagggtttcaccctattgggcagactggtctcaaactcctgacctcagatgatccacctgcctcagcctcccaaagtgctgggattactggtgccagccaccatacccagctattttatttttatttactt

SEQ ID NO: 587715 - DNA, 4001 bp, Homo sapiens
gcttaatatttgagtttaaagtggtcaagaaaggtctccttgagaaactcatttgaaggaagtgagggagcaggcccaagcaagtatctagtgaaagtcttccagagagaggacaagaaatacaaagacctgaggcagaaatcttcacgaagaggcgagctagcaagggggagaatgagacaaagtcagggaggctgagggtagggactggcaagtcaagtagagcattgtagccacaggactgtgacttctactcaactgtagtcacagtcaagatttcagcttgtactgagaaacagaaagctgttggagagttttgtggaggagtcaaataggtgggtggatacggatctagaatgcaagctgaagatttaagtttgtgggatggcagcacgcagacgttattaaagccaagagactaggtaagatcatctagggagtaactgtagagagaagaggggtgagccctagggcatccaagcatgagaaatgaaaaacaaagcaaccaaggaggtgccaacaaagtaggatgcagaaaaccctggcgcgtagagtgtcctggaaatcttatgatgagccttatgagtctcactgccttttcccgctcactctacggaggatttgatattcagaagcagcacgttttaaaaaagaaaacctatctctaaaaacaactaggtttaaacagaagtcgtaacatttcattatgttctcttacgactgagtcccaccttctactctaagctatttgcacctcaatgtaccatgtcctatccatttcacagttgtctgagggccacttttttccagactgcacactcaggtttaggcattaactgctgacagatagcttttggccagtagcccagactctgcttcagattatgttatgtattgtatatgcattcttaacattaattgttaaataaccatactaattctaaatcacaaggttctcatgaagatgacagcaaaaaaaacagtgaatatttagatgaagataaattagaaatggcagtaggatgaccgtgagcagaatttcatactctgtggaatacgtaagatatttttaacaatcaagtactgtttaagaggcagcattaaagtgagcagcgctcaagcaagctaatctacagatttaccgggtcaaacgtcagtgacctttgggccctaagcctgggaccctgggactcaacaaatacctggacactactgacaaagctacgacgcggacgggcagcagaaaacggaaaattaaaagaatgagagaaaaagtaaaggagaaaagagaaacaaagtagatgtagaaactccaaggggaagcaaagagaaagtgtgggccgcatgactctcaggtcctctgcatctcacacgctcagcagggttcgggggtggaggtcagactgtttaccccaatccaggggctcacaaggggctggctgccaaaatccttctttggctgtaaccagatcctcccctgtcacgaaagcccccgcagaggcctcggctccgggctcggcccccgccagggctcgcaaaaaaaaagctcctcttaccagagtctcaccgcctggaaggaaaggtcggaggtgaaaataagtcgtggccaagtacctcttcaaaattggtcccgagcggcccccagcgagaccctgcagctgcctctagcaccaacacatacgcccggcagctgccgttgcaattcgaaccctcctggctttcaaaaagtcgcgcgctgcgccagcttcggccccgagctacggggcggcgtgaaggacacgccccgccgattcgccgttcctcctccctctcccaggactcccggtgcccgcaggcgccaaagacgagggaaggaaggaaaggcgcggggagcacaaacttttacaggaaccaccagcccttccgaggagcacagcccggtgaatagaacacagttgcctgtgctgaaggctgaagctctctccaaacgctcacatctgtgttgaatgtgtcgtgattatgacgtcaattttattataggtttatgaggccttgaaacactgtaaagacaaatgcgtagcttaaggaacaatcatctttagccgagggaaaaaaaagatatttagaaatgttgctaactcatgtaattgccacattcaattcaacattctttaatttattcaacgattatttaggaacatctgctccccaggaggggatgggccgtggggcagaccaggggcccagagctcagggcagggggtaccgcttgtggggccgctcatttctgtttcgaggtacaccaagggttagaaaaaccacagtaagcaaagaacttgcatcaagatcgggactggaatccattaatgtaggtgacaaagccccgcaactctgatcagggcttctccccaggaagatgtgccctgaggcatcccccgaggatggcgcaggtcctgagggtcgtggggatcaaagaatatgagccaagacgtataaatcacatgttggagtttgccttcccctatgtgaccacagttctggatgatgcaaaaatttactcaagccatgctaagaaagctactggtgtgcaattgcaatccagtgtgcgccgaccagtttttttttacctctccgccccaagagatttttattagatattgcaaggcaaagaaatcaaaccccttcgcctttgatcaagccgtattcaagtcctagaatgccacccaatagatattgcttaacagctccaaactatatgttgcagggaaaaccccaaaactagggtacagccacagaggccacctggcttggagcaggaaggaattcgagagcagccccatagagtaaaatgagagcaagtttattaagaaagtaaaggaataagagtggctactccacaggcagagcagcctggagggctgcagatgggctatttttaccgttatttcttgatcatatgctagatagaggatggattattcatgagttttacaagaaggccctggggattttctggaactgagggttcctcctccttttagaccatgtagggtaataagttccccgggttgccatagcatttgtaaaccgtcatggcactcagggggagtgtctttcggcagctaaatcattataattagcctgtaatgagcagtgaggatgaccagaggtcatccactagtggatttcagtctcaatcttgatccgggttctttgcctggagtggtttttccaaccctggtgtgccaggaaagggaacgctgagtggccccctatggggtgccctcttggttttggtgggtttgggccaccctctttactgcatctgttttatcagtgggggtctttgtgacctctatcttgtgaaatcagtcctgccaaacttctgtctcatacatacaggcttaagtctttacagaaaaaggcatctacgtctgagggaagaataacagtccccatgatatcagtgggccaggggaggtcctcaaatgccggtgggtcctggacccccgcaggtgtccagactcttgacaccgtcttgagaatggattcaaggatgagttggaaaatagtgaaagtatggagatttgttgcaaagggaaaaagtacacacttaagaaaggggattgcgggcgtactcaagagagtcacacagtggggtgtgcggtttctctctgtatgggtttcttcaaccaaggggtggaatatttatgacaattcttggaaaaagatggagatttcttggaactgtggtgccactcgtttttacaccaaatatgggtgttcccagaactgtcattgcgctggtgggtgtgatttagtgtgttaatgagcatataatgaggtcctaggtgaaacctaggtcaaatccagcaccactttgggtctagttggtcttagccagcttggtgcacaccctgtttttcaggggttcatcagcccataacccctactcatgggaaactgctgtctggagtttttattctcctgtgaacaccctgcattatttctgtctcacccag

SEQ ID NO: 587716 - DNA, 4001 bp, Homo sapiens
ctgtgacagcagtgtccaccataaagtcttctccaactctaatacaaaggataatacagataataatgtcaaattacctgtttagaaactagtttttgcagctcagaaactgctcctttcccgctccacacttcaaagctgtttcctaattaggattaaaaatatgtatcacttaagtaaattacttacgctatgaaatacagaataaaaaatacttcagttttggtctaaagtatgtttagaaagatcaaaagaaggggaaaaatataacttattcatattttaaatttaagttacctcaattcttttggaaaatagtgtgatatgcataaatgcttaaatcccctaaacttctgaaatcttaccaaacagcaaagtgatatctatttcggaacagtgtaacaaagatggttagccctaactatcctttaatagtctatgccaaagtttactcctctgattgatcgagcttcctgttactcaaactatgtaacaacctcgtatatccgatgattttaaaaatgtttgctcatttaaaagctactgtacttcataataaaataacctcgtcactacataaataccaggtttaccttcaattcaaaaactctgtattatattggtgttcaggggtcctcaccaggaaggtgctagggaaagaaaggagcaggtgcacccgaggctctgcaacacccactccggtaaccagagaacaccagcaggcggagtctggaaagcggttatggggcgggggtggtaggggcgcccagaaagcccgctccttccagcgcccaaacacgaaccgtcacccgtaagacacacaatacagacctcaactcgctcaaaaaaacaaaacaaaacaaaaaaaattaaaccaggcgagttcctggggagtaggctgagggatgcaaagttggcgcgcccagcctccctggcggggcctaatccccaaacgccagtttctgtaaaccaaacaacgtttcccccagtcccacttggcatttagtctttcccggttctaggcccaattctaactagataggtaggaagggagaaagaaggggcaataattactccattaaccttcccaggaacgcctcccccggcccatcggctcccacagcaccagagacggcggaaatcctgcagctcacagcccaactgcaactcttcagagtcgcgtcgctcctcatccgcccttctacaccccaaactctggacaccgagagttccacagagggaacgcggggaagaactatggccaccaaggcctgtttctctaagaactcgacccagtgcccctagcacccaaaccagagtccccgctccgcttcctccgcccgcaaggggtatagccggagccaccgggacgcagaacagcctccccgacagggccagcaggaggggcgaggaggcaagaagggagtcctgcaatcaccaacgcgtcgcgaggtgctcacccggggatcccggcgatcagtcctgagggagcgggcggactgaccgcctagggcacgggaagcccggggcaggaagacccgggaacctacagaggaggcgtgggcccgtggccagacccaacagggccgagtgtcccggagccgttactctcccgcctctggggcgcgccgccctaggttgccaagggctggggacgcgcaggcattacctctacaagaagcagcctctcctgtcaaaggcagagcgacagtcagcccccacgacccgccgccggcagcggtcggccctcggagaccgcagcagagaggcccacacgtttcctggctgcctcggccccagtggccgccttttcgacctcagctacgcagcgccaaccgccgcagccaccgccatcttaggatctcattgtggtgggagaagaggggcgggggtactgcagagggggcaacgcgcggcgggacatgcgccgtctcctcggcaacggccgcgcgggggcgagaactcgcccgggcgggagccgcaatgcgagctagactggagtcatgtgacccgccggagtctgtggtgtcgcttctggctctttaagccgaaaagagattacaccaacgaatccgcccccacccgcccaggaactatgtatcccagaatgccaactagacctcgcgttctaaacgcctgccggccacaggtggaggactacaaatcccagcatgccgtgcgcttccggcgctgatcgcggagcgtggggccctaggcctatgcggaagtgcattgatccctcagcccgtggagaaagagcggaggcgctgtgcggttttccgtgggggtgtcagctccggcccgtgccggaagaaggagccaagaccgggatcgcttttttgccccttcctcaccccacattcggtcacgaagaggtggaaacaaaaggacacttacaatgtagtccaacctcctgattttacatatgaggggattgttccacggaagttaaacaatttgccagacgtcattatgtatctactgagtgagagaatcataaatattgttgatagttaacgccacttttggttaatgtcccttttccttaaaagagccagatgattttaatccaaacttaatttcagtaaattttctctgaactatctttttatttatactctcctgttacagctctattaagattaataaattggcaggtcctccctttaaaaaacaaaaatcaataaagtcacaaggccttcaatgtgcctgactggaaaggtaaaacacctgtcagttttagttgagtgcaagggcattcttctagttttacgcagtttataattatggaataactttttaagcaaaataaaggtaaaaagaagaattgcattctgggtttcaacaacaaaaacaaattgttcccaaaatagtaggtctgcatctcagtacgcaattcacataaagctcttctatcccactgcaatctgccaccgtaggttcagtcgtgagtgcattgatcgttggtcagacactttttcctcatattctgtgtgtgtatcgctaactactgcggtagcaaaaatatagtccctgcccttgaagagctcatattttagtgaaggatgcggaagtggagtgtgatgtaaataaagtttgtgttgtaagaaaaagtgctgtgggagctcagaacacagcagctaaacgctcaggtgtttattgtagtccagaatgccctatcctaattccaccactccaagatcctggacaagcgacgtgcctttctgagccttaattgccccatctatgaaatgagggggaaggaatgatactgcctaccttgaaaggattttttaaaaaatgttctcagagtttgttttatgccaggcacactgtaaagcacttcggctgttgtgattttcttgatcctcacagttaccctgaagaggctggttctgaatctgacccgttttggcaatgaaagattatataaatcaaacttgtagcagctgcaagtggtagagcctaaatttaaacggaggtctatgtgattcctttaagattttttttaattaaatacaacgcatataaaaacactagtatatgttgaggcccgaaatattagctatcatcattattttgctttatacatatgtattattattaaacgtatgtagaagctgttatcattaaaacaattctaataaattcaaaagcgtgaaattataatacgtactagtcattatgttttctgaatttatgaagctccagaatgtcaatactattgtttattaggaggtaggaggaatttgagaaatatttacattgaaatgtagaagctgttatcattaaaacaattctaataaattcaaaagcatgaaattataatatctactagtcatgatgttttctgaatttatgaagccccagaatgtcaatactattgtttgttgggaggtaagaggaatttgagaaatatttacattgaaaaggggatctcaaactcaaatatgagcattactgatctttgtaagggaagaaggaaagaaaaaaaacaagaa

SEQ ID NO: 587717 - DNA, 4001 bp, Homo sapiens
acatttttaataaatacaagctagtgattaaatcaacaaagcctccagctcttctgcacacagaaatacagtatgcaatgggaatttcctagctttctgtcttacttaatagtaggcagtgtagtatcacccctccacttccagtttactccctatagcttacttaccaaaatatttaatccctgttgctttttttttcttgtctcaggctagggccactagctttctatctttcctaccttacctttccttcacatattagctacttcatgttaaagaaattacaagtgttcaactgaccatatggaattaaaatttacttagaaaaaaatgaaataaaaaaaaccaaaaagtaaactaattcagcaactttatgttttatggagtcatctagcctcatgtaaactaccattaagcaatacgtaaacatattaatctgcttaatacgaaagtaatgtcgtctggccgcagacattctgaaagttttgccacattgtttcaaaatattggcttgtagcccttttcaaagctactgattattgaaaacttggcgaccatgtttaacaatgaagaaaaggcttccccaagcctacgtagattggattctctaatacatagtaataatgttttttaaaataatgaggtgtgtaataaaatggaggaatatccatgatgcattgttggctaataaaacgatatactgtactatatatgatcccaatcttgtttctaaagcacactcattaaatgcacagaaaaaaaaaatcctgaataactacccaccacacttggagactggctaccctgggtagtaagaaggagaaatatggggggaagggcgcgagagagggcaggtttcctcattgtttggctgcttcatgtttttctcaaggagcaagcagtacttttgtaattaaaaaaataaataggggaaaaacactgctaaaagcatacttttttcctccgtagcaaattcttctgatttgtaatgttaaaaatatatctctggtttctcgattctaaaaagaggacacacgaaaacaaaattatagaagttccaaaaaatcttggatttgcaaaattactccctcgggttctgcccgtgggtcctccccatgccggtgtctgaaattccccaagcaaaacgcgggcactgcacttccccggaacggtagtagacgctcaaaaacacaaaaagaggccttggcgcctgctataacctctcagtcccctcccagcccccgagacttccccgagtctacgtagactggattctctgcctccaaaaccaaaacagaagtcactgggcggatccaaaacggccctaaggggcccgcgggcatctcaagacgccagcctcgggactctggtccccaagcccaggtcagagccgaggacgagccgaggacgggccgaggacgcggcgccccggcctccctcgggcccccgacctccccggccccagggaccccggctcccgacctccaggcttcgctgggcccctttcgactccccgacctcccaagtcctccgcccccggcccgtccttcccccaacctgccccgcagcgcctcagtttcctggcccccgacctgcccgcccttaagtccccctgcccccgactcttcggctgccgtccccctggccctctggcctccaagcgcatcccagtcgcccgcccggccctagcacgcgggactcgcacaccccacgaccccgagcccccactggcggcggcgttacctgtggcgcgggcagcggcgcgcaggccaggcgctaggactcggcggggtccgcagcagccagacgccgctaccaccacaataacaacacggacgccaccgccgagtggagaggcggggcccggacccgcgactggagcagccagagcctcccggactccggagccgccggggtccgggcatgcgcagagaaccacgggcacaggggcagctccccgcggacgccaaagtcaacaaggccgggagacgcccccatctggccccgcccccctcagggctcgctccgcccccaagcccaaacaacgcgaggccttgacaggccagaagacgatggcggtaggggagatcacgcgagagcatggcctccacctctcctccccaccgccatctccacgttctcgcaccggcgctggggtgcaggctttcagtggtctcagggctacggcttgtcggtgcctcgccgcacagtcccctttgcattgaaggacacggtcttacggtgtaggagcatttttgaggtgcattcctggatttggaggcgaacccccaatggttacctccacagaggctttgcgaagggcgctcactgacttaggtgaagagcgaaggctcaagactgtgccgctttatagtggccccttgacgtccagaagttccccccagcgccggtcataagcactcccgccgcctgggccccgccctgcctgccaggcgccctccagcctcagctcccggacgcccggcgtggccgctttctcgcgtcttgctgacccgggccgggggcgtgtgctcctcctgcagcggacggaagatgctgggccacgcaagtttccctgggcttggttaaccaccccaaagcccatttccagaaggaaagggtgttgaggaggagggatagaaagtcgagaagagggccgggtgagtggctcacgcctgtcatcccagcactttgggaggccgagacaggcggatcacctgaggtcaggacttagagaccagcctggcctacatggtgaaaccccgtctctactaaaaatacaaaaattagccgggtgtggtgccgtgcgcctgtagtcccagcaactcgggaggctgaggtaggagaatcgcttgaacccgggagtcggaggttgcagtgctgagatggcacctggcctgggcggcaagagcgaaactccatctcaaaaaaaaaaagaagaggaaatgaggcataggggcaggcgagccgggaaaatattgctactaaggatcctaagcagtgaacatgctgttaatacttgtaagactcctagcaaactgcatttaattttttaaattagttttagtgtacataaaggcatgtcttttccaaatactgtactttttgaagtgttctttgttgttcattaatctttgtgcgtttcccttcagtctctaatagtaggttgtagcatgatttgcttccatcgtgtgaattctgttcggttttgattttcaagtatgagagtgagcgtaagctacccttataggttacctaaggtaagttagaattagaacgtctttatgctagggttactactccccaccataaccaaccatctgcaaaagcgttcagaaagaacatgctagcaaggtcaaaagcttcaaatcacgaaataagaacttgaaaacgagcaaaattgctgctgaggcgctctgccatttaactcaaaggcttcactttatttaggtttaaagtatgagtgcatattcagtggacattgagctccgaactgttcaaaatctctattcatctgcattctggagtagagctgcgggtcacattattagctccatctttggatttctgcctggacccagggcactcctaaccgttgtgggatcatataacaatcttacaggatgaattttctgttagtccaagcagaaattttggcacatgaaaactatcttaccataaacaaacaaaaaaagtacaaatggtaatctaaggaaaatagctaaaatcattaaacaactcttacagccgtttcccctgttttctctccattttttaaaagcatattttcctttactttcttccttctgctatgggaatttttcagggttctagaccttttttctcttctgcggctggaaagttaaacacaggtcattttttaaataagactgctagtaaataccttcttaataaacaacaccaaatgctagtcttgtgggtgagtagttgaacagcaagtaaagcactctatcacctgtaattttcctgtggtaggcaca

SEQ ID NO: 587718 - DNA, 4001 bp, Homo sapiens
gctggaaaaatgaatcaagaagtggagcttaaaattggtctctgtggattaattaagacatcaggaaaaacccctggcatcagcctcattttaatcccttggaatcttccttctcattcattttcttctcagagagcacaagaactttattcatgttttataattgtataaataatcagtgattgcctttattattcagacataactggaaatgagttgctagtcatgtgcctgctgatctgaggaagtaaaataatatttagaagtaaaaaaagttactaccattaaaaacctttaactactactattaaaaaccttcttcagcagtgcattaagatttcctcaacattaattctggaatctgaacatgctttaagtggtactaaaaaggcagatcacaggtctaaccttcaaaataaataaccatgtaatattattctaaatgacacattatagtaattttcacaagtctgctctgacctcattagcatactaccttgtgctgtgaaataagttttagtttaaataaaaaggattcagagagagacccaaatataggctcttgctccttctacaaacactttaggcaaagaagtaaatgacaaatatttactagacacttattacacgcaaaatttctaccaggtgctgtccacactacctgcacacacacacacacacacacacacacacacaccttgctcaagatacaatataactggagagagaaaatatactcccataaaagatagtattagccaataggaaaaatatatttgattaataaaagtgatcattagccataacttctggcagcagaaagtgagggcactcagttcagatgtaaacaaaattcttttcacctctctgttttaagtctgacaatcaaaattagccaaacctaaggaattgggccaacggcatcaccacaggaaaaaaacagaaatgctcaggagcaactggtattggaccactcaaagtcttcccatgagtgtacatcagtagtttctctcctaaaatctccttatcaaattaaaaacaaaactgattcctggctatgaactttgcagacttgttcctctgatacccagtacagcccagccacagaaacgaaggagtcggggagactacagcaacggggcatctaggcctattgttcagagggaaccgcaggaccaggcgagcgccgcggggcgcgcgggagctgggggaggagaggcgcgaaccccgtacagttgtgtgtatgggaagggggacaggtatgttgcaaggcgggggagcacaggtgtaccctggggccacgactaaggaataaagactcaacttccagaccgaaaaagacaagggcggtcattcctgaggcttaaactgctgggcacagagggtgacgagcctggggagggtctgatgagaggatcccggaacccaccagggtggggttttggggaggctggagaactgaggggggacagccaggaatattcaaagaaaaggctctgcaatcgaaaggccagcctagaaatccccagacaatggacaatgcgcgggctgggggttgtagaggaggtgaagctgggtgggcagagggaaacaaaagagagaagccctcaagtgtgggcccggcggcggcgattacctgagagagctgccggggattggggcagccgaagagagcggagctggagctgaagctgatggctcctcggcggctgaggacgtgctgggggaccggcctgtccaggggcagtaccggcagctggtaacacacttccattgaatacgcccgccctgcctccgcgcggcgcccgccctgccgcggccgccggcccctgcagtgggagggggccgcggctcgggggctccgggccgagacgggggcagggcgggcggggaccgaccccgggctgggaagccgcgctcacgcctccccaaccccagccctccgctcgggccgccggcgggaaggctccgcggcggccgcggcgccaattaccaggaccggcgcgcgcctcgctccaggcgaggggggacggggtgcaagcggggccagcacaggcaaagtcggaaagggaaccccgccgccctggggctcctcggccgagaggagcaggtacccggactgcagagttcgagcgcagcacgaacggagcaaagcagtgcaagaaaagacagctggagccagcggccagacccagggcgcgcgggactcaggagcagcgaccagctcgggccgccgccgccgccgccgccgccgccgccggagtcctgctcctcccctcccccggagcctgacttcactccgccgccggcgcgagcccggcgtaattcacactttgcagccgcggaccttgcgccaaccacggctgccgccaccgtgacgtcacgacgccgcgccgcaggcccagcgccccgcgccgccgcagcgcccagggagactggcaagcggccgagggcgacagtagccttccttgtgttctgcaccctggggctctgttggagtcgcctcccgacaaacgttttcccccatctatctcatccgcagttcccttcgcgccccgccgtgactcccttccctagctcctcgccagccaaggcgcgtgcgcacgaggccccaccgtttcggggcatccccccgagcgctaaattcgtgcgttccagcgcgcctaggctatggggtgtgctcgtcccgcgctagaggcggcgttccggcctgccgaccccagaaacccaaagcacccggcgcagtcgccgtcctcagccctgaccgcggggtcactgctggcttttccctccttgaattcccattcatgggtttcgctagagaccgctgcggcagtgacgtcagcgggccgcgcgagcaccgtcctcctggctacgtcactgccagtccctcggtggggccaggctccagcgctcgcctggcagatgcggccccggggccatcccgagcccgaggggcggagaggggagccgagaattcggaagtgagaaggggacccggagacaaagggaaaaaaccaagactgagaaagaagtgagagtatgggtgaaaagaatgagaaaggatgatactgagaagacaaagggaaaaagtagactgcatgcccctctaccaaaagtgttgtttgttgactttcgatttttcgaaagcgagaaaagataaagagctcttgacctgttttgtaagctagatgtgtaatttgagtgttcattttgtcacatttctcactaaacggtcaaagctttcagcatcaactaattgtttctaatgcattccagcctttgggatttcagcctgaacaacctctcccctgctggcaaaattattgctttggttcagttcttagggcatccacccttctactgatttgtgatgactagccactgacaaggtggaaggcctttgaaagcactgcataacttccactgatgatgagatcacataccaaatgcacataatccggtaaatgagcaaaagtagaccttttatcatcttcccatggcatgtttcttttctcttgctaaaactttatacctcctacgtggatatttttctacctgtctgctttctactattaaaagaactatgacctccaacgtggtcttgtggattttgtcttcattagatgatgtaagctcccctttagtacagctgatccaactcatctttgaaatccaaattactcccacaacttctagtagatgtattgagcatctactatatgcttgggattatactgagcaagttttcctacgttatcacgtttacttctcacaaaaacctcatgaggtaattattagtacctaagttgagaataggctcatggaaacacgcttgccctagaccttacacaggtaagtggcaagaactaacctcaaataatgtttgaattctgtgtaaatctaaccatccaggaggtgatattggtgtgatgttactgtgtgccaaataaaataactatattacatttaataacatctaagagactcaggttgattaa

SEQ ID NO: 587719 - DNA, 4001 bp, Homo sapiens
tttaagtgtcattgtttttattttgttccaagttttccactaaatgatttattagcaaaagcaagtgccatttccattacacggtaagagtgataatatattaactaacacttgctgtgctccttgtgccaaaaaaatgttccaagtgttttcgcacaaaatctcattcaacccacacaagatctctataaggtaggctttattagttccattttgcagattcataaactgatggttaaagggcttaaacacgggagcactgaacaaaatttttggcaacattaccgaaaaaataataatatagcaaaagatgaagcccagccaaagttgtgaagtcaatttcctctgacatagcaaaatgagctttttcagagtagtcatcttacatatgctagaaaaacatgcttgtacttgagtgcctaaagtattcaaatattgcactgatctaccaaacagtatccttcccattcttcttccttttttcaacagtttttttaaaaataaaatattagcattgtttttgtttaaaaacaatttaattttttggtggcaattaaaagagtaaagtctagaggccaggtgcattgtctcacatctcagttctttggaaagttgaggtaggaggattgcttgagcccaggagtttgagaccagcctgggcaacatagtaagacctcatctctacaggggggggaaaaaaaaaaagtaaagtctctgaaaacacccacaagacaactaatgcattattaacattaacttgaccttcattcaataacttggcaagccaatcctttaaaaacaagaaaatagctgtcactgcaacaaaattaattcttaacttttaaaacacaaagattttaaaatttaaatacattatttttctttaagagatttcttcaatcatattcactaagaaaagaagaccaagagataattatgcttaaaacattatgtttaaacgtggaaaattacatagcaggtattaaaatcttgcttgagaaagaaaattaactttatagaagctttgtttctaagtgatagccttaaaaattcagtttctcaatctagaaagaaaaaaagctgtgtggtggatgaaagatataatcatttttatagaagaatagaaaaaaataatttcaaagagtataattttaaatatgttttactttagttttagacccttctccagatggcaaatggctagctagcattctatcaagaatttctcaagcctgacatttagaattcaacttcaaaaacaacatatatgtaatcctacatttatgtcattatattatagctaaggcacgtattttagcagtagcaagaccttaggagaaaacatgatagacggtggtttttcgtttttaaaaagtttataattgtttagaaatcctcaacattatactttaaatacacaagtgttattacattttctccgagagaatgtttaaaatatatacaccaaaagtataacttaattttataatcttaaaagttaaacttctttagtcataaaaacttctttaaggcagtgatactgaggaatgctgctttgatactgaggaaagatattataaaaagcccttaagaagaaataatgtgggataagaacaaaaactacaaatagtaaatttaagccctttggtcgacagatgaaactcacagctcttttaatcagagaataaaaactgaggcaaaaggaggagaaaatcgagctatttaattcctatcaaatatgtaaactaatgatgaatgtcaccatcctaaaaataaagatggcctaccttagaggtgatccacttgataagaaccaaggccagacaccagatcaatgtaattcccattggatcaatcaaaagcccgctgcataatctctctcttctactagggagcaaggaaaacttcttaggagtctgataaataccagctgtcccgaggcaaaagagaggggacactgactgccttggacctcaagcagctgccttccaacagtgatcacctgactcctctgggaatgcactacccagccagccttcttacccagcgcatgcttcatgccacaaccgcagggttggggtagaactgcctaagtaatgttggaagaggggagggaaaagactttagtgagcgctgacctaacagtctaacaaaatgtaggcaaaggaggcctcaggccagccccaaacacttctacaatcttagtactaacagagtgccttaaaacaactttcaaaaaatgtgtggcagtactaaaaatttcttcattcttttcacatagaactgtttcacaagcacagtgtcctgtgacattttaaaatattaatgcattttattccatcttttcaatttttaattgaaatttgttcaactttttatttcttttagggatagaactactttatgaatattagaggctgtcatattatctatgcttcttaacattataattcactcattttggacttactgaaaaaaagccagtctaatagtgcattttcaaataattaaggacatattattttcaagcactaactgcaatctaacttatatttttggtacagatcttgttctcgcggctgtaagtgagctttctaataacaaagtatgcttctattcatccatcttcataaccgagaggctgcagataatactgctgagaaaatgccttttgtgaaactttcattcaagtattcagcaaatatttattaagctgctaatatgtaccaggctctgcaccagatggcagggatataagcatcaagtaaaagcagacaaggttcctgcccttgtggtgcttgcaatttagttggagtgtacattaatcaaattatgtaaataaacacaaaattgcaactgtaacaaatgcgatgaagcagacgtaggaaacgccaacaaacctgaatctgacctagttaagaggtgaaggacttcttccagaatctctgaaatgaccctgagataaagtgtgatggtgcaagaattgtgaagacagaagacagattgtgcagacgaagaacaggcgtgagggccaaagggtgagacaaaaccaagccaagcaagtctgagagacagaaagaccagggcggctcaagggcagggaggaggagccagatgacgctgcagccctggggagcagaggccaggccctacgagggccatgtgggggtgtcttgtctgaatttcaatctactgaagtactgtagtagattttgctttttaaaaagaccactttggtcaagtatagggaggtggggtaggggctggatgggcagtcaggccaccactgcagaggtcccagagaaaggtgaagatggcatgggctgactgaagaacactcaggaggtgactgcagtccatgacaagacaacgtcatctgattatcaatgtacacaaatgatgatcctaaaatatttgaaaagaaccaaaatagttcaaataataatattattttcattatctaatcctcagtacaaagagcttatttaaaagagaagtcagttctaggcttgtcaaaatgaagtgcaaattaaatttataggtgtaaatccaaattttcctaacctgaaaccattcttaacacatggccataaaattttcacttcttgctacagaactaacaagttataatactcatctttgcataaatccagataacattttaatttttgccatgagactagctttaatatgagaccgtcaaggtctctgattactctgtcttccagtaaggttctagcaactaaacttgaaggatgcctaggcatgagacagagcagcagagtgtatcttaggccaatgctccagggaaacactggcggtcatctgtaagaggctgtgcagcctgggcccctggcttcgaggtcattctctgccactctggcctgggctatacactccaaaccagcctataacctcgatgcttggcccagggatgctacccttcccaccttcacatttctcttccaatcaactgctcaaaaagagtcaagttttggaaa

SEQ ID NO: 587720 - DNA, 4001 bp, Homo sapiens
ctgaaggaccctcatgctcaacttcaagtaccacgactatcttggattttgcaaactacaatgcggtatttttttggcaaatgtagtttcctaggaaagaaaggaactggtcaggatgaacgagtggataaaaatgtgagccaggtcgagctggctccagcatgaagttgcataacagcaaaagctacttttccactaaatctaagcaaaaattgtgttgtagcccaggaatttcaagagagggttgaggacaccaggaggcacccagatgaaacatgtactgtacaaataacacccatggagtgaatagagcaaacaaaacatttaaatgctaacaataatatataatacacaccacagtaatacacacacccagacacacagaaaaataacaccagaccctgtggtcacgggtgtacacgacagggtggacccaggacaggtacacattcaaaaacgcgcagcggtcatggtcccataagctgtaccaaaaaaatgcattttcttcaccatttcccatccaattagataaatataataagccgtgggcttttgattcgttttgaagtttcatacactgacatttttgttcgaagatctaggcagatcttgcaggattcaagcaaaaggtggtagacgaaaacacgcccagaactgcgaggggagggggaggtcacctggaactctgcaaccgaatcagcgattgccgagcttaggtggcactcgctctcagcagcagaggtcccagccacgccgctgggaggtggaagcgatccgaggctcccgccccacctcccagaccgacacgttgacactgggggctggaccaggcgctggctggggatgcttggttcgcccggagatggggacttggagaggtcctggtgggctcctaagggtcggggtagctgccaccacccctagagggctctccgggcaggcaaagagtgggaggaaaggagaccccaccaggagggggcaggtgcaccgggcaggcagtggcgcgggggctgagccaccgagggccgaacgttagaccaagagctggcaggagggcggcgggggcttcgggtcccggctaaagtcagggcacaagctaggtggccccgcgcccagagtcactcaccatcctccagcgcttcgtgcaccagcagaagaccaagcagcagccagaccttcatctcgggaacctcggacctcggagcgcaggagcgcggcggctgcgcggggcggggacgcaggggaggcggcgggcgaggggcgggctcctgggacgccgaagcgggaggattcggtttcttcaggaggaacaaggtttgggggaaaaagttggggaattttttttttttttagttctctgtgtaatgtgacttctcctgccccctggcggagccgcggtgcgcagcacttcttcccagcgcggggaggaaaggctaagcgtgaaatgtacattacaacagccattccttgaatttctccaacgcttggcgttttcaccaaggttatcaagttcaagaaggatcagcgggtgctgatggggtcacttttaaccacgattgtccaaatgttaccagcgcccgccccacctcctcaggcagaacctgagtgctctgtaaaaagtgcttcctaaattatttctgttcattccatttctctcccccacatgcactcactcacaggaccgttgccccgggttcttgctgctcctctgtgtctggccagagttggtctccgcacccagccctgtaactgctggtgggggtgggaggacgggttcattacaggaataacgtggaaaatgagactgtgcagacaacccgggcctctggtggtgaggcaggagaacagggaattagggtaagcacgggctagggtatgagcaggagaacagcaggtgcagccagttcgcagaagcaaaagatcagcaggtgcagacagttctaggcatgattaggcggcacacaggccacatcctcgctcctctgataacaaggcagaagtttccacttcagcctcggactggtcgcaggccagtccttcgtaaggtgtaaccagttggaggcctctaaagggaacccaagggtgttgccaagttcttttcgctttataaaatccctggggagcgtcaggctcttgtggcttgctgcagcgccctctgtgaattgtcttctataaatctacgttttccttcctcccttctgttgctttgtttttccttgcttctttctttcgttactccgtgcatttcgttcaattttttgttcaacaggccaagaacctggacaactctatcaggtaacagtggggcagaagatacgggctttcacaagtccctctgcagagagccatcctgcgtttctgagcttgcagactctcatgatcaaagcagtttgctagcgggggagatgcctgtgtgtgttcccccggtgagaagcagcccatctcattgtaatcttcagcaccaggcactgctattaaagggagctcaattctaaataacaggaaagggacttgtccctcaacacccaacgaaagaagtgctgccatttataacaaactaatgcttctcagtcacttctgcaggaggaaccaagaattctatattctgttgccagctctagccggagctttgccactcgcttgccttgcgatgcagagagcagttggctgggaataaagaccagagttcagatgctgacactggcacaaactctccatgcctctcagaattcacttaaccttctgggttttagcatctcttgtttattaagaaagggaactaggtgattatttcaacaggagtttgctatgtgattaacattacggctatgaaggttgagacatcatctctcatggctacttttaaggagtgaacaagcatttagaccactgcaatgtggtgtgtcaggttctggggagaattctgagcaaaggacttggagcatgcacacaggagagagtaaatctgcctaaattgccccaccgtgagatttcttttcattctgaccccatgaattgactgcttaactctcactccatgttggagcctggggttgggtctagattcctcctctcggtcgcagtatcccctccatgctgactatgcatgtgccaggtccacctctcttgtgccattattgtcaagcttcactgccctggctcagctacatttagccgagagtcgtccctctttctcttgccgcttagaggctcttcttggggggctgaggcgagagagtcatttgagcctgggaagcgaggttgcagtgagctgagatggcaccactgcactccagcctgggcgacagagagagactgtctcaaaataaataaataataaataaataaataaaagcaaagaagagaggcctcagagaatacccattcttctgccaccttgctctcagatttctgccattcagaactataagagaatacatttctgttctttaaaccacgcactctgtggttctttgctatggtagccccagcaaattaatacaggggtctgtattaagatgggaacagaattcataagaagtataagggcttcccaagacacgtagctatttcatcacaaggcttattatccttgaatgagacaatctcaagatgattttaaatttgaaaacaaaaactgccaaagctgtatttttcacaggtcttatttcactataaaaatccacgtgctttgtctctagggtgagaaagaattttattattagaatgtcgtgttgatcttttccattccttctccaacaattactataatgttagccaattaaaataaacattatcttgcagctctaaatcaaatacaacttgaagcctgctttcccaaggcctgattttttttttttgtatgtttagcttgtatctggtcaccttaatggaccttcttagtagcttaaatagttttcagttgatctcttgggtttttagataaacgatcacattacctgtaacacccacttttctttcttctcttttctttgagataa

SEQ ID NO: 587721 - DNA, 4001 bp, Homo sapiens
gcttctggcaggaccttctcatctctttgagccaccatccttaccttagtcaccatgatgggcgtgtggaaatccctgccccctgtgatacggaagccccagggcgctggcccggccacatccaccgtcaacgccatacctgaggaagagaggaccaggaggtgaagtccatgcccctagccggctctgggggcactgtaaggcagcaggagaggagccaaagggagaaggagagggcaccacagctcccggagcagctactcaggggctttggggtgggtagaggaagtggctaactccctccctcagcccggtttcacttccccccaccctgggaagccatgcttctgggttctcccttccttagtcttcagcccagggagcgactcccaggagggggctgcccaggctgccaggcagggggcttgctggagcatggggggcaggggctggcaagtggaggggatgccagcaccccctcagtctcccctcctccaccatcagggctcagtcccactagcgcttgcttcctgtccccaaaacccacagcacacggtacttcctctccactctgggggagggctggtgagtggcctagggagagcagggctcaggaagcaggagtgacgggtcaaggaacaggctggcaccagtacagactgtgtaagtcactggccaggtgaaggactggtggggtgaggccgagtcttcacatgggcctcctagctgcccacctcgttcttggcaaagtggatcacacgggcaagaccgggctccccacctcccccaggggccggctgccagggcaaggaggccagggttcatctgtcaagctggacacacccacccccagattcctgatgctgcccgacagacagccggggtgacaggcctcccatccacagcccctccgctgggcaaggaagtgcccttgcagacagacccctgtgggatttcctgagcctctagctctggagccaggagccaatccaggcaggaagccgcggtgccaggctgggcaccaccctgcccagcacccatcctggggctgccctggggacgcaagtgctgcgagaatctatcaagagcaccagcggtctgtccgctccatccccggctgccttccccttgggcccaggcctagcctctgttcccagcaccgcccccaccccagtccccgaggccggctcgcggccgccccgagattcccagacctttgagccggtcagtggactccgcgctgcgggcgccgcggggaggtgcccagcccgatggcccggctctaccagttctggagcctccttcgctccgagggcaaagtaccctgcgggctgggggctggaggaggagcgctccggccggggagagcgcagctcgcgggggcgcccccgctgatgcgaggctccagggagctgggccgcggacgaggccagggttccgcgccgacaggggcgcggagaggagcccggcgccggggagggcgggccgcgcggagaggcgcaggtgggcgcgctcacctggctgccgctcacctgtccggctgggcgcccaggcccgggagggagggaaggcggggagacgccaccgctcccgctgccgtctacccgactctggggagagcccgcccggggctcccggacctgcctccgcccatgtgatcccggggccgcccctgccgccgcccctagcccgagaagccgccgcctccgcgcggcgagcccaggcgctgccacctggcccgagcccgccggggggatgaggcaggctgtccccagggccccctgcaggctgcgaccgtccagccggtggtgcccgcatcctccccggagcgcccgcaagcccccgactgcccggagcacagcagagccggtccagggactgccccgcgccccacttcgcagacgatcgagggggcagccccataaagctctcccacgccggccgcgctctcccgccccgcatccccaggtcctgggcagggtgggctgcctgggtgtgtctgcggtccgcctggctcctccacccactccaggctgggaggctggcgcagatgcggccttgacacccacaaatcccaaaccaaggccaccctcctgcccgccaactcccttcctgaacgctggcttctcggcagcgcagaacttctctgcctggaatgcccgcaaagggggacccgcaggggccctaggagatggagagagcctcctggctaggggttcactgggcacccccacccctgggctggtaccttcccgttcccgtgggccctcacctcatcctctctgcaggtcttcaccccgcttcctgccccctcccttgtcctctttcaagcacctgaagcccaggctataaggatgaggagagggcagccaaggaggggaccccggtgccagctcggggaggagaagccgtacctggcaaccctctctccggggacctcaaggccatagagccgcctctcgttgggtctccacttggcctctggctgccaggctgctgtgttttcaggggatcacacctgtgggcgcagctgtgcctcgcctgcctcaggtgtgactcattccctccacgctcactctgtgaagagtgccctccccacgcccctcacctgtctgtgcccgcgtctcagcctccttgcgttcacactctggcccccctcctcccacagaccgtcctgggtgtgtgtaaactcctctcccacgggctggtctccggcctcccggcatgaccgcctggcctgacgtacctgctctgcctccctgactagactggaagccccttgaggggagaggcaactacaggcagggtgagcacagccccgggggcacacagacctagccccaagtgcacagctgcgtctcaccggctgtgtgaccttcagcaacctcctcggctcctccgggcctcagtttccccatgtggaaaatggggataatgtgctgcttaccgtcttgttgtaaaaattgcttggccacaagcaaaagccaaggatggcacagaggtgtcaaacagagtccctgcctcaaatggggtggggacttctgggaagggacccaaaggaagggaagttcatccattcaattcttccacacaatcattccaataacattcattcagtgaatactgagtgccaggcaccgtgcttgcctctgggaatggagagtgaatcaaacacaagcccatcatttcctcagagagcccctcctgcatgccttggacagactctacaaatagccccaggttcatctggcagggctttctgatgggtgggttgtgaattcacaaaacccaccacaaagacaagtcagcgaacccaggcagggcacgcctctgtggcacagaaggggacatgtcctgctcatagcctctctgtggccctaggtaagccacatcactgccctcccctctctcatgggtgagccatctccagcagcctctgatcctcccttcacctccccaatcaggccaagtcgaggcacagaagcatctttcaggcaggaccgtggtgcaggcagcccagggttggagggtttgttagctgcgggaagtgccagcgctccatcaaagagagggcatggagttggtctctgtcccagggagaggaggcctcagccctgatatgttttatgagggaatcagggagttcatgaaaaaagagctgggatgggggaatggcaaccaggccagtgggttctgaggaatggttgtttccaggccaggatgggctggacctgcccatttagaaccaaaccagggtgaggatggaggtggatggaggactcgttcttccagctgctgttgaacccctgctgggtcaggccgcacccaggttcaagaaaccagccagggctaggccactgccctgtcaaccacgagcccctcccctctgtcctgacagaactgggcaccaccacctttcactccagccaccacctcttcacacctgtctcaggtgacaggcctagaagacaggattgccaggaagaacataaaagcggccc

SEQ ID NO: 587722 - DNA, 4001 bp, Homo sapiens
aagagacagtccgaggctcctgcccttccgctgccagaccctcagcctcctgtagctttctgccccattcccagatgccatgaggtgctctctaccctccttcttggggtcccgctcctgcaaacacccagggacctgaatgacatgaagggagccggcttctgccacaccacagggcagggcagttggagaaggaggggcttggtagggctgaagagagcaggacaatgtgggggtggccaggatgcaagaggtgtctgactcaggttctaggcccgtgcagagggctctcctggctcggggatctcctggcattcccgatctgtgactcactgcaatgccccaccccagggagccacctgttccccctatagcttggcctccaggccccaccctggccccaccttggcttataggctcaaaaccctaggagtaacccaggatcgggcatctgccttcagtgatggggaggaacagacagcctctatgaggaatgagccccccaagtcctcacttccagctgggaactaaacaaaggccatgccctgttggaagcaggagtcctggggatgcagcctcgggcatacctttcccagaaggttcccctcttcaacccacttcatgcccacgccctgtgccctgcacactcttgggaaccagtcaaacccgggcttcaaggtggctggtgccagctcgccctgcccagcctgtgactgcacgcccagcctggcgcccacctttacccaaccaggcatgggaacacccctcagcccaccctgctgcaggaagcagagcccaggaccttctcaccaaggtgtggagagggcccaagaaggccgctttagggctgagctctagcccatgggcaggagcaagggctgctcaatacgtggggtggtggaggagggggaatgccacaggctctgcagagcgggaggccctaccggtccagctgcagccgcaggggcgaggggctctggcggatcttgctctgggcctcggcatgcagcatgccctccgcgctttccccgttgatggccacgattatgtctccaggccggaggtcagcgtccttggctttgccccgctcggccacctgtagggatgaggagctggcatgctcagaccgtggcccagctggagaagggacttcccactctgctacccaagaaacacagaggctggcttgacccaggccggcctgcaccctcctgcatgtccctctgcctgctcatgacacccagctgatcagccatcccctccaggagcgcaggtggcagcccccaccccacactggcattctaatgggcctcccaaagaatgtgcagtggcagaatttcaggaactgtgcttggaaatacttttggatagagagccttgcccgtgcaaatcgcaccttgcaggtggctgcctgcacagccctcctgtgaatgttcccagcctgggcccaggtcaagaggagactgccaagaactccggggctcttgttctagtaatcaccccaaatggctgcctgcaagtgtggggatagcaactggggaggcaagagccggccctgtcctggtcccagctccctttcactcccaaggtctgttcctgaagtggccaccacatccccgtggcaaagggccacggctcccttacagccagcacgccaggcagcagcagatccctagctccagaacagaaaaagcaagccatctgtgcagagtggggtgaacagggccgacctcgcttctggcaggaccttctcatctctttgagccaccatccttaccttagtcaccatgatgggcgtgtggaaatccctgccccctgtgatacggaagccccagggcgctggcccggccacatccaccgtcaacgccatacctgaggaagagaggaccaggaggtgaagtccatgcccctagccggctctgggggcactgtaaggcagcaggagaggagccaaagggagaaggagagggcaccacagctcccggagcagctactcaggggctttggggtgggtagaggaagtggctaactccctccctcagcccggtttcacttccccccaccctgggaagccatgcttctgggttctcccttccttagtcttcagcccagggagcgactcccaggagggggctgcccaggctgccaggcagggggcttgctggagcatggggggcaggggctggcaagtggaggggatgccagcaccccctcagtctcccctcctccaccatcagggctcagtcccactagcgcttgcttcctgtccccaaaacccacagcacacggtacttcctctccactctgggggagggctggtgagtggcctagggagagcagggctcaggaagcaggagtgacgggtcaaggaacaggctggcaccagtacagactgtgtaagtcactggccaggtgaaggactggtggggtgaggccgagtcttcacatgggcctcctagctgcccacctcgttcttggcaaagtggatcacacgggcaagaccgggctccccacctcccccaggggccggctgccagggcaaggaggccagggttcatctgtcaagctggacacacccacccccagattcctgatgctgcccgacagacagccggggtgacaggcctcccatccacagcccctccgctgggcaaggaagtgcccttgcagacagacccctgtgggatttcctgagcctctagctctggagccaggagccaatccaggcaggaagccgcggtgccaggctgggcaccaccctgcccagcacccatcctggggctgccctggggacgcaagtgctgcgagaatctatcaagagcaccagcggtctgtccgctccatccccggctgccttccccttgggcccaggcctagcctctgttcccagcaccgcccccaccccagtccccgaggccggctcgcggccgccccgagattcccagacctttgagccggtcagtggactccgcgctgcgggcgccgcggggaggtgcccagcccgatggcccggctctaccagttctggagcctccttcgctccgagggcaaagtaccctgcgggctgggggctggaggaggagcgctccggccggggagagcgcagctcgcgggggcgcccccgctgatgcgaggctccagggagctgggccgcggacgaggccagggttccgcgccgacaggggcgcggagaggagcccggcgccggggagggcgggccgcgcggagaggcgcaggtgggcgcgctcacctggctgccgctcacctgtccggctgggcgcccaggcccgggagggagggaaggcggggagacgccaccgctcccgctgccgtctacccgactctggggagagcccgcccggggctcccggacctgcctccgcccatgtgatcccggggccgcccctgccgccgcccctagcccgagaagccgccgcctccgcgcggcgagcccaggcgctgccacctggcccgagcccgccggggggatgaggcaggctgtccccagggccccctgcaggctgcgaccgtccagccggtggtgcccgcatcctccccggagcgcccgcaagcccccgactgcccggagcacagcagagccggtccagggactgccccgcgccccacttcgcagacgatcgagggggcagccccataaagctctcccacgccggccgcgctctcccgccccgcatccccaggtcctgggcagggtgggctgcctgggtgtgtctgcggtccgcctggctcctccacccactccaggctgggaggctggcgcagatgcggccttgacacccacaaatcccaaaccaaggccaccctcctgcccgccaactcccttcctgaacgctggcttctcggcagcgcagaacttctctgcctggaatgcccgcaaagggggacccgcaggggccctaggagatggagagagcctcctggctaggggttcactgggcacccccacccctgggctggtaccttcccgttcccgtgggccc

SEQ ID NO: 587723 - DNA, 4001 bp, Homo sapiens
atttatgaaaactgtgctgtaattaatgagcgttctatccgcatcggtacaagtgatacattctctccatcagatcagatacccttgggagtcaaagtactttcaaatgctttcataaataagtaagcaatgaaaaactcttaatatccttcagattatccactgattcaacaacaagaaaacactctacatcataacttttgctgacaagcttgttaaattagtgtagaaggctcttgatcaggcaataagaacagcatccaggtacaactgttggtaaaacagagcagtgtcaaatttgcaagttattcttgatcacaattttcacggaaaatttcctattccatgatctagactcagccacgttgtatgtagcatcttcatcccaggcagattgggctgattttgccaatgactaataaagaaagatgcactgcaaccagaaacaggaaagagagccgtccattcttactgatgtgcttagcagagcctgtgccaagacattttttccactccatcaatagacccacggaccaaattaattagcaaatgctattaaggcaccgactccagagccctttagctttgcaaagcttctgatgtaaatgaaaaagaaaagctatgctaatcatttaatgtgtcggaaccccagtttatgtaatccgattgcattaaacactctacataaagaccatccgcgatttttcaacatttttctggaaatgcctagccatttcacagctcctgctatctttttacataaatgaagaaagatacgaagcaccacacgccagtatttttttgattagtttcctttgtcgctacctgaaaaactgcactcacaaagacatcaaagctatctcaatccaagacgcgtttgtccctttttccaatctatctcatcccttaataccacgctgattcatctaaaaccatccatacacaaaaatctgtcaccatccttcctgggtacccaacgcaggtagttaagtgaatacctaccaattcgtctgggcccgggacacacacacattctcctgtcatcacaacacggagccgacaacatccacaacccgcgcgggcagcagcagcgacagcagcaccggcccattgaaagcaaggcagagatgctcattagaggaggcggcggcggggaggcgggagcggaggaggggcgaggtctcgctccagcccggtgaatgggctgggaggtgggggggaagaggatggaggagggataaaggggtggagagaacaaggaagccaaccaaaccaacccaccccgccggggaggcaaagccacagcccaaggcagcggggcccaggcgcgagcaggggtgcgccccgagggccagcccctccatccagccggggcgcgaagcccatggactgcagccccgcccgctgcccgccccgccctgcccggcccggccccgccccaggggtgcccgtttcagtccagacgaacaggggccggccggtgtcaggctgccagcggggccagccctgacccggggtgcgtcagggagaccctcaggcagtgccgcagccctacagcctccctggagctcactctgccgccggccccgcggcgcccttcgtgctgacagctggagcgcaggggccggaagacgctagggctgcacggcgcccccgcccccgcccccagccccccgacggcccccagcgccgccacgcccgccccacagcccggacgcccggcgcgcacctggcgctccagggctcgtccagccctccgcacgcccgcggccgccgatccgcgagcacgcccggcgccccctcacaactttggacgggtggaggatcccggacggggcggctcgtggcagggagtagggaatacgaaccgggcacggcaggagaccaaacgattcttcccgacgaggagggggcgacaacgacgccaccgctcggcgctctttccacgcagccccgtgcagctcccggagcgcgagccctcacccccggcctgcccactctgctcccctaccgtgcggggccgccaccctgccccgcccgcacgttcgggccggagtgcttcccgcctgccgattggctgcgcagtgacgagtgggaggggaggcggagagggctgcggccgggggtggggcgggggcggaagaggagcgcgctccccgccagctttgtgacgtcacgggggtcagacaatcccttccattcggcgcgagccgcccattggttccccgggcccgcctcacgtgacccccccccccccgcccccagcgagtggaaggtgtggctgcgcggcgctagggagcggtggtctgtggagctcggcggtgttggctgagcaggctgcggggtcgggagaggggaggcgcctgggccggctccaatgtcttcgcgtgcatggggcccgaggaacgggctgctcccctgtcgtgcaggcttcctagaatctctggcacctctgcggggatgcggtggtgtgggtggccggcccagcggccaagcctcccctgcgcctcgcggttgggtgcgggcttcccagggtaggctgcgggagcggctcccagcctcacgggaacctcaactccctgcggctcaccccagcctgcggtacaaggcgtagcaaagaacctcgagagtagctgttgcttcgttcgtttgatacgttgcagattttaggagcattaacgcccatcatgttttctatcgccccagggagaggaagcaggtgtagacagcagcaagagggagttgtgatgagggaattatctctgtagcgtagatgtgtgctcacgttctctgaggagttttgaaatcagtattgtttccgttgccctgaatggttacaaggagagaacactggacttggagtcagaaaactttcatccaagtcattccctgctctaagtcccatttctgttccatgagattgtttccacctcagatgagattagacttaaggtggcattggtattgtctgtggtaaaacaagatatcttcgagggctcttcagtgacttacatccatacatcccttttatgggatagtggcttctgaaagcttccttggcagtggcagatagagcattgcacttatcttccctagtgttcaccaataagttgactttgatttattacacataacttcttactagccagtcaggttcacaaaatgatgtggagtgaatttctttttatgtaataaaaaacgttatatacccaaactggtcctttataactcctggatctttcaagttgctgtattctctgttctctaaataaactagaggagactgtttttgcccatccccaggttacccatggaacttttgtggctagtctgtctggccttcatcccagtttttacaggtccatctgcctcccttcatcctctcctttttgcttctcaaatgggcttcccataaattgcaaatattctccactactcttcctgtcatttaatttaagtatctggtttcttcttcatagatgcataggatggtgtagcctagtgattaagagtgcagctggagccaagctggctgggttccattcccagctctgcagctttctgtgtggtcatgggcaactctgcatgcctcattctctcacatataagataaaaatgtaaaaagtaatagcagggctgtattaagagagttgacatatatagcttgctaagaaagtacatagcatgtagtgttatataagtgttagctattcttgatattatcgacatgtccaggtcagtgttttagattaagaactcctagcaagtaggagacccaggcccccaagtgcattatattctattgttaggtactaataagttattaatagaatggagaatctttgaaccttagaatatcagtttaaattcatttatatagaggatctctgcctcttaacccttactttgtggacatagagacccacttaactgaagctgtgagtggaattttaagagtttctgctttatgacccagaaatgaagtacatactagacttctc

SEQ ID NO: 587724 - DNA, 4001 bp, Homo sapiens
gtgctgtaattaatgagcgttctatccgcatcggtacaagtgatacattctctccatcagatcagatacccttgggagtcaaagtactttcaaatgctttcataaataagtaagcaatgaaaaactcttaatatccttcagattatccactgattcaacaacaagaaaacactctacatcataacttttgctgacaagcttgttaaattagtgtagaaggctcttgatcaggcaataagaacagcatccaggtacaactgttggtaaaacagagcagtgtcaaatttgcaagttattcttgatcacaattttcacggaaaatttcctattccatgatctagactcagccacgttgtatgtagcatcttcatcccaggcagattgggctgattttgccaatgactaataaagaaagatgcactgcaaccagaaacaggaaagagagccgtccattcttactgatgtgcttagcagagcctgtgccaagacattttttccactccatcaatagacccacggaccaaattaattagcaaatgctattaaggcaccgactccagagccctttagctttgcaaagcttctgatgtaaatgaaaaagaaaagctatgctaatcatttaatgtgtcggaaccccagtttatgtaatccgattgcattaaacactctacataaagaccatccgcgatttttcaacatttttctggaaatgcctagccatttcacagctcctgctatctttttacataaatgaagaaagatacgaagcaccacacgccagtatttttttgattagtttcctttgtcgctacctgaaaaactgcactcacaaagacatcaaagctatctcaatccaagacgcgtttgtccctttttccaatctatctcatcccttaataccacgctgattcatctaaaaccatccatacacaaaaatctgtcaccatccttcctgggtacccaacgcaggtagttaagtgaatacctaccaattcgtctgggcccgggacacacacacattctcctgtcatcacaacacggagccgacaacatccacaacccgcgcgggcagcagcagcgacagcagcaccggcccattgaaagcaaggcagagatgctcattagaggaggcggcggcggggaggcgggagcggaggaggggcgaggtctcgctccagcccggtgaatgggctgggaggtgggggggaagaggatggaggagggataaaggggtggagagaacaaggaagccaaccaaaccaacccaccccgccggggaggcaaagccacagcccaaggcagcggggcccaggcgcgagcaggggtgcgccccgagggccagcccctccatccagccggggcgcgaagcccatggactgcagccccgcccgctgcccgccccgccctgcccggcccggccccgccccaggggtgcccgtttcagtccagacgaacaggggccggccggtgtcaggctgccagcggggccagccctgacccggggtgcgtcagggagaccctcaggcagtgccgcagccctacagcctccctggagctcactctgccgccggccccgcggcgcccttcgtgctgacagctggagcgcaggggccggaagacgctagggctgcacggcgcccccgcccccgcccccagccccccgacggcccccagcgccgccacgcccgccccacagcccggacgcccggcgcgcacctggcgctccagggctcgtccagccctccgcacgcccgcggccgccgatccgcgagcacgcccggcgccccctcacaactttggacgggtggaggatcccggacggggcggctcgtggcagggagtagggaatacgaaccgggcacggcaggagaccaaacgattcttcccgacgaggagggggcgacaacgacgccaccgctcggcgctctttccacgcagccccgtgcagctcccggagcgcgagccctcacccccggcctgcccactctgctcccctaccgtgcggggccgccaccctgccccgcccgcacgttcgggccggagtgcttcccgcctgccgattggctgcgcagtgacgagtgggaggggaggcggagagggctgcggccgggggtggggcgggggcggaagaggagcgcgctccccgccagctttgtgacgtcacgggggtcagacaatcccttccattcggcgcgagccgcccattggttccccgggcccgcctcacgtgacccccccccccccgcccccagcgagtggaaggtgtggctgcgcggcgctagggagcggtggtctgtggagctcggcggtgttggctgagcaggctgcggggtcgggagaggggaggcgcctgggccggctccaatgtcttcgcgtgcatggggcccgaggaacgggctgctcccctgtcgtgcaggcttcctagaatctctggcacctctgcggggatgcggtggtgtgggtggccggcccagcggccaagcctcccctgcgcctcgcggttgggtgcgggcttcccagggtaggctgcgggagcggctcccagcctcacgggaacctcaactccctgcggctcaccccagcctgcggtacaaggcgtagcaaagaacctcgagagtagctgttgcttcgttcgtttgatacgttgcagattttaggagcattaacgcccatcatgttttctatcgccccagggagaggaagcaggtgtagacagcagcaagagggagttgtgatgagggaattatctctgtagcgtagatgtgtgctcacgttctctgaggagttttgaaatcagtattgtttccgttgccctgaatggttacaaggagagaacactggacttggagtcagaaaactttcatccaagtcattccctgctctaagtcccatttctgttccatgagattgtttccacctcagatgagattagacttaaggtggcattggtattgtctgtggtaaaacaagatatcttcgagggctcttcagtgacttacatccatacatcccttttatgggatagtggcttctgaaagcttccttggcagtggcagatagagcattgcacttatcttccctagtgttcaccaataagttgactttgatttattacacataacttcttactagccagtcaggttcacaaaatgatgtggagtgaatttctttttatgtaataaaaaacgttatatacccaaactggtcctttataactcctggatctttcaagttgctgtattctctgttctctaaataaactagaggagactgtttttgcccatccccaggttacccatggaacttttgtggctagtctgtctggccttcatcccagtttttacaggtccatctgcctcccttcatcctctcctttttgcttctcaaatgggcttcccataaattgcaaatattctccactactcttcctgtcatttaatttaagtatctggtttcttcttcatagatgcataggatggtgtagcctagtgattaagagtgcagctggagccaagctggctgggttccattcccagctctgcagctttctgtgtggtcatgggcaactctgcatgcctcattctctcacatataagataaaaatgtaaaaagtaatagcagggctgtattaagagagttgacatatatagcttgctaagaaagtacatagcatgtagtgttatataagtgttagctattcttgatattatcgacatgtccaggtcagtgttttagattaagaactcctagcaagtaggagacccaggcccccaagtgcattatattctattgttaggtactaataagttattaatagaatggagaatctttgaaccttagaatatcagtttaaattcatttatatagaggatctctgcctcttaacccttactttgtggacatagagacccacttaactgaagctgtgagtggaattttaagagtttctgctttatgacccagaaatgaagtacatactagacttctctgttgtcttatca

SEQ ID NO: 587725 - DNA, 4001 bp, Homo sapiens
ctatctttcagttatgcagaggcttagtacatggactgagattatatcctaatgccccaacttccaacatgccttcaaaagacaaaattcctagggaagttggaatttatgaaaactgtgctgtaattaatgagcgttctatccgcatcggtacaagtgatacattctctccatcagatcagatacccttgggagtcaaagtactttcaaatgctttcataaataagtaagcaatgaaaaactcttaatatccttcagattatccactgattcaacaacaagaaaacactctacatcataacttttgctgacaagcttgttaaattagtgtagaaggctcttgatcaggcaataagaacagcatccaggtacaactgttggtaaaacagagcagtgtcaaatttgcaagttattcttgatcacaattttcacggaaaatttcctattccatgatctagactcagccacgttgtatgtagcatcttcatcccaggcagattgggctgattttgccaatgactaataaagaaagatgcactgcaaccagaaacaggaaagagagccgtccattcttactgatgtgcttagcagagcctgtgccaagacattttttccactccatcaatagacccacggaccaaattaattagcaaatgctattaaggcaccgactccagagccctttagctttgcaaagcttctgatgtaaatgaaaaagaaaagctatgctaatcatttaatgtgtcggaaccccagtttatgtaatccgattgcattaaacactctacataaagaccatccgcgatttttcaacatttttctggaaatgcctagccatttcacagctcctgctatctttttacataaatgaagaaagatacgaagcaccacacgccagtatttttttgattagtttcctttgtcgctacctgaaaaactgcactcacaaagacatcaaagctatctcaatccaagacgcgtttgtccctttttccaatctatctcatcccttaataccacgctgattcatctaaaaccatccatacacaaaaatctgtcaccatccttcctgggtacccaacgcaggtagttaagtgaatacctaccaattcgtctgggcccgggacacacacacattctcctgtcatcacaacacggagccgacaacatccacaacccgcgcgggcagcagcagcgacagcagcaccggcccattgaaagcaaggcagagatgctcattagaggaggcggcggcggggaggcgggagcggaggaggggcgaggtctcgctccagcccggtgaatgggctgggaggtgggggggaagaggatggaggagggataaaggggtggagagaacaaggaagccaaccaaaccaacccaccccgccggggaggcaaagccacagcccaaggcagcggggcccaggcgcgagcaggggtgcgccccgagggccagcccctccatccagccggggcgcgaagcccatggactgcagccccgcccgctgcccgccccgccctgcccggcccggccccgccccaggggtgcccgtttcagtccagacgaacaggggccggccggtgtcaggctgccagcggggccagccctgacccggggtgcgtcagggagaccctcaggcagtgccgcagccctacagcctccctggagctcactctgccgccggccccgcggcgcccttcgtgctgacagctggagcgcaggggccggaagacgctagggctgcacggcgcccccgcccccgcccccagccccccgacggcccccagcgccgccacgcccgccccacagcccggacgcccggcgcgcacctggcgctccagggctcgtccagccctccgcacgcccgcggccgccgatccgcgagcacgcccggcgccccctcacaactttggacgggtggaggatcccggacggggcggctcgtggcagggagtagggaatacgaaccgggcacggcaggagaccaaacgattcttcccgacgaggagggggcgacaacgacgccaccgctcggcgctctttccacgcagccccgtgcagctcccggagcgcgagccctcacccccggcctgcccactctgctcccctaccgtgcggggccgccaccctgccccgcccgcacgttcgggccggagtgcttcccgcctgccgattggctgcgcagtgacgagtgggaggggaggcggagagggctgcggccgggggtggggcgggggcggaagaggagcgcgctccccgccagctttgtgacgtcacgggggtcagacaatcccttccattcggcgcgagccgcccattggttccccgggcccgcctcacgtgacccccccccccccgcccccagcgagtggaaggtgtggctgcgcggcgctagggagcggtggtctgtggagctcggcggtgttggctgagcaggctgcggggtcgggagaggggaggcgcctgggccggctccaatgtcttcgcgtgcatggggcccgaggaacgggctgctcccctgtcgtgcaggcttcctagaatctctggcacctctgcggggatgcggtggtgtgggtggccggcccagcggccaagcctcccctgcgcctcgcggttgggtgcgggcttcccagggtaggctgcgggagcggctcccagcctcacgggaacctcaactccctgcggctcaccccagcctgcggtacaaggcgtagcaaagaacctcgagagtagctgttgcttcgttcgtttgatacgttgcagattttaggagcattaacgcccatcatgttttctatcgccccagggagaggaagcaggtgtagacagcagcaagagggagttgtgatgagggaattatctctgtagcgtagatgtgtgctcacgttctctgaggagttttgaaatcagtattgtttccgttgccctgaatggttacaaggagagaacactggacttggagtcagaaaactttcatccaagtcattccctgctctaagtcccatttctgttccatgagattgtttccacctcagatgagattagacttaaggtggcattggtattgtctgtggtaaaacaagatatcttcgagggctcttcagtgacttacatccatacatcccttttatgggatagtggcttctgaaagcttccttggcagtggcagatagagcattgcacttatcttccctagtgttcaccaataagttgactttgatttattacacataacttcttactagccagtcaggttcacaaaatgatgtggagtgaatttctttttatgtaataaaaaacgttatatacccaaactggtcctttataactcctggatctttcaagttgctgtattctctgttctctaaataaactagaggagactgtttttgcccatccccaggttacccatggaacttttgtggctagtctgtctggccttcatcccagtttttacaggtccatctgcctcccttcatcctctcctttttgcttctcaaatgggcttcccataaattgcaaatattctccactactcttcctgtcatttaatttaagtatctggtttcttcttcatagatgcataggatggtgtagcctagtgattaagagtgcagctggagccaagctggctgggttccattcccagctctgcagctttctgtgtggtcatgggcaactctgcatgcctcattctctcacatataagataaaaatgtaaaaagtaatagcagggctgtattaagagagttgacatatatagcttgctaagaaagtacatagcatgtagtgttatataagtgttagctattcttgatattatcgacatgtccaggtcagtgttttagattaagaactcctagcaagtaggagacccaggcccccaagtgcattatattctattgttaggtactaataagttattaatagaatggagaatctttgaaccttagaatatcagtttaaattcatttatatagaggatctctgcctctta

SEQ ID NO: 587726 - DNA, 4001 bp, Homo sapiens
caaagtactttcaaatgctttcataaataagtaagcaatgaaaaactcttaatatccttcagattatccactgattcaacaacaagaaaacactctacatcataacttttgctgacaagcttgttaaattagtgtagaaggctcttgatcaggcaataagaacagcatccaggtacaactgttggtaaaacagagcagtgtcaaatttgcaagttattcttgatcacaattttcacggaaaatttcctattccatgatctagactcagccacgttgtatgtagcatcttcatcccaggcagattgggctgattttgccaatgactaataaagaaagatgcactgcaaccagaaacaggaaagagagccgtccattcttactgatgtgcttagcagagcctgtgccaagacattttttccactccatcaatagacccacggaccaaattaattagcaaatgctattaaggcaccgactccagagccctttagctttgcaaagcttctgatgtaaatgaaaaagaaaagctatgctaatcatttaatgtgtcggaaccccagtttatgtaatccgattgcattaaacactctacataaagaccatccgcgatttttcaacatttttctggaaatgcctagccatttcacagctcctgctatctttttacataaatgaagaaagatacgaagcaccacacgccagtatttttttgattagtttcctttgtcgctacctgaaaaactgcactcacaaagacatcaaagctatctcaatccaagacgcgtttgtccctttttccaatctatctcatcccttaataccacgctgattcatctaaaaccatccatacacaaaaatctgtcaccatccttcctgggtacccaacgcaggtagttaagtgaatacctaccaattcgtctgggcccgggacacacacacattctcctgtcatcacaacacggagccgacaacatccacaacccgcgcgggcagcagcagcgacagcagcaccggcccattgaaagcaaggcagagatgctcattagaggaggcggcggcggggaggcgggagcggaggaggggcgaggtctcgctccagcccggtgaatgggctgggaggtgggggggaagaggatggaggagggataaaggggtggagagaacaaggaagccaaccaaaccaacccaccccgccggggaggcaaagccacagcccaaggcagcggggcccaggcgcgagcaggggtgcgccccgagggccagcccctccatccagccggggcgcgaagcccatggactgcagccccgcccgctgcccgccccgccctgcccggcccggccccgccccaggggtgcccgtttcagtccagacgaacaggggccggccggtgtcaggctgccagcggggccagccctgacccggggtgcgtcagggagaccctcaggcagtgccgcagccctacagcctccctggagctcactctgccgccggccccgcggcgcccttcgtgctgacagctggagcgcaggggccggaagacgctagggctgcacggcgcccccgcccccgcccccagccccccgacggcccccagcgccgccacgcccgccccacagcccggacgcccggcgcgcacctggcgctccagggctcgtccagccctccgcacgcccgcggccgccgatccgcgagcacgcccggcgccccctcacaactttggacgggtggaggatcccggacggggcggctcgtggcagggagtagggaatacgaaccgggcacggcaggagaccaaacgattcttcccgacgaggagggggcgacaacgacgccaccgctcggcgctctttccacgcagccccgtgcagctcccggagcgcgagccctcacccccggcctgcccactctgctcccctaccgtgcggggccgccaccctgccccgcccgcacgttcgggccggagtgcttcccgcctgccgattggctgcgcagtgacgagtgggaggggaggcggagagggctgcggccgggggtggggcgggggcggaagaggagcgcgctccccgccagctttgtgacgtcacgggggtcagacaatcccttccattcggcgcgagccgcccattggttccccgggcccgcctcacgtgacccccccccccccgcccccagcgagtggaaggtgtggctgcgcggcgctagggagcggtggtctgtggagctcggcggtgttggctgagcaggctgcggggtcgggagaggggaggcgcctgggccggctccaatgtcttcgcgtgcatggggcccgaggaacgggctgctcccctgtcgtgcaggcttcctagaatctctggcacctctgcggggatgcggtggtgtgggtggccggcccagcggccaagcctcccctgcgcctcgcggttgggtgcgggcttcccagggtaggctgcgggagcggctcccagcctcacgggaacctcaactccctgcggctcaccccagcctgcggtacaaggcgtagcaaagaacctcgagagtagctgttgcttcgttcgtttgatacgttgcagattttaggagcattaacgcccatcatgttttctatcgccccagggagaggaagcaggtgtagacagcagcaagagggagttgtgatgagggaattatctctgtagcgtagatgtgtgctcacgttctctgaggagttttgaaatcagtattgtttccgttgccctgaatggttacaaggagagaacactggacttggagtcagaaaactttcatccaagtcattccctgctctaagtcccatttctgttccatgagattgtttccacctcagatgagattagacttaaggtggcattggtattgtctgtggtaaaacaagatatcttcgagggctcttcagtgacttacatccatacatcccttttatgggatagtggcttctgaaagcttccttggcagtggcagatagagcattgcacttatcttccctagtgttcaccaataagttgactttgatttattacacataacttcttactagccagtcaggttcacaaaatgatgtggagtgaatttctttttatgtaataaaaaacgttatatacccaaactggtcctttataactcctggatctttcaagttgctgtattctctgttctctaaataaactagaggagactgtttttgcccatccccaggttacccatggaacttttgtggctagtctgtctggccttcatcccagtttttacaggtccatctgcctcccttcatcctctcctttttgcttctcaaatgggcttcccataaattgcaaatattctccactactcttcctgtcatttaatttaagtatctggtttcttcttcatagatgcataggatggtgtagcctagtgattaagagtgcagctggagccaagctggctgggttccattcccagctctgcagctttctgtgtggtcatgggcaactctgcatgcctcattctctcacatataagataaaaatgtaaaaagtaatagcagggctgtattaagagagttgacatatatagcttgctaagaaagtacatagcatgtagtgttatataagtgttagctattcttgatattatcgacatgtccaggtcagtgttttagattaagaactcctagcaagtaggagacccaggcccccaagtgcattatattctattgttaggtactaataagttattaatagaatggagaatctttgaaccttagaatatcagtttaaattcatttatatagaggatctctgcctcttaacccttactttgtggacatagagacccacttaactgaagctgtgagtggaattttaagagtttctgctttatgacccagaaatgaagtacatactagacttctctgttgtcttatcaactttttcctggccaggcttggtgggctcctgcctgtaatcccagcactttgggaggccggggcggaagaattgcttga

SEQ ID NO: 587727 - DNA, 4001 bp, Homo sapiens
ggcaaccacgtttctcttcctccttccacgtgaaaacttcacccagaactgttttcttgcttgtttgtttttttgtttgttttttgagacagagtcttggtctgtcgcccaggctagagtgcagtggcgcaatctcggctcactgcaacctccacctcccagattcaagggattctcctgcctcagcctcctgagtagctgggattacaggtgtgcgccaccatgcccggctaatttttttttatttttagtagagacagggtttcaccgtgttggtcaggctggtctcaaactcctgaccttgttatctgcctgcctcagtctcccaaagtcttgggattacaggtgtgagccaccgtgcccagcctacacccagaactatttaacaagatttttcaaaatatactgacacgaacaaagtttgttactttttgttgttgttgttgttgttgtttaggcagggtctggctctgttgcccaggctggaatgcagtggcgcaatcatggctcagaccagccttgacctcctgggtttaagcgatcctcccacctcaacctcttgagtagctgggacgacaggtgtgcatcagcatgcttggctagtttttaaactgttttgtagagaaaagagtctctctatgttgcccaggctggtctcaaacccctgggctcaagtgatcctccaccttggcctcccaaagtgctgggattacacatgtgagccacttcacccaacaaaaatgttactttttaagaaggattcaactacataattttaagagaagacatgtatttatggttctaaaagtaatgtttgtcaaaaatgttttaaataaaattaaaaagaaaaacaaacattttcatgaacagtaatgtttgtgaaaattcaaaggtacagaagagagtaagtagtcaaagttctttttcctcctctctcatttctcacacgtgggctcagtggggtgtccccctcctcagccaccaaactggcagggaggtttggcatcagtttggcctggggagtcctcaggatgacccacaagtccacacaaatgaaggcttgcttttctaaccggcagagttggtgaggagagagccgaacgccaggctttccagcttacccaaagtagaagcagcttgtgcccttggaagggaagaagccagcctcgtcacccaactccatccagtgccatgatccctaaagggccctgcacaaacgctcctgggtcctatcactgacaaaaacctctcacacaggaagggtctaatcatacaccttctttcattcaaatgcctctttgttggggttctggggagagggggcattcaggctgcagggagggatggtctctctctgggtctctctctgagggtctcagcctcctgcccccacaaagaccccccaggtttggagggcccaagcagagccgaccacatacacagccctcctggtcctgggagaggtgcattctggaaggcaggaaggagtctgtttctaaatccctttctcagtgccatcctccatcaaggtggtctccagatctgacacgtgttctgccttcccataaaatcaggctcaggagatggtgcttcttggttctggatatacccctccctgccatctacctgcctggtagcctctgtgcctcccgcctccaagcctgccctgacttactggcaaaagagggtgtcctcgtccaagagggcctcatgggcacacgggctgttctcatcctcgtctccagtgaccaccatcatgagacccagtaacagtgctgctgtgaccagcctcattgtccaacccatgggcacctggaacagaaagaactttagagcggctggatcccctgcaggggccttcctgcccactacctgtgcccccgaccccaggggcccacttggcaggatagagacctctggttaagcacagggagaaggacaggcagcttccagggctccgcagctaatccagtccaccacccggacacaagtactttgggaggactgggcctcttccaagttggactcaatgtacgttcctggcagaggcccctcccctggcaggacacagctttgttgtcactcttgtcctggctgccagggcagagagcaggctgcaaagtagaagtgcttatataagctcctcggtgcagctccttgtccagtccctgctgttggcccagggatggtcagctggccaaaggccagcctgctccttggctgtaaggcaagccctgggaagctggtgaccccaggctcagggctaggagttgggctgtgcccctcagaccggctctgactctcctggcccccattcttccaccacctgtctccacagcctgtgagcttccccaaggtggaggtggttggacacagtgaccttgtgtaggagggactgctgcagggggtgggggtaggtgcaccccagaccgaggccagctccgaagggccagctccgaagggccagctgaggacagaagggtgcgtctgggtgcaccttgcagctgtgctgcactcagcactctcccaaaataatcgtatctggagaaggaggtctggggagctgcttggggctcagaaaggggtggcctgccccagcagtgcactgggaggaaggggagccggggactgtcgcctgcattcccttggggaacagtcctgccaccaggtgcatgtgggactctggtttgagcctgagtgggcagggagaagaataaaggcggcttgcaacaggctttccaatagctctgctctctgcttctcagaggcgggggtgggagagacgtgccagcaactcaggactcctggcttctgctctgagctctctctggatgctgggaggccactgtgtctccctagaatgcaccacttttccttttcacaaacaagtaaaataattcctgtcaccgtggtgccttgctaaggaatatgagatcatcgctgtaaagtacacgcagctagacctttagagaaactactttcagcatagtctgctttctggctcaattcctgcctccaggatcccaacctgtagcaaaaagccccccttaggggctacatattaaacacatttctcaatcattaggttctctgaagtacaaccaggactcccccttgccccaaccagaaaacatattcccaagatctcccctagtggacagagtctaatagtagcctcctcacaagatcattatgagaatgaaatcaaccaggttaagccctcagtaaggtgcctggcacatagtaaatgctcaataatttatgaatagtctaagtattctctcacggatccatccattcattcattcctttgcaacccacttcactcataggcattaagcacctcccacgtgcctgccccatgttgggccctggggtataggttgagcatgcagctcacaggacagccacagccaaggagatgctgccagaagggctgcccaagaccaagaaactcatcttccaaatggcatccactagagaagtctcaacttttctgggtgtcaactcctttagcacagtgatggcggcctggaagaagggagagcccacagtgcaggttgctgctgttgagcccacttccagtggcggttcttccttactccacgtgccaggcacttttatctccgaatcctcatgccaatccttggaaataggcactattatcaccccatcttatggaggaggagacagcacagtgacattagttaaaacctgatcttggtcaccaagaagtggcagacctggaatttgaaccccaggctctggttgaacctgtggaaactgggttgagtccattgagtccatgctttgttttgagacagggtctcactctcatcgcccaggctggagtgcaatggggtgatgctggctcctgcaacctccgccttctgggcttcaagggattctcctgccacagcctctcaagtagctgggagtacaggcacaccacggctctggctaatttttgtattttttgtagagacggggtcttgcattgt

SEQ ID NO: 587728 - DNA, 4001 bp, Homo sapiens
acagatatttggaaactgttccttggttttctccccatttcaaacatctacataaggtaaaatttcctcaattccaggtggaacccaaagcagcttggatgaatacattattctctatgagctttttaagtcaccataaaatttcaacaaatttcaaaagcaatgcaaaggaattgtcaggggagctggtaaaagtgaagctacctgagtctcgaggttggagattcagactcagtagagcaccagaggtgattcgacagcccatggggaaccatgatcagaatgaaagttattttgtcctcagctttttctttccccaaccccctgtagtgcagtgtatctttggactgttgtcacccattggacactggccacttctcttgttcctttctcatagccaaattaaactgttgttttagttactattacaaagggcagttgaaacagaagttgaattccagcatcactggctagtgagacagtttgaactctttcctgtctacggttatttcgccttcctctccccgtaccccttttccatccctttgctctctcctatttacaggtgagggtagggaatgagggacctgaggttaagagagctggggaacataaatctaaagaaaggcaccgaaatgtcactaacaaaaaattacattatttgtgggaaagatgggaagatgactgcgtgtggaggggcccttagctgggatatgttaggagttgtggtgacagccatcttccttctgacagcccaggagagaacccagtgctatccgaggtgctgaacagaggacttctcggggttcccgaattcccagggttaaaacaaacttggtttgtgcggcgacaccgctacccttaccggtccccagatagtcgcggatccccgaagctaagagccagggcaggacttcagtcagtgttccaggaacagctgagacacccaggtcaccacgggctcgcgccgctgcggctccgacccggtgcgaaccgccatacgcgccgcgcggtgggccggaggcagtccgcgtactgttgcggaaactctgtctcacaaggtgcgcaacactcgccgcgcgcaacactcaccaggaagttgatgtcggccgggcgcactaggcggtagctgcacgtcgcgcaatcctggctgcattcggcccgcacggtcgccaggagcccggggccgagcaacagcagccaagtgcaaagtgtcaggaaccgcgccatggactgcgaggagagagggacgcgtgcttcgagcctgcctgggcgcagaacggggtccctcggcaggaccctcgccgcgacagcctcagcaggggatcgtcgagcaaaagcccgcaggaatgctcctttctggggccccgccctcccggccgacagcttttaggtagacgtggaggcgactcagatcgcctcgcggttcccgggatggcgcggtcgcccccaacgcgaggctgcctggggcacccggctcttttcctgggcgtccgcggcccagggcaagattccggagagaacgccgcagaccaggggcgagagagcgggagccgggggaggcaggacattgactggggtcacaaagaagaaccagggaacgctgttggggaacccatgcaatgaaatgtgaagggaaagagggcgggcagacgtccccaaacccgctcagcaaagacaagcttcgggcaaattcactcacgttgacgctgttcggatggagcaggccaattggaaaagccgggttcagacacgactctagagggaagagaagaaggcaagtgtgaggagggcgggcgtcggggagaagcgggcccgggtgtgctggcggacgtagggcctcaccgtcgcggtcctcagcgtctctgcggggtcacgggccaggctgcggggctctgagcgcctgcctcgccgtcccggggcttaacggctgctggagccactttataattagccccaaaccgaaggaggcgcgcgcgccccaatcgccggcgggctgcagctgacgcaggccctacgccagccccgcgccgacgccttcgcgggaggggtcggtcccccagcacccgcgcgccgctccccccgccgagctcgggtgggggccacagggggcgctcggtggctccccacacggccaggtgacaaacccaaggcagttaggaagtttggggagagtgagataggatcaagtttctccgcataaagtcactgaaattgcaccgtgggatgcgggctccagggagggaagcgaggtgggggcgtttggaaggatagatggactggcttagacttctggaatgtgctggagacccagcgggccggtgaacctgcccctttcccgcctcctccctgggccccctcgcgggtccccgtgggcaccaagcacagccgtccggaatgtcgtcatttattgaccaacctgtcccccacacttgactccgagttccttactgcagcatctaacagcgtcaaggtgcgcagtttaggcgctcaattaatggttacaggaactgaacgattgaaagtttctgggaatcttaaaatctcaggacagaattttcacctttccagttagagacccttggccaagcgtagaagcaggtaaaccctcaggttccgggactgcgcgcttttcagccactgtgggagaggatccgtgtttaaccagctccccggggctcccaagtcgaagacctactgccttgagagcgctgtccagggtgtccgggggtgttggatcagtgagaggggggtgccggggcgggtgtaatgtcagcgcgccaggagtgtggtggggagggagggatgagggacaccctacccgggacgccggggcttggaacctcttctccaccgggagggggccgagggcacactgtggaggctggtactgtccattaagacacgctttcccgcttcctggctctgcaaaagattgctaagcggcaagctgcttacattgcctgaggcctcagtttccctatttgaaaaataggaacagaggtaatatgccattcataaggttctggagagaatcaaatgaaatagtggacgaaatctcttagccttgtgcctggcactatagcaagccctcaaaacatcttctaaccatccgtcatccgtccgtccacctttccatctgtgaccattgtctgcttaccttatagctaccatcgatgtatccaatccacctatgcatctatgtctcctagacctagggggaaaccataaacagttcctgggaaaaggtcccagaggtttccaggccctctgcgccctctgcaaagggctgatttctacagtcgctaggacctgcagcggcgctgctcccgcggggctccggccgcgctgcatgtcccattatagtcgctagagggcagcgctctcctgcgtaggctgggcttgcggggactggggtctcagttctccgcaggcctcaatgtgcgggcttgacacgcagccctcggattagccccgaagctgcacccgagcaccgcctgcctcccggccggggcatcacggtagcaaggtcgggaaagcagagccctggagtggggctggagaaccccggacatagccctagggagccagcattaccctctgagcaggaaaacacaatgtttcccgctttaggttcttttcatcatggggccccttactagctccttactctctccccaaggcaaaggagagcttttgtctttacttcagatttttccttgttgcctgggctttggaaaggaagctgactccactgcagtactcagtgcgaaagtattgcatgaacaaattctacctaaaattaaaggaaacttgctatagctgagcacttgcgaacctgggatcacctaagaactttaaacgcataatcaggagcgggaggctgaggtaggtgtgtgtgtgtgtgtgtgtgtgtttgtgtgtgtgtgtgtgtgtttggaatgaccacatcacgcgatgctttttaagggtgcacagcgcgcagtagtggaaacagtgca

SEQ ID NO: 587729 - DNA, 4001 bp, Homo sapiens
aagagggtgagagagggagagaagtcaagatttgaggtgatacccagggaagagctagctgctacccagtgagctctgctcaagttcctcaacaatgcaaaaggaagattagtagcattttgggagcttggtgaatcaaatagattaagtatgaaaaaaacccatttgaataggcatgattaaaagtcagtcatattaattcgctaactcacataatttaagtaaatatgatactactttggggtcagtctgtgtgattagaaaaattagactagaatccatataacctttattcagatggcagagaaagctaggggagggggctgagcccctgacatgttgagcaggcaaagctcaaaatatgtgtgactgggcacagggaattatggggtcagaaagtggagtcttctatgtggcatgttttggatttttcttcctccttctgtgtctaaaattctttatccacaagatctatccttatatttgtagcactggctcaatttttaggcataggttaaaagctcatgactacaggagaaagaagaaagatgggtgaaggggattgtttctcctattgaagatgaaacatttttctcatagtttaaatatacaaccttcctatgtgtcttctctttaatgccaagttagcacaggtcaaagaaacaaacatttaacctgaaatatataccacagatatttggaaactgttccttggttttctccccatttcaaacatctacataaggtaaaatttcctcaattccaggtggaacccaaagcagcttggatgaatacattattctctatgagctttttaagtcaccataaaatttcaacaaatttcaaaagcaatgcaaaggaattgtcaggggagctggtaaaagtgaagctacctgagtctcgaggttggagattcagactcagtagagcaccagaggtgattcgacagcccatggggaaccatgatcagaatgaaagttattttgtcctcagctttttctttccccaaccccctgtagtgcagtgtatctttggactgttgtcacccattggacactggccacttctcttgttcctttctcatagccaaattaaactgttgttttagttactattacaaagggcagttgaaacagaagttgaattccagcatcactggctagtgagacagtttgaactctttcctgtctacggttatttcgccttcctctccccgtaccccttttccatccctttgctctctcctatttacaggtgagggtagggaatgagggacctgaggttaagagagctggggaacataaatctaaagaaaggcaccgaaatgtcactaacaaaaaattacattatttgtgggaaagatgggaagatgactgcgtgtggaggggcccttagctgggatatgttaggagttgtggtgacagccatcttccttctgacagcccaggagagaacccagtgctatccgaggtgctgaacagaggacttctcggggttcccgaattcccagggttaaaacaaacttggtttgtgcggcgacaccgctacccttaccggtccccagatagtcgcggatccccgaagctaagagccagggcaggacttcagtcagtgttccaggaacagctgagacacccaggtcaccacgggctcgcgccgctgcggctccgacccggtgcgaaccgccatacgcgccgcgcggtgggccggaggcagtccgcgtactgttgcggaaactctgtctcacaaggtgcgcaacactcgccgcgcgcaacactcaccaggaagttgatgtcggccgggcgcactaggcggtagctgcacgtcgcgcaatcctggctgcattcggcccgcacggtcgccaggagcccggggccgagcaacagcagccaagtgcaaagtgtcaggaaccgcgccatggactgcgaggagagagggacgcgtgcttcgagcctgcctgggcgcagaacggggtccctcggcaggaccctcgccgcgacagcctcagcaggggatcgtcgagcaaaagcccgcaggaatgctcctttctggggccccgccctcccggccgacagcttttaggtagacgtggaggcgactcagatcgcctcgcggttcccgggatggcgcggtcgcccccaacgcgaggctgcctggggcacccggctcttttcctgggcgtccgcggcccagggcaagattccggagagaacgccgcagaccaggggcgagagagcgggagccgggggaggcaggacattgactggggtcacaaagaagaaccagggaacgctgttggggaacccatgcaatgaaatgtgaagggaaagagggcgggcagacgtccccaaacccgctcagcaaagacaagcttcgggcaaattcactcacgttgacgctgttcggatggagcaggccaattggaaaagccgggttcagacacgactctagagggaagagaagaaggcaagtgtgaggagggcgggcgtcggggagaagcgggcccgggtgtgctggcggacgtagggcctcaccgtcgcggtcctcagcgtctctgcggggtcacgggccaggctgcggggctctgagcgcctgcctcgccgtcccggggcttaacggctgctggagccactttataattagccccaaaccgaaggaggcgcgcgcgccccaatcgccggcgggctgcagctgacgcaggccctacgccagccccgcgccgacgccttcgcgggaggggtcggtcccccagcacccgcgcgccgctccccccgccgagctcgggtgggggccacagggggcgctcggtggctccccacacggccaggtgacaaacccaaggcagttaggaagtttggggagagtgagataggatcaagtttctccgcataaagtcactgaaattgcaccgtgggatgcgggctccagggagggaagcgaggtgggggcgtttggaaggatagatggactggcttagacttctggaatgtgctggagacccagcgggccggtgaacctgcccctttcccgcctcctccctgggccccctcgcgggtccccgtgggcaccaagcacagccgtccggaatgtcgtcatttattgaccaacctgtcccccacacttgactccgagttccttactgcagcatctaacagcgtcaaggtgcgcagtttaggcgctcaattaatggttacaggaactgaacgattgaaagtttctgggaatcttaaaatctcaggacagaattttcacctttccagttagagacccttggccaagcgtagaagcaggtaaaccctcaggttccgggactgcgcgcttttcagccactgtgggagaggatccgtgtttaaccagctccccggggctcccaagtcgaagacctactgccttgagagcgctgtccagggtgtccgggggtgttggatcagtgagaggggggtgccggggcgggtgtaatgtcagcgcgccaggagtgtggtggggagggagggatgagggacaccctacccgggacgccggggcttggaacctcttctccaccgggagggggccgagggcacactgtggaggctggtactgtccattaagacacgctttcccgcttcctggctctgcaaaagattgctaagcggcaagctgcttacattgcctgaggcctcagtttccctatttgaaaaataggaacagaggtaatatgccattcataaggttctggagagaatcaaatgaaatagtggacgaaatctcttagccttgtgcctggcactatagcaagccctcaaaacatcttctaaccatccgtcatccgtccgtccacctttccatctgtgaccattgtctgcttaccttatagctaccatcgatgtatccaatccacctatgcatctatgtctcctagacctagggggaaaccataaacagttcctgggaaaaggtcccagaggtttccaggccctctgcgccctctgcaaagggctgatttctacagtcgctaggac

SEQ ID NO: 587730 - DNA, 4001 bp, Homo sapiens
acgttcaggtaccaaatatgtaaaatgaaaaatacttgtcctccctacggcaagaatcattatgtgcatcaaatataagcaaaacttttatggctaaaataaaaggatatggagaagaaggaataataaattctaattctgttcataaagaaaaacatttcaaatttgtattgataaaataaattgaaacagaatagggacatatttgtagcttttagaaataaattagctgtgaatatattatttttaaaaactgtaataaatgtacattgagtacaaatgaataattatcccaaaaaccagaattttaatgctagaagaaaaggcagatcatctcgtttaagacataaatttaatcttcttaacaagaaccttgttattcaagcggaacacctaaatggctgctcttgttaaaataaacctgagggtgggcttgctttgtctctccctgcacggctccagaaaatttctacacaagttctcctatggaacagttttaaaaccccagcttgagtactaacactagtttctaaaaataaggagaatacggccaagaggtaaaattgtacaaaggcaactagagtcaggactagaatccaactgtcttgatttagtctaatactcttcagtctactagtctagtattcgctctatgtcctgttacttctatttttttttttaagaaaaaaatatgaagggtttttttttttgactctgtaaataattctttcaaatctctttctggctcaagatcactcaactgtaatctttctggaaacaagtaattgataatataggtgagatcagataagttaaaagagccaccccaagttcattctgttcaggattaagtaaaggtaacactttaggggaaggtgtttagactacaagctgcggtgttgtgagcgcccaagtatcatttaattgtccgaaacgtcaagataaaatatttccgaggggcatcacggaagtttaacagaatgtgttagacttgaacgttcaacagcttgctcattttgccaaaagccctttcactaaatgtgggaaatttggaaaatggtacctcaataaataaacaaacaacgatttttaatttaagaacccaggaaaaaatgttaacaattctcacattcagatttcttatcaaaagtcaacgtgaaatataactaatttatcgcaagcaattttatcagaaacttttcattatctcttcctccataagaaaaccaaactgcatttacgtgcgctttcaacagtgttagaaaactaagcactcaaattttttgtactacatataacactttacatgaactttcagatattaagtaaagtttggatcctcaattctttataaagccgtttataagaggtaaatatcttcacgaccgccaaatgagagaaaaagatttcgaagttcgtctcttaagttactacgtggaatgcagaggggctcaactgcagctgtgtgtgtgtttatttttaatgccgcgatcctaaaaacatctttaggagtttaggtttgcttcactgcctttcccaaaattcagcagctttgatttgccttttccagggagacaggaagccaataaacagggaaaaaaaagcaaacggcgacaattacaaggtcgtgaaactccacgacctcccagctgaaaacaagacctcgggtttgcactccggctctctagggcagacactgaccttaggagtctgcgaaacgcccacgctccacgtaactttctctgaaacattctctggaaagcttgtcttttcctagccgaatctggattaccaaggcttccggaactcgcaggcttccggagcgacgcaggagccggaagtggctgaaaaaaaaaagaaaaagttacaccaacgagaactgcgctttagcggcgctgctgaaggcactggatggccaaacaaccgcgaacgccgacaagccgaagagccgaagggccgaaaagccgaagcggacacccgcgcgcggtgattggccggttggccggaagaactctgtctctgattggcaggagagtcacgaaccggtcagccccgggtcaggggccgcaagtgaggacactacaagtgtcgaggggcctaggggaagccggggcttgggagggcagggctttctctgcttgcggacatcgcgaagggcctctggcaggcgccgccgggtggcggcgagacgcctccgcgcctccggggttccttgttcgctgtcggaggaggaccggctgagggatggcctggtggggagggagccctcgggcaggtggctgcgtcgggcctggggcagttgtgctgcgcttggagacctgcccgccctcggggcctgtgtgcacagggaggataggctgtttatctctgcaggctcaggaaggcaggtagctggcccgtcagtcatccgccctgcaaagcgctcccgagagaccccgtagagcgggccagcgcgcgcctggcctgaggtttcccgcccccggaggccctcacatctccccggtaacgcttaggaattcgggcagccagctcgcctacccctggggaatcgaggcagagcttctgggaatggggtctgagggaagagtgctcaccaggcagtgacatgtagccgttgaggatcgccactgccttctcgttctgtggtatgaatggcagtgtctctctagagagttagtgcttaagtttgaatgatggcaggcacttcaggattccagcacgtagtagggtttaagaacgtcttagttcttacctccagtctcgactcaccgttcctacaaggaacactcacttctacgaaagctctattagacattcgagggagagcttatactgtagaaccagtgttattaggaaagtttttttttttttgcttgtatttttatttcagaaactacccatggagcagagttgctaaaataaaatttattaactctaatgctatccaaattgtgaaacaatggtacaaatgagatagagtagaagctacaaattgatagagtatgtagttcacttaggggtttgggagtggattttctagagctgcaactgtccagtgtagtagtcactggccacctgaaaagtggctagtctgaactgaggtctgctctaagtgtagaacatgcaccagatttctaaagcgtggtctgaaaagaaaaagaatgtaaagtatttcattaattttatattgcttacatgtcaaaatgagaatgttttggaaaattttaaattacgtggcttccattatatttctatggatactgctgttctagagagtaaaaaaatctcactgaagaagagtaggcctttcgtttagcaactgtgaagaaaaccaaccacgctgcacctctcaggtagcctacagatgtgctgtgcttcacttaatttttgagagggacgggggaaaatacacacaaagacttgattgacatagaggacattttcagaaagcaaattctggttcatagagccttatgtatgtcatgtgaacatcacacagtagcgaatgaaaataataaagatatcaagaaacttgaatcatatttaatgaatctcattaagaatgcggggaaacatgcaacagttaaaattctgttgaaattgtttaaaataagttctagattttaatgtttaacctgtagatacagtataccttcttaattttcccatgagctggtgagctgaggttccagggaagctttgtttccagttttttaaagatatatttatttttcattcatttatttaacaaaagctttctgaggcccgggagttttgctaggcagtgttgataaaaatgtgaagacagaaaacagacacggctcttactctctcagagctaattcatatcagttcagaggcagtgaataagtaaataataaccaagacagaatattttcttcttagtaaatgtttacctctgtaaatgcaaaacatgagttattttaaacctagaatttatatatttctagtgacatgttaagagtctttattagaacttg

SEQ ID NO: 587731 - DNA, 4001 bp, Homo sapiens
tcaactgtaatctttctggaaacaagtaattgataatataggtgagatcagataagttaaaagagccaccccaagttcattctgttcaggattaagtaaaggtaacactttaggggaaggtgtttagactacaagctgcggtgttgtgagcgcccaagtatcatttaattgtccgaaacgtcaagataaaatatttccgaggggcatcacggaagtttaacagaatgtgttagacttgaacgttcaacagcttgctcattttgccaaaagccctttcactaaatgtgggaaatttggaaaatggtacctcaataaataaacaaacaacgatttttaatttaagaacccaggaaaaaatgttaacaattctcacattcagatttcttatcaaaagtcaacgtgaaatataactaatttatcgcaagcaattttatcagaaacttttcattatctcttcctccataagaaaaccaaactgcatttacgtgcgctttcaacagtgttagaaaactaagcactcaaattttttgtactacatataacactttacatgaactttcagatattaagtaaagtttggatcctcaattctttataaagccgtttataagaggtaaatatcttcacgaccgccaaatgagagaaaaagatttcgaagttcgtctcttaagttactacgtggaatgcagaggggctcaactgcagctgtgtgtgtgtttatttttaatgccgcgatcctaaaaacatctttaggagtttaggtttgcttcactgcctttcccaaaattcagcagctttgatttgccttttccagggagacaggaagccaataaacagggaaaaaaaagcaaacggcgacaattacaaggtcgtgaaactccacgacctcccagctgaaaacaagacctcgggtttgcactccggctctctagggcagacactgaccttaggagtctgcgaaacgcccacgctccacgtaactttctctgaaacattctctggaaagcttgtcttttcctagccgaatctggattaccaaggcttccggaactcgcaggcttccggagcgacgcaggagccggaagtggctgaaaaaaaaaagaaaaagttacaccaacgagaactgcgctttagcggcgctgctgaaggcactggatggccaaacaaccgcgaacgccgacaagccgaagagccgaagggccgaaaagccgaagcggacacccgcgcgcggtgattggccggttggccggaagaactctgtctctgattggcaggagagtcacgaaccggtcagccccgggtcaggggccgcaagtgaggacactacaagtgtcgaggggcctaggggaagccggggcttgggagggcagggctttctctgcttgcggacatcgcgaagggcctctggcaggcgccgccgggtggcggcgagacgcctccgcgcctccggggttccttgttcgctgtcggaggaggaccggctgagggatggcctggtggggagggagccctcgggcaggtggctgcgtcgggcctggggcagttgtgctgcgcttggagacctgcccgccctcggggcctgtgtgcacagggaggataggctgtttatctctgcaggctcaggaaggcaggtagctggcccgtcagtcatccgccctgcaaagcgctcccgagagaccccgtagagcgggccagcgcgcgcctggcctgaggtttcccgcccccggaggccctcacatctccccggtaacgcttaggaattcgggcagccagctcgcctacccctggggaatcgaggcagagcttctgggaatggggtctgagggaagagtgctcaccaggcagtgacatgtagccgttgaggatcgccactgccttctcgttctgtggtatgaatggcagtgtctctctagagagttagtgcttaagtttgaatgatggcaggcacttcaggattccagcacgtagtagggtttaagaacgtcttagttcttacctccagtctcgactcaccgttcctacaaggaacactcacttctacgaaagctctattagacattcgagggagagcttatactgtagaaccagtgttattaggaaagtttttttttttttgcttgtatttttatttcagaaactacccatggagcagagttgctaaaataaaatttattaactctaatgctatccaaattgtgaaacaatggtacaaatgagatagagtagaagctacaaattgatagagtatgtagttcacttaggggtttgggagtggattttctagagctgcaactgtccagtgtagtagtcactggccacctgaaaagtggctagtctgaactgaggtctgctctaagtgtagaacatgcaccagatttctaaagcgtggtctgaaaagaaaaagaatgtaaagtatttcattaattttatattgcttacatgtcaaaatgagaatgttttggaaaattttaaattacgtggcttccattatatttctatggatactgctgttctagagagtaaaaaaatctcactgaagaagagtaggcctttcgtttagcaactgtgaagaaaaccaaccacgctgcacctctcaggtagcctacagatgtgctgtgcttcacttaatttttgagagggacgggggaaaatacacacaaagacttgattgacatagaggacattttcagaaagcaaattctggttcatagagccttatgtatgtcatgtgaacatcacacagtagcgaatgaaaataataaagatatcaagaaacttgaatcatatttaatgaatctcattaagaatgcggggaaacatgcaacagttaaaattctgttgaaattgtttaaaataagttctagattttaatgtttaacctgtagatacagtataccttcttaattttcccatgagctggtgagctgaggttccagggaagctttgtttccagttttttaaagatatatttatttttcattcatttatttaacaaaagctttctgaggcccgggagttttgctaggcagtgttgataaaaatgtgaagacagaaaacagacacggctcttactctctcagagctaattcatatcagttcagaggcagtgaataagtaaataataaccaagacagaatattttcttcttagtaaatgtttacctctgtaaatgcaaaacatgagttattttaaacctagaatttatatatttctagtgacatgttaagagtctttattagaacttggctgtggacttaaaaatattaggaaaaaaatcaaagttaatttgttcattaactatgagaagttaaagaagaaaaattaaaattgtttttttaacctttacatagaaaagatggaaacattttataatagcattttatatcctctttagccttttagcaacttttagattctaagaatttaacaatagaaatgtaaataagacattgatttatgtccctaatatagttttaaaatgctgactttaagaagttaaatttattctagaatattatgtagttcctaaatcaatatatttgagtcttttaggaaaaagttaagtatggatcttatattagtttaccattaatactatttctgtaacaaagttagaagctcaaaccaccaccaatttattaccttacagttctgtagtcagaagtccaacatggttctcaatggcctaaaatcaaggtgtccacaggattgtgttcctttctagagaggtaagggaagaatctgattttttttttttttttgcttattcaggttgttggacaaattgagtcccttgctcttgtagctgttctccctgtttctttgctggctgtcagctaagagctgttttcagcttctagaggccactcacatttccttggttatggccctcttcgtctccaaagccagcaatggtggattgagaccctttcatccttgtaaatctttctttcttcttcttccattgctgtatctctccaattacagccttttaagaatcc

SEQ ID NO: 587732 - DNA, 4001 bp, Homo sapiens
caaatatttgttgagtgcctcataatacaaaacactagataaggccctacagcacacaaagatggaggaaacagtaggcacactcctctgccagtgaagataccactaattcctcttgggattaggatttttcattacccatgatctcccaccttggtagcacataattcaataattttaatttaacatacagtattacaaaagagactgctttcttatactttacattcaacaagcaataataacatgcttttgttaactgagtatttctactatatttcaatttagacagtgtccacattgataataaaagtggttgtaatgctagaacaaaaactgcaaaggagtacctatgtatccctaggtcattcacatgcaaagtactatattttgggccacagtggccaccgagcacacttgaggtggcctctttttcactaatgggtatgtgaggaatatgaatacattttgagataacctaatcaaaacataactcataattaagaatgtaaattgattgttatcaggggcgaggagagatccgtaaaatgtctttcggtatttgagatcactaatgactatgttccctacagtttaaaaagaaaaaaagaaacacacacacttgtcatcttttataatggttttgtcacaattcataatagacaaaatagaacaacaaacataaaattccaactgctccctcttttctctttgaaagagtctgataggtaagggaaaaaatagcatcaatactggccatgaaaatatgcgaactcaaatacccatggttggagggggagagtgggtatcctcctgctatggtataagcaaatattagagcattaaaaagttaacagggagcttgcccagggtgtagctggtgcaaaagaacaaatgtatgaatatttttaatagaggtcttgtcagtgcgcaacacgtaaggcagttacttaaatgtttgtgtagaaatcgaatcaaccttttctgctgtctgtcacaggaagaattcagtaagggatagttcacaaggtacactaacatctagaatcaaacttagagcccataattaagtgatggattgaatgagtataatcccccagtgacacttagggatgaagtaccagaaaaaaaacaagattttcctttgtcttaggttcgaagagggaaggatgaagagggatttgaattaaggaactttcataaagtaagacagtctactgggagtaaaacttgaagcaaaaacaaggcagaaagcacggagaggagtaaaaacagtaaggaaaggagcaaagaatggcaagaaataggacagtggaagttttcggagatgacaagttagagggaagaagaaatgagcaagaagacatagagaccgacaatgtaaagcaatggtcagagaatgaccgccaggccaaaaaaggtgaggaggtgaggccagacagagagggggtggcacgagacaggcaggaaaggctgacagggctggcagggagctggagaagcctccaggtttgacagccatccggccctccgcaggggggtaaggaagggaggggaagagggagctgcggcgcccagacaatagggccggcgagttacggggagggaggcgggaggggagcgggccggaaagagagacaccagaatgggggcgtcccgggcggcccggcgggggccaggcggcctgccggctcagccgccgccgcctcttaccgactcggcctcctctctgcacagcagccgggccgtccggggccgagctggggcacgagcagggcggccagcccgggcctctgcctctgcctccgcccaggcagcggccggggagggagcaggagcggagcgagctggggccgcagcgccggatccgcccaaggtttcgcgggagggagctgggtccgagccctcaagctcgctcagggtccgctgccatcgccgccgccgccgccgcctccgccgccggccagccctgacgcgacgccgggccccggcgacgtcagccgcccgcgacgtgccggaagcgggcctggccttgtcacgtgactcacgagggttgggcccgggccgcgcagccgattggcgggccgccgtaggaggcggggctttgcggtcgttgacggaccgctagcgggcggggctctggttactggaggaaagaacgcgagctcttggtgcctattggtagttgtgaagtatttgacctttgagatttgaggacgaagggcattgtttattattcttgattcgttgggaaccacgtcaccaaaacccctttacccaggacccttggcaaactttttcaaatgcattacatgctttcttagatatccatcccactccacatcaagaatagagcatggttactactacaaaatcaataaacctcccttgaatggatgctttgtgatagacactaggctgtaaatatgtcacatgacaatcacaactgtacaactgtattacaattgtattgctttccagtcttggagatctttacaatacaaagacgaatattactaagatgtgtgtacgcgcgtgctcaggcacagctgaataaccttaacctatggctacattgatatcacttccccaagactacacagctaatgatagcagaactgcttttatcgaatacctaccctcccaaactttactaagcacaggagacagtatccttgctgtggggagaaaccaataagtgaacacattgaaaataatattgaaatgaaacatcttttttctcttggtttccactgtaccactctggttttcaagtgcaacgttgcatacaaatgtcacttatatttatcttgcttcatagtgtggagttaaaatagcaaagtaactctctttaagcttcagttatagtaagatttggtaaattaaacaatcattctttttttattcaacaaacattcattcagcatctactaagtcactaatagctactgagctagactgagcatggtgatacatagaaaagatataaataagacagtctctagtggatatttgttatagaaaagatataaataagacagtctctagtggatatttgttatcttgttttttggttgcccagcatctcaactctctttccatgtttgagaaatttctcatcatggttgcattagttcagaacaccaaatacttgtagcatcttccttaggacatgacaggattatactttccaccctccttagaattatgtatggctatttgatttgctttggctgataaaatgtaattagaagtgagatttgtcatggccagttggtaatttttaatgccagctcaccaaagtttctgtctctggcacagtgtaaagcactgcttgagatgatagctgctctaccatccaggttctagacagattatgatgaaccaaggcctcactgataatctacaactactgtgttgtataaggaaaaaaataaatatttattattttaactatggagatttgggtgctggattgtttgttacatggcataatcctacccaaactaaatgatacatccaccttatgaatcttggatgcagaatcaacctcccactaaataagatgaaaatatcagaaactcatgtttccagtctcccttgcagctaaagttctagcctcaagtaaaactcttttaccaaggactttgtatcagaagttgctaatgatgttcaaaataaggaaacttttctcccacatctgtggcagtaccagtattcaagtttctgatggtcagcctggagttaaatctttctgaactctggcagaacccctgctgaatcacaagctagtgactgagaaaaaataaatatctattattatacaccactaaaaacttgaggttatttgcaatttaaataaaatacatacataaagaacaacagattctgtccattctcccaactatttgttgagaatccaccctggaaagatgattgttccattttaattggaacttgacaatgggtcttccaataatgacacttgaaagaaaaaaata

SEQ ID NO: 587733 - DNA, 4001 bp, Homo sapiens
gtcctcctagaaataggggcagctgtgtttggcggtaggggtctccaggacctgggtgtctgcttgtccctccctccctacggttctgggaaagctgagatgacatccccccgctagcttgggagggtggcagtgagtgagctggggtggacagaggggtgggtgtgaacccaagttctctacacccagaagactggggaagggcagggtgtgagggacaggttgaggcaacacccgagaaacacccacactcctgtgtggatccaccccaagacaggcatgtacacacccacacacaggcaggcacgcacgcgcatacacacatgcgccaagagtgcccacccacccgcgtcccacacctccgcagatgtcctcactcccacacacccatctccacattcaggtgcctgctgccaccttccacattctaagaatgccccacagttttccctcttcaatctgtcacctccatgcacacccagacatgttcatgtccacaggctcacgcacacacacgtccacgcacaccgcctcacaagccatatgtggggaaaagaggatgccacaggcaccaacatgcatgtgtgccacctccacaagaaggcacgcaacccacacgcctgccggcacacacatgtgtgttcatacacacagcagcccccgcccgaagtctggtattctctctcgaatcatctccaggctcaaagacagactttgaaaatgtgtttgcctctggccacactctgccagccctgagccttcatgccaacaggtttgtgcacctacgtggctctgcccacagacaatggtttctgccccttcttctctttacccactccatcctgctctgggtctcacctccccatatagaaagcccctgtctgcatacactcccacacacatgaaaagggacatggttacccctaaatatactgcctcatagtgtccccacccacgcacacccacaggctactcaaataagtcccccacacacatgtacctcacgtgtgccagaaagatatgtttctagacatgcctcacaccattcaaaacccacacatgagcatgactgcggacagacggacctatctgcgccagcaagcctccagccaactcgcgagcgcgcacacacacacgccgcgcacaccggtgccccttccccatgcccattcaaacagccaccctgccacagggaatgcttcccccaccctgctgtccctgttggcatcgctgactgcagcagaacggtcacggggtgactaactgtggtgccccagagactggattcagccattaaccactttgccaaaggcctggccggggggggggagaggggacaaggtcgtcaggcctggcagtccaggtgggcaccctgggtggtggcaggaccctagagcccccagatcccggctactcaggatcaacagcagcaggttccagggaggaagggtactcacctggctccactgggctctgcagaggaaaagctcgcagggaggacagggagagacctctgcgtggatgagctccccggcaggggacagcagccggacgcctgggtcacgggcagtggcgtgcgcttgctcctctcccggctgccaaggaggctgcttccatgccccgcagccagctcctgtctggctgtgcagcgcgtcgctgctgcccctggtgagacgatgttcccagctgagcagcgcaagaagagaggcaagagcgaaatcaaagcagcgtggaggagagagaggcagagaagggagaaagaacgagagagccagaccgaatctgcctccaccaatgggatcagcggctgcgcagcgtcaggtgataataagcaggcttggtccctgctcgccgggctggtgggagggggaaagggcagagggtctcccagggagctacacagatgtcctcagggacagcaacacacgccgcctttcccccattcttccaggacaagctgccctcagaagtccctccaacacaccccctacttggaaatctctgacttgaatgcagcccccaaactttaggatgctgggagaggggtggagcttagccaagggcttgggccccaaagcaaagactctgattgggggaaggggagggaggctgtagaggggaaaggtccagatggggggtgtgaagctggggtggctgtcttcagtccggagcctctccttggggccttttggtgaactgtggttccattttcttaccaactctagagagagatggcagacctgcagctcagggatccctgtgggtctggcaagaaccctctggcagcttgggggtccacaggaaaaggggctgggagagaggctgtggcacagtgcagggtgcacaggggtaagaaaatgggggtgggagaacacaccaagctctgagtgtcctcagcccaccccactctctgagcacaaaggaagccggccctgggcatcttggggagagaatgtaattctgctctcacggcagcaggaggctgttctgccatcaagaagcagactccgtggaggccatcgggaagaacatccaaggaaatgtgagtccagcagcaagcagggacagagggttgcgcagtggtgaaaagcacaggctcacagtcagatggatgtgctgagaatccctgctctactgctacccagctgggggaccttggacaagccactcaacctctcttcatctgtcaagtgggatcacacaggtttattgtcatcatggaatgaaataattaggtaaatcgcccagccctgggcctggcacatcagaagtgccagtcacatgtcagaactgttcttgttcccatcatatcgacagcatcttcctgcaaggagcccacagtcctctacgggagagaagatggccatttagaggatgcaattagagaatgaggagcacacaactaaatcgtagggcacagatactcattcagagaaagaacaatgggcggctccagggcacgtgcagggtgcaggccagaggaggctgtggaagcaggagtgcggctggggtggggaggattggcacgggggcagctgacaccaggcaggcccagggtgaggtcttggtgagcaggagaaggtgtgagctgagcctaagaaacactcaccaagagggagttgaggcggcaggcctcagtgcaaaagtcagaggaggtaacagcagcagaaagtgagagttcacagaatgcaaagacaagcagaagccaaccctgcctgaaacggctgtgagaacctcagtgagcctggccaggtcctgaactgccgaatgtggggtggtgcgtggcactgaggcaggactaagcacccccttggccaagcatgactacgtcctgctccgacatacccacgccgagctggtgagctcagaagagatgcaaaacgtaacctcctggtgatggccagcacatgacatctggactacaattctgtcccaggccgggcgcagtggctcacaagaatccgaacactttgggagactgaggcaggcagatcacctgagatcaggagttcgagaccagcctagctaacatggcgaaaccccatctctactaaaaatataaaaattagctgggtgtggtggtgggcgcctgtaatcccagctacttgggaggctgaggcacaagaatcgcttgaacccgggaggtggaggttgcagtgagccaagattgcaccactgcactccagcctgagtgacagagtgagattgtgcctcgaaaaataaataaataaataaataataaaatcctgtccctaggaccacacagaggggcagtgcaaggaaaaaggcaggttctctgtgacttggtttccccttctgccaaaggaaaactagccccagcaccatccctgcctcccaccttctcgggatgtcatgaggagactgcacgaggtcctgtggcccaagcatgagcaatagccatctgagcgcccctttgtggagctgcgtgccggcgacaggtgaaggcacagccctttaggagcttctgcctcttcttgcct

SEQ ID NO: 587734 - DNA, 4001 bp, Homo sapiens
tgtgactctgttacatcatttagcaagtctttagttttcctgtgacattggcatctgcaactagccaaactttttaatataacttatttacataaaacaagtgaatctagaatatgataaaaatcccaaattttaattcagcacatataaaactgttagtggtaccccctcccctcaccccaatttggaaataccatattgatggtcttcattgccttaaacaggctccaagctgtgctcttgtaagacgctggactttaaatcataaccttgcataaattcaaaaccaaataaaaattttaacaagactttttcctttcaatactaacttttttttttactttctaagtaaaatgatttaaacattgtctatttttaagaaagagcaaaaaatgtgttcacggcaagttggaacagtgtgcaaatgcactggcttcactgttatctggacagcaaagcattaaatcacaaggagaaaaaagtcagcatgttctcttagaatacaaataggttagcgtcagtaagaactttgtccaaaaaagggaaaagacacctacccagagaataaatcatgcatatgaaacctataattttaagaagtattttcaagaaatgatatagctgataaatatgactgtgagataaagcacagaaaaagttcatgtgactttttttaaagtggaccttccaaatgtgatcagtcaacataccccactttttatctatgattcttacataagatacaattcaccagtagctatggaactcacagaagaaagtctacatagattctctctatctgtctgtctctgtctctctggacctctctgtctctctgattctgtgatgcaacagtactcaacattattaggcacataagaaccttaggttaaaatatgtaaaaagtccatatacccggacatataaacactcgtggtcgtttgagattctgcagatgtacaatataaagctttctcactcagaacttaaaaaaaaaaaaaagaattcttcttaccatatattccatatttgctgccggtgggaacactttgccccgaacttgattatgataatcaagaatggcgatcatgtcattctgcgaaatgtagcgcttccgcctggctttggggatatccgctgaatctaattgtgctttcagagctgcttcaatatcagtgaaattattggttggcggggatgagtcagtggaattgagtaggacgacggtacttgcttcacagagaagggagaacaggagtgcactgctgacggcagagattgctatcattttgaggggtggagaagaagaggccaccgagtttactttgctttaaagcagaaaggtagagttagggtctatgaaaaaaaatagggccagagggtatgaatttacaaagacatcatttgggagcattgcttgatttgactttcttcaaaaatccaaacaaatgttgaactcaagcctaggagataacctacagtagaatctctattcattttttagtgtcatgaggcagacccctaagaggaactttgtatagcagagaaaaataaacagcatgaccactaaccctaaaatgaatgtgaaccatttgccccaaatgtctgaaccacaaaatatattactgcatattttcagtgggaaattttcagcaattgaaattcacctggagagtgaagaaaaaatgaatcacaggtaacaacagagaatgtgctgataatgtctgccagacatatagacacaccaagtgatagaacacatacaaaaaagtcatagtaatccaatctcatttctttaaaaaaatgtgagctactttaaaatcaatgcatgcaatataaacttgttgagctaaatagcttacctctgcacaatgccaaaatgaatatattgttcttccaaaaatttaaggttctttgctatgtggtagcatgaactcttgtaagaggagtgtgtctttttacaaactctctgagagcaaagctctgcaaggtttgaatgctgctggctagaggagcagctaacagcttttatatgtcacagtttgcaacgtccagaaagggcagtctttctaagggtctctcttagccaaaatcaaaggggaggggtttggggtagaaaaaaacagtgattgggtggcaacctttttatgtgggtggtgaggaaattgagtcacacccacagcttacaaagtacaagccataaaagacaaacccctttttctctgggcttccaccttttctgtgagtaatttctctcattttatgctttctagttcctggttcccatacaaaaaagaagaaacaaagacaaaaaaaaaaaagactgtgggttcatgaaaaaacagacagttgagtaacaagcagtacatttttttaagacagtaaatgacatgggagctaaaaagaacaagctgatattaaatcaagagatcagctaacatagttaatctgggtggccacaaatatgattcgagagggatgccaggcaaatcggtagtaaccaaactatagcatatgatattaggataatagatgctcaagtggctgtgttctctgcttccatgtggctgcattcctgtgctttatatatttcttcttctctctcttattttaccttctctcccttttttctttctctacagagtgaggtcagaaattacttgctttttacctgccttgtataaaatgtgaatagagaagctcatggcaaatgacagcagccaagataacatctgtttcaggtttagagcatatagttgaaattttaagcagagaatagctcagcctctcaggaaatgtattagagggcataacacagaggccatgaagaattttaacagcagcagcagctgccaacaattagaagtgccttgttaggaggatgtcacaggggcaaagtctatgtcaggcaaagcaagaagaagaatgtgaacattggtgctctataatgaaaggaccctccccaaaatgcgtcatgatctcattaacaaaatgtggaccacttacagtcagtagcaataggaatcctggaaaacacacgctcttcagtttagaaacttacttaacttacactgattttttccagcttgctaatgtgattgtctcccacatgtttcagcagaagaaatactatgtgaatttacagtcatcagaaatgatggtcatgtggcacactggacaggcagccaagtttcctaggatatattcccagttggatcacgagtagtatgtgtggtcaaatgcatactgtttaactcttcattggtgcacctaaaaatgggagagaaaagattcacgttctatggtgagacagacatcatcaagttctttaagagggtagtgaggtgtaccagaggtgtcactaaaattcaaactacagtgatgagatacagactttataataatatataccaaagtccaggttttgacacattttgatgactattcaactcctaactaaagtgaaatcattttaggagagccatagctgaaatattgagagctttaaacaaggaattaatactaaacttgaaaaggcataaacagatatataaactcaggaggtgagcaaggatattatgaaacattggagcaactagaggaaattcacatggttgttcacagctgcagatcttaacaagtggagctgtccaactagggttgcaccactttggaaagtattcatggcaccttcaatgaatctcaaatatgctatattaaggattcctgaattaaatcagaggttagatgagaaactctctgtaggccatccagctctaagatctgtggactttttgagaaattagtggcagcacacattagcctttactctctacatatctcacacagtttcccagctatctgaggaacaaaaggacttttaatacctgaacagcagtcatgagcctttcattctccagggtgactgagttcttgcttagaacctcataagaatcgaaagttatatttaagactacaccctttgtcatatacacaaagag

SEQ ID NO: 587735 - DNA, 4001 bp, Homo sapiens
taaggaactgcaacctacgttagaacttaaaggaagcgaaagcctaccgtaggagtatactcttataacatataagtgagcctcaatccattacagcagctaggcttcaatcacaggcagccatctgattcaaataaggcaaatcagagcggtaaccctaaccaagttgtcgctgtacctcacttccgtttactgtccataaatactgcctgaccacatagcaggttggagttcttagaaccggttctagttctgaaggctgcccaattcttgaatcattctttgctcaatcaaactctgtataatttgtctaaggtttttcttcttaacaacaccaatcctaagtatctaattacagaagatgctatacccatttagcaaattacgaaaaagaaaacacaaaaatattacatattataatgacaaggatttgacaatttggaataacgttgggaagaggagaactgaaaacactctcttgaaatcatgtaatctgaattactgatgcctacaaatagcattttacacctctatacttcagacttttcaaactatgttcatgttcaccatctcactgatttaaggccacctagggataaaaatattaagagaagattttgtggcctcacaaacactgatcaaaggaacagacataaatgaatagcagaactagggccaaagtcgccaagtgcatgctgaattaagcaaacatcaaagaatacgaaaaccagaagagatcttagctatctaggctctaaccctgactcctcattttttactggtgaaaaaatagaaccgacgggttcagtctaaaacatactcatttctatgggtctccgctggtcttactggcaagaacataaagatacagagataactggatcaattttgccattttctacctcaatgactaggggcaaattattttcctttgaacgtcaatttctgcccctgtaaaatcgggatggtgcctgacccatttcgttttgtgctcctaagtcctccaccctcttagaaaagagagtgctaacagcacttatttcacaaaatccctgtgctggtctgcttgatctgttaaataagctgtttctgttctttgctcactgtacaactcgccaagcaggacccgcttttcaggatcaaagcatgactgccatctggcggcaagcgaccttcgctacaggtacaattcagaagttcagcagcctctacagagacaggggtttcaccgactccaccaagtgaagataaatgtcaaaggtaaacaggcaggacggggcgctgtggccaactaacaaggtcaaaaacgccagtctcacttagaattacacattagccctgcactccctcgctaagtggctgacgtcccatatttgagacttctaactcctttgctttttctttttctgggtccaagacatcttggacaatgtgattacagtttcaagtgatccttctgctcaaccttctctttttaacctcaggaagctgaggtccggggtgggtgaagcaaccagtccgggaccccacaaagggcggcggcggggccagtcccgggacccggtgttctgacccacttcgcacgcgacccagggtgattctgagaacggcgtctccgggagacacttgcggtctctctcactagcagacctgcggccaactttcggggagctctgcggcgagcaggacaatcagagccgggctcggctccccggtcccccgatcccatgcgccaggcgcgccggcaacccgagctcccagccactccgggctgccgtgcgcgtcacccggcatcttcaccaacgcgcctgggtcgggcctccgcttccgacactcacgttcagccagcatagacatgtcggagagcctgtgataccgccgcctctggacctgggtgactgcggccactgggcgggctggagactccaggagaatcaggacgtgcgtaactccctcgccggcggactgcagcggacggggcgcgtgctggtgacgtcagtagcgcgcgactcgctcctcgagcacgcggcggcgagggggcggagcagggcggggcaacctggggaggtgacgggagaaagagggactgagggggcggtggccgccctgcgggaggtggagaaaggagtacgtattcgctcattggctagagggagtgtgcgtactaagctattgatgtgagtaaagcccgcctgggcgtgtctgccgcggagcataagctcacgtggattacctgtagggtctccatcaggaagccctaggtgccggcaagaagggtagtggaaagacgtgacctgccctcaagcagctcagcctcacggggaaaagaaatgtgtaaagagctgaacttagggtcatggatgttgtatggacaaggagtttgaaaaacttggctggaggggaggactttgcattgtaatgtcccatctcttcctcgtaccctacctctgctttctgagatagataaacaaatggatgatagataaatagatagatagatagatgatagatagatagtagatagatatcagaagataggtctgctatctatcggtttttttgtgggaccccacacaaaatagttgtggggaaaatgttacctctttaaataatgggatgccttcaacaaggcaaaggttttatttattttctccaccacagtgcacacactggaaggttgcctttattatatccatttctgtattcgtaccagcacctcgcaaaataatgtgagtatggtaaggctccatagatgtttgcaaaatttaattcaagtatccctgtctccaggggagttctaataagctcttagctataacacttttaagtatggtaaagacatgtttttgggtgagtgactctccagtaaacttcaggtgacagtgcacacagaagcctttcctacataaaaggaaggtaaaaagagcaccactcaggtgccaagaaaagcaattgaaggactagattcttgtttacaatgaaattctccctttaactaggaatctggatgaaaaaggtaaaccctagtttcataaaagttagaagaaacacaaaaggatgcttatagctatcagtgaatactgagggggtgaggggaggcaagtgaatggaattttcccagccaaggcaggaaagctgtgacattgtgacatagggaacaaggttaaaagtagggcactggactcaggaaggcaggatcacaaaaatcttaggataattagcagatctattggattatgccagagagagtggaaggtagttatatagaatggagaatactgaattagtcggaaatcagagtttttcaagcacctcctgtgttggtatatgatttcagaaaggtaattttgtctctaagatggtcaagaagatcgaagcagacatttatggcctgttgccatggttcaggtggtaaatggttagttatcgttggatcttctgttacaatgaggtgtctcctggaaacgctcagttagaggccacagaggaatattgtagaagggactctgccttttggtgaatgcaggatggtttcctattttgtttcaaccccagcattctatatggctatgaaatattaatggagatcatctactgaaaaagaatattattaagtttgggatttaaaaaaaattacagaatcttgtttgtattttaactggccagctggagtggaaattgcacttgttaaaagaaggtgatccaatgtaacccattccatcttgtccttcagtgtctcagcagactcccttgggcaatacttcacagacatgactgtgcacgccagtcacccagagatcatgttaaaatgcacatctggttcagcaggcctagggtgagtctgagattctgccttttttttttttttttgagacagggcctcactatgttgtccgtgctggagcataatagtgtgaccatggcttactgcagcctctgcctctctgacttaagcagtcctcccacctgagtgtcctaggtagctatgactacgggcatgt

SEQ ID NO: 587736 - DNA, 4001 bp, Homo sapiens
agaccctgtctctacaaataattaaaaaatagaaaaaaaaattttaaaaactctcttctttcaaactccatcagaagtctccagagtacacagtctttctgctttgagcctacaatacttgctcagtctcacaggttgcatttaacacccttctctctcccaggttacccggggtgaggctctccctggcttccctaccaaatctaaagcccatcaggtctcttcaaaatcacttcataacctgtaggtcgggcatggtggcccatgcctgtaatcacagcactttgggaggccgaggcgggtggatcacttgagatcaggagctcaagagcagcgtggcaaacatgatgaaaccctgtctttactaaaaatacaaaaattagccaggcatggtggtgcatgcctgtaatcccccctcctcaggagtctgaggcacaagaattgcttgaacccaggaggcggaggttgcagtgagtcaagatcgtggcactccagcctgggtgacagcacaagattctgtctcaaaaaaaaaaatatatatatatatatcactttataacctacagatttcaagactccctctttaaggggctcctctcattgtcctgacttgcccctgattcctgaaaaatatttcttaacggaaaagaattttttttttttaagagacagggtcttgttctgtcatccaggctacagtgaagtggtggcatcttagctcactgcagtctcaacctcctgtgctcaagcagtcctcttgtctcagcctcccaagtagctaggacttcaggcacctgccaccatacccagctaatttttaaaaaaaatttgtagagacgggatcttgccatgttgcccaggctggtctcaaactgctgacctcaagtgatcctctcacctcagactccccaaatgctgggagaagcctcttcttaactttcaaaaagctgtcttggccgggggtggtggctcgcgcctgtaatcccagcactctggaaggccaaggtgggcagatcacaaggtcaggggttcgagaccagcctgaccaaaatggtgaaccctcatctctactaaaaatacaaaaattagctgggcatggtggcctgcgcctgtaatcccagctactcgggaggcagaggcaggagaatcgcttgaacctgggaggcggaggttgcagtgagcagagatcacgccactgcactccagcctgcgctacggagcgagactccgtctcaaaacaaacaaacaaacaaacaaaaaagctgtcttaagtattagctacagagaaatcatacatttaaagaaaatattaacacacaattcataaacccacagcgtaagtgcagacagttcaggaacttgcaaaatttattgaactaaactatcctctttcacactctaaacgcaggatatgactccctttcttgaaggctatatttaactgctaacaccccttttcggtgagccaggactctgctcacacctccccaacaccacccaaagaatcccaagcaatcagtatgctaacagctacatactcagaagcgctggacggcctcccttaagggacatctggaatcttcctctttgtccacgcttccctcaacctccagcaccacttctatagattcaggtagctcccccagagggccctctcccagtgtgggtttccccctgggatcaggtagcagatacttggctgtccgaaaggttcaatggggagcgaacccaggacgggctgggcctgcctccctcgcatccctgggtgcgtgctccgcgctgaggcctcgcgactcgggcctaaccagaagcaaggcccccgaaggcgagtcccatcccctttccaccccgagaaaagcacctttccccaaagccacagccctgccaggggttctatctcctctctcaggccaaataagacgtccacttgggcctccggagggcctcccctgccgccccaacctggacaccttcttggggccgcggcgccgggcctcgaataacgacttcccgcccccgcccgacccgcaaccctcagcagctccccgaagtgggaggggagaggcccgggagggcggctcaccccacgtgcttgagcaaaaacccaacctgcccgcccccgagcgaccctggcctgcctggcatgccgcaaccggggccagtactcacctgtgcgcgagtcctcgccccagtcgcccagctccgcgcggcctcaggggaagaccgagctcaacccacgccccggggcccacatgctccagggccaatttccgctcttcgaggcctccggggatgagcccattggccacaagacctgtcgttcacaagagcaagctatctaattggcccatctgcaagagaggctcgtcctttccagcaggttccctgtgcaggggcggttcgtgcggaaggagcgctgggagttatgtgaacctcagcgttaaaatgtgttagggtttggagatcctgactccctttctgggggcaactcctataaacagatttagcctaagactcgcgtgttgaaattgacttgccccattcctgccagttaagaggattagcgatacaggtggtgaaaaagaaacggtaagctcgagtgcgcattcaaacacctaattcatatgatttctgcacatcactttcgttatacataaaacagagataaaaactaaaaacatccattcatagggttgaatggaaatgtacacacataatgacataacgtatgtaaaatacttagcacaaggagaagacgaccctcgataaatgttgcctatttttattgatgcctaaatctgtgagccaagaagagctttctaggaagcagattaaattatcagtggttacttcagcaactacagaatgattttacccaaagaaagatttctgaccctctcccaaccattttgtcaaataactgcatccctctcccacacccaggttttacagtgtggttgaggtaaagcttctgaaggctttggcggatgctatagagacatccaagggctctgcatggaataggactagagaagggttaaccttattttttccaggcctcagatatcccatgacttattttaatccacacatacaagggccctccctatccttcccgaatgaggatagtctgaaaattattggagcaggatgattttcaactcaggaatccagttggcacgatgccccttcactgttcctagatagtatttgtttaccatgatctaacattttcacttcctttaccacacaaccttcttaacttgcagctgttgcaatgttatgttgtaagcaattctcctgcctgtgcaaatacttaatggtagcaagtgcagtcaaaaacagttatacaaactgttttgtaactttcgtgaagatccaactccttgttcttttaggaactccgaccaaactttgcatgacacacttattctatacacatgaaacaatattttgggggcaggattcagcaaatcttctagttgaagtaagggaataataatcctcagataatttcctgagtatgtcttctatttgggaacctaaaccaagagcaccattacaaagggtatgcacattgggtttcctagatttctatatcctgtccatccatgcaagtgtaggtggccttcgtacagtatttctagctaatccagacatcattaacactacttatttaaccaaaggaaaatccatatagtcctgctgttgattggacataaaaatggttgaagctttctgaaacgtggacatctatttaggacctttcaaaagctaatcaacctcttttggagattatattccctaacagagtactttaattgttaattagccatccctaggatattgattaaaaaggacacacataatctcatcacaaaaagatgagtatgtgaggtgatggatatgttaatttggtttaatcattccacaatgtaaataaatatcagaatatcatactgtaccacataaccatatgtaattgctatttgttaattaaa

SEQ ID NO: 587737 - DNA, 4001 bp, Homo sapiens
gtaatcacagcactttgggaggccgaggcgggtggatcacttgagatcaggagctcaagagcagcgtggcaaacatgatgaaaccctgtctttactaaaaatacaaaaattagccaggcatggtggtgcatgcctgtaatcccccctcctcaggagtctgaggcacaagaattgcttgaacccaggaggcggaggttgcagtgagtcaagatcgtggcactccagcctgggtgacagcacaagattctgtctcaaaaaaaaaaatatatatatatatatcactttataacctacagatttcaagactccctctttaaggggctcctctcattgtcctgacttgcccctgattcctgaaaaatatttcttaacggaaaagaattttttttttttaagagacagggtcttgttctgtcatccaggctacagtgaagtggtggcatcttagctcactgcagtctcaacctcctgtgctcaagcagtcctcttgtctcagcctcccaagtagctaggacttcaggcacctgccaccatacccagctaatttttaaaaaaaatttgtagagacgggatcttgccatgttgcccaggctggtctcaaactgctgacctcaagtgatcctctcacctcagactccccaaatgctgggagaagcctcttcttaactttcaaaaagctgtcttggccgggggtggtggctcgcgcctgtaatcccagcactctggaaggccaaggtgggcagatcacaaggtcaggggttcgagaccagcctgaccaaaatggtgaaccctcatctctactaaaaatacaaaaattagctgggcatggtggcctgcgcctgtaatcccagctactcgggaggcagaggcaggagaatcgcttgaacctgggaggcggaggttgcagtgagcagagatcacgccactgcactccagcctgcgctacggagcgagactccgtctcaaaacaaacaaacaaacaaacaaaaaagctgtcttaagtattagctacagagaaatcatacatttaaagaaaatattaacacacaattcataaacccacagcgtaagtgcagacagttcaggaacttgcaaaatttattgaactaaactatcctctttcacactctaaacgcaggatatgactccctttcttgaaggctatatttaactgctaacaccccttttcggtgagccaggactctgctcacacctccccaacaccacccaaagaatcccaagcaatcagtatgctaacagctacatactcagaagcgctggacggcctcccttaagggacatctggaatcttcctctttgtccacgcttccctcaacctccagcaccacttctatagattcaggtagctcccccagagggccctctcccagtgtgggtttccccctgggatcaggtagcagatacttggctgtccgaaaggttcaatggggagcgaacccaggacgggctgggcctgcctccctcgcatccctgggtgcgtgctccgcgctgaggcctcgcgactcgggcctaaccagaagcaaggcccccgaaggcgagtcccatcccctttccaccccgagaaaagcacctttccccaaagccacagccctgccaggggttctatctcctctctcaggccaaataagacgtccacttgggcctccggagggcctcccctgccgccccaacctggacaccttcttggggccgcggcgccgggcctcgaataacgacttcccgcccccgcccgacccgcaaccctcagcagctccccgaagtgggaggggagaggcccgggagggcggctcaccccacgtgcttgagcaaaaacccaacctgcccgcccccgagcgaccctggcctgcctggcatgccgcaaccggggccagtactcacctgtgcgcgagtcctcgccccagtcgcccagctccgcgcggcctcaggggaagaccgagctcaacccacgccccggggcccacatgctccagggccaatttccgctcttcgaggcctccggggatgagcccattggccacaagacctgtcgttcacaagagcaagctatctaattggcccatctgcaagagaggctcgtcctttccagcaggttccctgtgcaggggcggttcgtgcggaaggagcgctgggagttatgtgaacctcagcgttaaaatgtgttagggtttggagatcctgactccctttctgggggcaactcctataaacagatttagcctaagactcgcgtgttgaaattgacttgccccattcctgccagttaagaggattagcgatacaggtggtgaaaaagaaacggtaagctcgagtgcgcattcaaacacctaattcatatgatttctgcacatcactttcgttatacataaaacagagataaaaactaaaaacatccattcatagggttgaatggaaatgtacacacataatgacataacgtatgtaaaatacttagcacaaggagaagacgaccctcgataaatgttgcctatttttattgatgcctaaatctgtgagccaagaagagctttctaggaagcagattaaattatcagtggttacttcagcaactacagaatgattttacccaaagaaagatttctgaccctctcccaaccattttgtcaaataactgcatccctctcccacacccaggttttacagtgtggttgaggtaaagcttctgaaggctttggcggatgctatagagacatccaagggctctgcatggaataggactagagaagggttaaccttattttttccaggcctcagatatcccatgacttattttaatccacacatacaagggccctccctatccttcccgaatgaggatagtctgaaaattattggagcaggatgattttcaactcaggaatccagttggcacgatgccccttcactgttcctagatagtatttgtttaccatgatctaacattttcacttcctttaccacacaaccttcttaacttgcagctgttgcaatgttatgttgtaagcaattctcctgcctgtgcaaatacttaatggtagcaagtgcagtcaaaaacagttatacaaactgttttgtaactttcgtgaagatccaactccttgttcttttaggaactccgaccaaactttgcatgacacacttattctatacacatgaaacaatattttgggggcaggattcagcaaatcttctagttgaagtaagggaataataatcctcagataatttcctgagtatgtcttctatttgggaacctaaaccaagagcaccattacaaagggtatgcacattgggtttcctagatttctatatcctgtccatccatgcaagtgtaggtggccttcgtacagtatttctagctaatccagacatcattaacactacttatttaaccaaaggaaaatccatatagtcctgctgttgattggacataaaaatggttgaagctttctgaaacgtggacatctatttaggacctttcaaaagctaatcaacctcttttggagattatattccctaacagagtactttaattgttaattagccatccctaggatattgattaaaaaggacacacataatctcatcacaaaaagatgagtatgtgaggtgatggatatgttaatttggtttaatcattccacaatgtaaataaatatcagaatatcatactgtaccacataaccatatgtaattgctatttgttaattaaaaatgaaaggggcaaaaagagcacgtatatcacactaagagatagtattttgagataaatcacagattttttttttaactcaaaaaagtcgtaacaccaaattctgtccacctggccctgccagtctctaaaattcagagtgaaaatggccccataactatacataacctgaattttcctaggcagtcatgactccaaataccctgggcacttggtcaccataaatatttctattccaaccatgtattctggtttgttgttgttgttgttg

SEQ ID NO: 587738 - DNA, 4001 bp, Homo sapiens
acacataccacaaggttgcaaggaaaacattatgaagtttacaggattgaaagtaaaattcacccaggttttatttttggctctgccaatgacttgacagagtcattaacttagttaatacccactggctttgtgcaaagcactatcttaggtgctaccaagagcaaaaataacacgtgatcattttcatcacttacctatcatattataaaacacgtattaaatccttaatttcatgtagtgctctgctaactgcagatctataactatgcttaacagctcacctaacagcagacaccaagaagaaataggtcattataagagcacagaagaaatgcaatgctaggtagtttgaaagactagaccaggtacaaagagaaatgttggttttgagaagaaattattttctgtgagggagtgtggcttcaggaaagataatttctgagattcttctagcctcctgatgatagtgagttcttaatataaaggtcactaattcattcaacaaactgtgttagcttcctggagatacataaatgtgtaacagtcctaactttccaaaggcttaggttagacagtaccaagagacagaggagagcatagaggccacgggtgcctcaaggagcatttcacccacgctgcttgtgtcacactggcttctataaagaagacatgccccttccacatttttaaggacaaatatgaattagactggaccagttgtcagaaagataaagatagttctagatagagggaactgcccgggcaaacaggattgtgtgagctgcttctttggagtattgcaaataattctttaaaacaactcaaagctacacagtggatagaggtgtttattttctgcttacactgtacagatctagtaattgctggaatcctaaaagaaattttcacagtaggtagaaaaatttaagggatgatacaaagaaaggccacagaaattattaatttctcaaaatggatgtatataaaaaggctaagggaattatgattggcttgttcagttctgtcttaaaaaggtttagagtggacttcacctatagtagcaaaagctctccaacataaaggagaccagttccgaggccccagacccagtgcctctgtacctcgggtctgtctttgccaagagctccaaggtgttcttattcccgcacattcatatctcagggcagcccaagagtaggaaactccagcggggaagctggatcctatctccagacagtgctgctcctcgcctatctcaggttcatcctcctgttatctccacagacaactccaatttcttatcttatcagtctcttcccagccctcttctgggtattactttgaaaacacagggcagctgcccctggaaatgactgacacctgccacgaagtcccatccccgtcctactgggggttgttgccctttctgttgtgaggaaagcgacccaagaagaatggaggaaaagggactcaggttgcctcttcccagtccccactcccccgccaaatttcagtctacttgtgtcactttgtgggtgccggtgggagatttcatcattcaagtagcagcattgatgagttaaaaggcaatctctcgcaatctctttctctgtgtccttgtctctgtttctctctctctgcgtctgtctctgtttgctaggcctgctatccagctcccctggtccccaggatcgtcatgcaaccgcacccacagcctcagccaggtgccaggtggtcctgcctctcccaggaccccgggagcaggggtagtgtctacgcgggcctctcctgcttgcctgcctagcgtgcccaaagggttacctgtgctgggatccgcggcacacaggagcagcccacagaggccccaaatacccaggagccacaggtgtcccattgaaaagccagttctgcggagttggtgccctccgctcgcagctggctctagtgctggagctcggctcctgggactgcgactcgctggcgggcccgcttcgtcccgggagagctggggaactgggccgccctcccgtggcctgccccgcccctgctgtcgggctgctcctctgggatttgcatgcgcgcgcggacacacacacacacacacaccctggaaccttcgcgggagaaccaagccggccccgagccagtccgtgataatcaaacctccacactcaaacctgggtgctgccttcccaaggctgtccccataggtggaagggccttactccttttggcgaaaggaatcaatggtcattgaggtctccctaggtctccttctctattttctttttgttttttttcttttcttttcttttctctctttccccgcgtactttcatctgcctgtctgccttggtcattaatcctccccaggtgggcctataagaccacctaatacacaaaccccacgcgtgtttaccccttcacattcatatgagattgtgctctctctttaattgacaatcagtagacttagggcgaaggcttactgttggcatggagggaggtccagcactgctgacctgtttctgggatgccagatagcagacgaatgaaacgcaagtttctctgacctccctggagaaggcagtttattattcaccactgaatgctccccaggggctaattccaaatcctctcactgttcttaatatcttaacctcaggatctcttgattgcccacctctccctactctttaaaaggtgagaaggggctgggcacagcggctcacgcctgtaattccaccactttgggaggccgaggtgggcggatcgcttgaggtcaagagttcgagaccagactggctgacatggtgaaacaccatctctactaaaaatacaaaaattagcctggtggggtggcgcatgccttgtaatcctagctacttgggatgctgaggcaggagaattgcttgaagccgggaggcggaggttgcagtgagctgagatcacacccctgcactccaacctgggcgacatagtgagactccgtctcaaaaacaaacaacaaaaaaagatgagaagatccacctacctagtttgcagtttctacattttaaaatgttatgtgtttttaaaagatattaaaagattattacccaaatagcaatgcataagcttctattggatcctggtttgtaaaaaataataataataatataaagctatgaaggacgtttgcagaacaaattagggaaagtgaatatggattaagtaacaagtattgaaagatattatagaagcgttcattttattaggtataatagtggtatcatactttagtcaaagagtgttttcaagtgatggaattgcatgatgaggtatttggggtcatagtgtctttatgtctggaatttacttcaaaatggttttgctgaaaaaaaatctggcaaattttaaacaatgtttgaatttaagtgtaggtatgatcctttgcacttttttattagtttaaaaatttttataagtagaaaattttaaattctctttctttcattccctcccttccttccttccttccctccttcctttccttttgttcctctctttcgggaagaagtatttttcttccatgacatggtcaatcccctctttgaactctttgtgaaaactcttctcttcccatcttactgattattattctaacaatatcccccttatctcacttctaattacttcactttcccctttctcctcttttcctagaaagatatacagtattcattactaaaaaactaaacacaaaccaaaaatcctttcttttcttcttaattgaggcaaactctctagtttacttgttattaaacttcttgaaagagttgcctgttttagtaaactccttgttcaaggtcactgtccacctactcattcatctatcatacaaggccatctgtgttccagggtctgttctaagtacttgctgggggatggaggaaaggtagaggttgggagtaaggttgacagataaaatacaggccacccaggtaaatttgaaatta

SEQ ID NO: 587739 - DNA, 4001 bp, Homo sapiens
agaaaggcaataatgatatataatatgattaacacgattttccatactagtgtctttgcttaaaaataatatttgaagaggaaagaaagaggtaaaattttaagctaccaactctgcccctctttttcattgatcttctaatttaatttactaaaataaaattgcatggctgttgagtcagacagtctctgtaattttaagtttaaagataacagatcttcctttaaatagaacattggcacacagataccccacaatctggcttattgcaactgttctctgttggtgaagtggcacgtttgcaatccccataacagccatcttaaccatttcacagcatattattcaaatgtacatctctaggtggcaacaaggataggcacttgggctcagtagcaaggggtctgtggggaaaatcctaggacgagggataggaacctgcaaatggcaagacaaactagaggatactcaaccagaggcttagattgggcagctccattggctttctgactgcctacgaggaaaacctcactggaaactcttttgaggttcttgaggaatcctagaggcaaacggactcctctgccttttggaaaggatttgtcccaaatcttaacagctagctgtctcaaaatccaactggactaaaattgcttcaagaaaaactggatggactggcattcacatttttacttctacctatgcctatgcatagggaacatccctcacactccagtagattctatctgtcctctctagctttcaagtagccacagtgactacagcgaagggagttaatgggataacatgttggtacagggccacaagcaggatatttcattccatgcatttgggggaaggacacaggtaacagtatacagggagaataccgaataagaaatctgtgtgaggcaatgccctttttgggaccttgacaaaatcagtcatggaacccaggtggtggataagagctgacgagagttggtctgtgaatgggcacagcatctccgaaaaagatcaatgaaatgattgacagagaaaatggcaattgaaggaagaagcgatgtcaagtgctgctcaacccaagctgaactccaggagataagagaagtttcccctccagatagaggctctttctaaaggttcagtcttgaagcaggtgttttgccattgagaggggcacagacccattctgataactggaaagggagaggaccaaggactacaggaagagggacgatttctgattacctcaggctgctgccagggacctactgctccaaatcctcaaaatactcaagcgaaggtaaaaggcacagaaagcaaaagagtaactcaaattattttaaattttgagtcctcttcactgtctacgcgaatctggcactgaaatggtagatcacgttcaaaagagtatagaggcaagaacgccttctttgtttgcccagtaacactgctcctccaacctctgcacttggccgcccaacatttccatcctagttgttgctccttttctcattgcagaatgcagcggggttctccccttcttccctccgtgctgcaaaccccattattaaccaagcggaaagctccacgcagtgcggccagggcgcaccggtgccgggctgcttaccttccccggacctagtcagcgcaggtccccgcgcacgccgccacgggccgcagtcccgccgcgcccgccgagtgctcggtcagctcgcgccggcccgcgccccacctgccagcagcagcctccgctcccgccgcggagctccggctgcatgaagtcatccccgccccgggacggatcaccacattccgcgccagccacggggggagcggggccgctcccgaccccagggaaggcagcctggaaacggcgctcgacgatcgctgccccgcgaggttgtggattgattttctattaatgcttttacagctgcagcatcgctggattatggattgagagagaagagccaggggggctttctctgcatagcgtccttcctccgagcgctcccccgtcaccccggctgcatggactgttccatttgcccctgtgggtttcccaccctcttcatcttccttatcagcattgttcatttggctgaatttgagagcaggaattgtcttttaagataaacattcaagcactacaaaaacattttaaattggtaatgaagctttctaagcccttcatagctctctccatcacccccgcccccgccaacagacacacacgcaaacacacacacacacgcacacacgcgcgcacacacacgtatgcacacagccaaaccactcacaattttgaaagctagaacctttcgccctctcacctacgtaatagaacgggaatctcctaaaagactggagaagtggggccaaccagagaaagcgctcaaagaaacagtggggtggccccatgattttgttgtgtttatggtgcacttgtgcacagatgttccctctaacatctcttcctcctacttcctttgctctggaccccctcccctccctgccacataattgggcaaactgttgtggtgacagctgtaacatttgggaatcaaaaagcagagtctacattagcaaatgactatctctctttccctaaggatttatgaaaatttgctttgggaatgaaataagcatgtattcatataagccctttccttctctttttaaattaacactagctgttaacaagactgttctctctcccccaccctcccgttttgcttctttcccaaatctcttcaggtttgagggttgaatgtttaaggaaaaatgggactaaatttgctctctttgtagctgagccagggtttccgcctagctgttgagtcattttccagtcgggaggttccttgacactagggttctgtggaatggagttccctcttttaacttgccttgctgtttgaattgaccgtcacttgatacaggccagctttacactatggatttgtccagcaacctaaacagtgcaattgcacaaggccagggaagcacctttgctaaatgagatgtttccatccatctatcagtcccaaagttaggtgataatgtagccaacagctttccaacaaaacttagttagaattcttggtcatagaatatatgctctttgaaagctagaacagcttaattcatcgctctgagactcactttcataacattagcccgttaatattaccatagagcaggagattcttaatctgtataaatggaattctattcatatactccttttatacagattaagtataatgggaaaaatctcatttttagtttcactaacttctaactgaaatttagcatttagcatgtcctttaaacataatgtaggcaacaaaccacaagaatgttaggagtacctgggactttgtttccaatagaaacaacagctaattccttattgctgtttttatagatatctctatcactacactgatgttataatcaaatcatcactactttttttatttaatagactatatttttcagctttggtgtccagaaaaattgaagaaataatacagggtgttcccatatatcccattcccagtgtctcctattgacatcatacaatagtaaggtaccttggtgtaattctggcattgctataaagaactacctgagattgggtaatttataaagaagggctggtggttctgtaggctgtacaggaagcatgattggggaggtctcaggaaacctataatcatggtggaaggcaaaggggaagcaggcagggcctacatggctggagcaggagaaagagaagggggaggtgctacacacttttaaacaaccagatgtcatgagaactcactaccaccagaaagccaagggggaagtcctcccccatgatcaagtcacctcccactaggcccctcctccaaaattggggattacaatttgacatgagatttgggtagggacacaaatctgaaccatatcattgggttacaatcaatgaatgtatactgatacat

SEQ ID NO: 587740 - DNA, 4001 bp, Homo sapiens
cttgttacacaaaggaacagtttggatacaaactatacacatatccatcttcggttgaggctgtttatccctcctgtccctccatcactcctatgggtgggtgcactggagtaacagaaagggaaggctcttccatcaccacaccctcccagcacctctgcttttggtcctcagacagtgattctgtgtaggtgatgaaaaccataagaaaagagaagctgtccctttaaaatgccctgctctgtcccatatcccacgtggaaccaacatcagcagcactttcccattaacatcaatgtgatgcaagagacatcatccttttatacacataaaaccagaaaacctcagcttaacattctttaggaaggatgaacaggtgaagcaaacatgtcaggaagggggaaaccaagcaactccacatccctccccaaaaggtactccagccttgcactccagcctctctgagcaccatcacctctctatccctcctctgcagagcccagtttaaagaaaggagggagccactaacaaaacctgaagcataaatgcgacgaaaatgcaatctaaagccggaaaggttcattcttccaatcacacatattaactctattaagaaaatggcatcacttttttttccacccaaaaaaaccccgcaaagatcattaaaagagagttataaaatagcaaatatagtgtttatcttatctgagatcagtccacattaccaataagtttagcagtttctgcactaccacctcccccctcgctccccctgcttctcttgcatcggattttcacgttttctcattgtcggttgagttataaaaggcttttgcccttcgaaagttttaaaaaataaataaatattaactccttggtccctgcaaagtcaaaatggacttcaggggaaaggcggtacatacttttacctttagcgagaaaagggggagcatcccggatttttagggattttttgcgattttttaaaaatttttatttggttatatgcctgagttctccctccattttggttgtttatgatactgacaacaagctgtccctgctctgtgccgatctcctgctttcatttagcaccccctccccctaccccccctcgcagccacacaccccgggctcacacctccctgcagaccccgcaccccgaccccggcttgcccacctgaggaaagggcaaaaacaaattcatttctccagaaaagaaaaacctcttttgaaaaaggggcaaagttaccccaagtcactcaaagtgccccccaaatattgccgactgcgggtttccgccaggccctttgggaagcgaccttcccccgggatgttttggtggaaaatgcggagagtttactctcaaaactgaatttatattaatttttcccttatttttcgggtctctaatgtcttccgctctcgctgctgccgctgccgctgtcacaatattcacagcaccagagaggaggaggaggaggaggaggaggaaaacttttcaaactttccagaccctgaataaaggtttttttttttttcccaccgacctcaccttcgggtccccagccgcatcgccccctgccctgtcagaagcgacttcgggagtcctcgcagccccgcgtaattattttattttattttttattattatttttctctctggggtcctgagcaggggctgagagtagcacaaacttttcctcctcctgccgccgccgctgctcctctgccccctcggctagtcccataatttaaataaccctgatatttctcccgctaaacgcctcgccgccgccccggacccccggagaactcaccgcggggctttaacatcctccctccggcccgtccgccgcctctacaccgcccgcggaatttctaataatttttttctcatatttcgggctggacgcggcgggcctggaaattgtttccttacgcctctttccagcagccattgtagtgtatgcgctgcccctgcagcccaacttgcagctgccgccgccgccgccgccgccgccgccgacgtcgcgcccaccgctgcctccccctgcctgttcggccaccgcccccgcctcccgtcggcccgcccccaaaccccgcccgccgctgcgcccgccccccgcgcgcgctccgcccgagagctggccactcggagccgccgctggcgggagttggcccgcccattgggccgcgacgccgcccgtcaagccgaagtgttaagagacgggccgcggctggggggcgcggtggggcgggggaagagggggcggggtcgcgctcaccgccccgcccactcctcccgcctcggccctcctttcgccaggcgggggcggggcgaggcccgaccgcccctgcggcccagggccccgcgcggctgtcagtctggcggcggcgcgcgccgattgggcgggctgccgccggggagcgggggcagcaagttgggatgcgcgctacttaaggtcctgctgcgtgagccattgacgtgtttggagctggagacggcctgggtgctggcgaagcggaggccggaggtgagtggttcccccgccctacctccgaagcggccgcagaaaagcggggagagaggggtgcccttgggccgtagcggggcccgaatgcacttctgcggcgcggaggcgctcccgccaggcttcgccgcagcgcggacctcttcccgttgctcttcctcccgccacacgggtctgttcgctccgggggcgaggaagatgacctctgcctagtccgggcaaccccagctcttcttccactctcctgtgtagcctctgaagcgcagttaccggccccacccccagttccctgcgttttcctcgccccttgtctctctcggcatggtctcggcacagcaaggtgtgttcacctgtgcgcgccgtccaggatcagatgctgacgggctacaccgcggaaggcggcgaggcctcgggttcgcccttcgtttctccttgccctgcgcgcccacctccggcaggccacccttgacttcttgcccccttccactttgcacctggcagtgggttaacggcacggcgtgtgcagcttccgggtttagcagagccgcggaccctgcctgggctccgaccacggggcgtgtgggcatgaacgtgttcagaaacgtttccttccccctgccctttcaaagctacttagagaggggggacgtgaaccactggatgggaaatcaggaactgctttattaagcagtttgccctttggagtggattttagagttatcccctgaatgtgctatggttttgtggcccctccttcatatctttgcttggtttttctttctggttatgctctgcaagtagtagagccttgtaacatttatttagtacattcaaaaagtaatagacaaggcccctttagcggagcactcgatgttgtaattcagccccgctcctcactgtaaattgacatttcctcttcaattccagttaatacacgaggaactcatgcaaaggaggggactttcggaaatccaaacttagagtgccttgtatttagaatccggaaggaaaaggaaatgaaatgtgaagaaactcatgcaccaaactcgaactgggtatatgtgatgttacctaggtattatttttgaagaatttctgactgacaataaaatatagagtaggatactttcatgtaaggcacgaaacttaaatttaatgcaaggttgtctgatccttgttgagattattaaatctaaggtgtatgaagagttctgtgttctcacatcataggataggtgtaaaaaagaaagctgtgaatttatttactatcatcatctctcttaggaagaagggaagtgtggaaaaaaattgtcttcaggagaggaagaagcttgtagatataattgaacagcatcttgatttcttttttgccaagatgttactgttggctggttattttcttgtattgttcaatgaaaatcataaaattattattcagtgattacttaatggacaccagaataacca

SEQ ID NO: 587741 - DNA, 4001 bp, Homo sapiens
tacttcgagttgtcctgcctttccagaccgaaccggtgcacatcttacatacattgattaatgtctcatgtctccctgaaatgtatgaaaccaagccataccttggccaccttggacatatgtcctcaggatctccagaggccgtgtcacatgtgtgttcttaacattggcaaaataaactttctaaattgacagacctgtctcagatacttttgggttcacaaaggagtgcctgactgttttttggaatcctttgaaatctactggccgctggctctgctcagcaacgtcaggccctgggggaaatcaaagcctcagtgaactcaaaaaccaacaaaggggaactgctattcccagctattccctggctgcctggactgtcccaggcctgtgatgaagcagggggagccgcagacactgggagaatccgacgcgagtcattgtgaaataaaccaagctggtcttggggagtcgggcagagaaggagcattttggagacaagggcagctttcatttgctcctgagattttgatctggggctttatcatttgatccagagcttggaggcttgcatctttgagaacattttaggtggaataaatgggtgggcaggatggagctattcatatctcaatactcacagtgtccctgccagtgctggagtccgactctgcctgcacaggaagcacgcacccagcagctcatgctgaccgtcatggattgagtctagatcccagaatgagcgttcttgccacagcaagtactgctaggaagtcacctttgaggggactccacctgacaatggtatttgcaagaccccttcccgggactgcaatgcacacgcatacacacacacacgacattttttctgtcatcaagcagctacaggagaccaccatattattcccaattggccaccaaacacatccttgttaccacacttctttgagcttgagttgtcattagttacctgggacctcggcgtgttttcgtcttccctccctcccttcctctctccctccctgtgaggttaagaaaataaagataataacagtgaaaatctggagaaccccacatgcttcctgcagagtgctttaggaataaaagacattaatgtcagttttttcccctgtaattaaaatgtcctttaaggaggactgcacacttgactgatgcaccctgggcaaaaagccagagggccaaactgacctgtggagacttgtaggggtggcacctagggagatcagaggcatttctctatcccacggggtaatgtggggtgtgaaagccacctgcttctctctcccagcacctagcaaatagtgctctggaagtaagtccccctctgccccatccacagcctcagttcctttctgggggttcatcgggggagggaggaaactaggggacccagcgggccctcccagctgtcacaggcacgtgtcccaaggcagccgattttgcttttattgcttgctcgtcttgaggtactcccataggctatttggggcttttctgtatcgttcttttcactttcccctttactctgtcagcagaggcttctccaatgaatgcaacctccctagtctccctttccccgactgcctctcccctccaaaacactccagcctatcccaatcacatgcaaatgcaaacagacatctcccctctggagtggattctagcggatcctctagttgcctgaattacaaagttggtcccttggttaaagcattccttcactggctcagcttgctggaaagacttttaagagaaagaagaggagacagaccccaaggtacagaaacccgacctaccacggcttgctccttccctttcctcgcagaggttttctctccagccctggactcctgtaggatctcagctctgagctccccacagctccggcctcctttaagtttccaggcagggggtggggtcggtggccccggctgggcgggtttctgtgtggcgggaggatgctcagtggacagggccatgagggagctgaggcaggcctgtttttataaagcagggggaggaagttcacggtggaagcagcacagcccatcctggcttcgggccaggctgattattcacagccgtgatgtcattgaatcgcaggaatttggaagtgggatgggaccttaagaatcatcttcctttagagtcctagtgtcccaggcttaaaagggactttcaggaccctgtgatgacaagaagtgtttataattctaaaggcagcaggttggggctgggagtggggtgtcttctggaatctgtggctgtagctctggcctctcaggacatgagaggttaaaaggactggaggatgcacaaggattggaacactttgtgtggtggcgggagctcaggggggtagccactgagaaggcaggaccagccttgggctcacctgcggtaggaggtgcccccatgggggtttgctccggtaggcatctttggccctgttctgtaattttagggagaatctttctcttctttgtaaagtgcagggctgcagtaggtggcctccggggactttccggctccagcatccccttgagtgggcccagggaatatacacagggccttggggccaacatgcctgaaattcgatcaaagccatcagcccttaagcccaccgaagcctttcagtatttgcttgtaaaatgcccctggaaatagacaagccatttcccttgctgacaccttttcagatgactgagaaataaaagccctgtcgtgtaggggaaagtcttaggtttaaatccggctgtgccagtaactgggatatgacctcaatcaagattttcaactatgctgagctctggcttttgcatctgcaggtcacgtgaggatcagagagaagccacgcatgtcagggccctggcacatcacagggctcagcaggagcatctatcatcattggttcatgtctggctgagaccagaccttgtaaaaatgagagagaggtgaaagaaagaacgcagggagggaagagaagtttggcagaggaaattgtgggatgaccgactattcaggagaggccagatttcatacattctgatcctaaatatactcatatttgtcaaaccatgagtgctgagtttgaagttgaaaggcacctaactgcttttcacattgctttcaaactgtttttcacatttttatgaagctgcagccctgctgatggtcattgtagaaaaggggcactggggtgggttgcctgctgagcacgggaggtagacctcccatgagcagcagcagctgtgggcctgtctggtgggcatggggctgctttcctgcaatgtggtctaagatggtgaggatggaggcttttttggggggtggggcattgccgttcagcagggagtgctggtcatgaggactctcatttgaactcttgagaggatggttttccactgaatggttgcacttaaatcctggatcctgaacctctatggaaaacaatatggagatttcccaaactaaaaatagaacatccatttgacccggcaatcccactactgagtatctattcaaagaaaaagaaatcattacatcaaaaagacacctgcactcacacgtttatcacacacaattcacaacagcacaattcacaatagcaaaggcacagaattaacctaagtgtccatcaatggaggactggataaagaaaatgcacatatacaccgaggaatacgacaaagccgtaaaaaacaatgaagtctgtcttttggagcaacatggatgaaactggagaccattatcctaactgaaataactcagaaacagaaagtgaacaaccacatgcactcacttataaataggggctaaacaacgggagactgagaggagagggtttgcagatcattagcaggggccctgagctttgctgaaatatacccgaatgattaagacccagcaatatcctgcagccctagaaactggggcctctgtgttccttctgaattgagattggtttccctcggacagat

SEQ ID NO: 587742 - DNA, 4001 bp, Homo sapiens
tggggagctactggaaagcaaggccagatcctggctcaggaagaggctggggctccagacaaccaggtaccccctccctatacactgctcctgtacattcccacctggccgccattgtggcagccaagaccgagggcctggtggggaacccaaaaaattatccttgttgcatctgggcactggaccgtgttaaaatcaaggatggacgccgcggcaagaagcccaaccccaggcctcatgaaccgcctgggcgcggccggcaggtggcgctgtgccgcctgcactcacctgggacgcgcgaggccctccgtgacccgcagatccccctaggcctcccccacccagtccccgctccagcgcctagcacgcagcgggaactcagtcaacctcgcgtgccaaggaggtgcacaggcaaggccctgcgcagttacctgcgatgcgaatgaccgcccgctcagctgggtccaggacactcccgttgctcccagcgccacccccgctgcgccggctccgctgcgttttcccaaggttccagggcagtgtgtccccagggctgggcgagccactgcttccattggagacatcttcagagactgcccggacctcagcgtcctcacccgacatggcctcctggaaggggagcaggaggggtcacatctctgcctgttcaggagtggactctgcacgccgacccacccaccaccttcttaacctagacactgaactctccccacccagcctctcgcctggacactggcacccacacccctcctgcactctgctgtacccacatattgacccccatgctctggccccaggcactgacttaccctctctccatccatgactgccttgccccctcccgcgcactcctcagatacctacacagtgaccccccagccactggccttaccctccagtccatcaccaggacactgaccaccctggccacccccactcccacacactgactgccactctcctctcttagtcacccacaccccacccacctactctgtcacccaggggctcaaccggcacacgacagaccaccttccactctgtcaaatggaaggggaaggggtgactaccttcactcagatgccggcctccactgcctccatcccaaactggacccgcctctaaccctctaatcgcaggcaggcgaggccatcaaggaaagctgaccaccgccccctccactcaccgggtcatcagggaaggacacccaagcccttcccctggacaccggcagtccacctccaagctctctcgacctctaggactccccatcacgccaccccacctcagcccgcagtcccacctcgatctccgcagcgaaggcctataaatagctgcagccgcagcggcgtgggccgcgggagctctgctgcagcgaggccgggagggagcccgggccgcagctccagcggcccacagtgggggcgcgtacaccggcaccgcggacgcaaccaggacgcacgcatacccacgcgcgcacactccccagcccccgtccccaagagcactggcgtgcgggaggtgaatggggctctgtctcggagggggtgggctggcgcgggggcacaatgtgggctctgtgcctccgccctcaggccaagggctaaggaggaggcagcggacaccgaggagggggccgccgcgccccgcccccactggcttctccacgggccgccccggttgcagccccccgcccggagccctgcggtcagccgcgcctccccagcggcctttcctgcccacaccccgggcaccgcccgtccagttccgcagtctcgggcgtgcagggaggtgctgtcctctcgagcgagggcaggagggggcgcggcgcagcccctagttccgtgtggcctgcggccggagaccgccccccgacccccaccccgcagcgcccgcacgcggcgcgcctctccatcctggccgcggtcatacatgcctggtggctccgctcacttcagctctgccgccgcagccagactgctcgggccgggagagcggcggaggcggcgcaggcggggcgagccccgagccccgccccggcccccacccagagctgcgccgcgcgggcccggccgagagcgagcgaacgctgccagcgagatcgggcgcccgtgtctgcgcggggccgccgagatctcgggagcggcggggctggggcccgggcgggcgattcggccagggcagcggcgcacacctgagcccccggcgcacggggcgggccggtagtcaaggagacgctgtctgcgccggcgtgcgcgacacgggaacgtcgtgcgctcgccccggtgagctccgggccccgccccgcaccccgacgcctcctcggaagcagcagatcccgcccctgggccgcggagatccccactccccaaacagaggtcgcagtcagagttcccgggtcccttccgcctgggttcacgttcacgtttattcaaacaacagagccgactcgggcgaggtctgggagcggcgggcgggcggtgtcgcctcctgggctctgctgacccctggtggtggggtcggcccaggctgggacctagcccggcccccctcggccgctgctgaccgccatcccccacaccgccttctggagcccgcagagggaggcaggggcgtccccggggacagctcaggcggccacagttgggggcggggagcatcagcctgtgcggagctgggagcctgggaagcaggaggccagagggtggccccttcggttaagtgtctggggagcggcccgggagcccagaggggtcgtcgggggaagcgcggggcacgtgctcgcaggtgatgaggtgggtgggcagcgcctgggtgtcgtggaagatgacgaagatgctgggctggcagatgcagtccacggcgctgtcgtagcgcaggagcacgtggccaggaccccgcagagggggcgcccgcagaccgcggcggccctgcccgtagtcgccagtcagcacccgtgccacgaacaccgccttatggccatcggcgttggggggcgagtagcggtcctgcaccgacagggaggcgcgcctggcgaaatacacgcccttcccgtagaccgtggctgcagggcgagacggggcaaggtcagggtggtcggggtgcgcagagcccccgcccctgcccggctcaggcctcaccgttgcggccgcagaagctgcggttgaagccgtgggcgcagatgtcaggcactgccggtgccgtcgtgccgtggtacagcacctgctccaccgggcgccgctcgcatcgctgcagcaggcgctcccggtacagctcatactgctgctgcagcagcgggtgcgacacgcgctccacctgcggggaaggcccgggccaggattaaacaccctccctacgccctggggccgacgcagggcagagctgagcctggcaaccaggagccctctgttggaggagtccagggtttgagggagcccttgcagcccccatcatgctctgtccagcagcagacagtaacacctccgtgaagcaagtgacttcagagggccgctggggaggcctgacccctccccctcccgtggaggtctgcgggcgggcaaaccccacccactcaagcgaggcctctgcagagaaaagctgagccagggccctatgctgcctacaggacttgactccaacacgaggagatgccacagacctctcagtgctgaaagacccaggtgggagagaaggcctcaggtgaccaacctgacagccctgggaaacacttttaaagaaattttaaatagtttcttcagagagttgcaaaagaacaccatgtctattaaacaaaactagctgctatgaaaaggaactagtctgaaaaccagagtgctcctgcattcagaaagggacgctgagctaaatctagagggggtgagccaaatgaggaagtggttcaaactgaagacccagctagcgttctagatggagttcaggaactgatgcagagtgagaagctaacggaagagaaaggaact

SEQ ID NO: 587743 - DNA, 4001 bp, Homo sapiens
ggaaaggtgtagggcacaggggccacctctgacctcctgcaggccctcctcagccttggtccgtggctcccagacacaggtaccagcccagcccctcccgtccccttgtctcaagccaggagctaaggagacttggggtacctggtgtgctcacggagcctcagcacctgccttgctgtttagccactctcaggccagtgccacacacatgcgggcagctgcaccatcacgtgacaactccacttcaggcaagccccccggcccccctgccccctcaccagcctccaccaccaagcccagaaggcagacaatgggccaagactgcgagtgtgcccaacaccaatcctggcctccagaggagctgcgcttgggagggaggaccctgacagagggtcccagcaacctccagggatctgtctggctcacccctggatgaatcagaagtagttcccaccccaggaggtagaggaaagacagccctggggccaggaaagcctcagcacaatgcccagaacaggctggggcaccccaggcagcccagcaacctgaccagatgaagaactccaggaggaaacgatcctgcacagttcccgcactttgaacagagtggtcagctcagaaacagctctgtcctggggcttgccaggagggctggagcccaggtgggcggctgcttccctgccctataccccagcacccctccgggtgctccctctaaggcagggccggccatgtagagcatgagcaacaggctgcccgctccaggcctccccaagggtgcaggagtgtctcccctggcccgaatgaactagtcacacaggcaaagcggctgggcacagcactgtcaaagagagccacagcagtacatccaccctgccccagagccgtcgctggaggacgcctgaaggagatgagttcggggcaccatgaaacctacccagctgggcaaggttgtggtggagagcggcaccacggggccccagcaggacctctctccctgagctgcccttgggggcagagccagcaaaaccagccacgtggagctggagtctgctctgatcggctctgcctgggggcccccaccgcgaccctccccagcagctcagtcccttgctcctaagcctctgcaggccggcagccaatgctgtgtccacaaccgcctggagccgggcgacccaggctgagccaggcagctgggctgcaagaatggccggtgggaccaggacctgggagggtccaggggctccccgtgggcgtggactagggcaagggggtctgccgaggcatcaagcaggtgggcaggccactctgatgctcccctagagaggaaggaggggccaccctgacccctagcccacagctgtcccctagtgaacagagaaggggtgtggggggggtgccctgccaaggaagggtggcagcccaggccctcgccagtttagggaggtgaggagaggcggcaactatgtgacccattgccaggcggcggagctgcccctgttccatgcagacgcgccccagaggtggggcaggggatggctcagccttgacccatgtgtctgctggccacagacaccggatcctggctcagacagccgaccccgacaagccctgagcgcccccacccgcccgcggcccaccccacccacccgagccgcgcgatgccctattaagggcatggcctcgggggctcagcggagcgagtcctccccttccctaggcactggcagccgttgggggcgatccaggcggacgaggccggcggagtggccgcgctcgggccggcgatcgggaccgccaccgtggacgacaaggtgctcggcggctgggctgtcaggagcggcccgacaggcagcgggacggggggccgtacctttgtacttctcgcgcacctcctcgtaggcctggatgaagtcctgctcgtcgggcagcgggccggccatgccggcgggcgcggggcgcggggtgcagcggagcctccagcacccggcggccactctgtccccgcggccgcgcgcgccgcttaaagaggccgcccccgccccgcccccgccccgcccccgcacccaggatgccccacgggcggggcggggccggggccgccgcggccgggcagagggagccgcgtctgggcccctcccggcgggccggttccgcgggctccgagtcccgcacgcacgccctttcccgttctcgcccgggtcgcggccgccgacaccgcggtcgcccgggggtcctcgggtggcccccgcccaggggcggccgcgacctgtctgttccccgccgggccggcgacctgcctccgagacgctcccctgcccgccccccaccttgcttcctgcgtgcagctgagaactttcccattgcaacattggagacgactgagtcggtataaagaacccttaaaacactacacacaagaaaaattaagtacacatacgaggactggaatagcccattcacagaaggaaaaaatgcttggtgataattaaaacaactctttccacccatcagattggcaaagcccccgctctccccgccttcaccaatgtcggccaccctgtctgggatgcccctggccgtgttttctccaagcttaatgccatatgtcctgtaactgcaagtcccgcttccaggaatcggtcctaaggaaaccgtcagaggacgcagagccccggcgcggaaggtgctggctgggggcaaagcctttgcagtgagtaccgaaggcaaccacggtcagccggggcctcgggaccccccacactcctccacaactgtaaaggtgatgctgaagaaagcccaggcgtgggaacgacacaagtgattccctttcaagtgggaagaaagtgacttctttctttaaagtccgtgtgtgctgtgaaaagccctgaaggtcatgcagatggaaccagaccctggggctggagctgggtgcacagcagtgaccctctccttccctctttcctgctcctaccagccccgcttcccgtcgtctgcaacatccccccagggctcagcacctggccttgcagccctctcctggcctcccgcaggggcctccctgccctccggctggaacaggtcaggactctcaagccaaagcctagagagctactgctcctccctctcctagcacagctctaggtcacccacttccctcctgccctcccccttccccaagcatctcgctggatgcttcccatcgttctccctggatggggagctactggaaagcaaggccagatcctggctcaggaagaggctggggctccagacaaccaggtaccccctccctatacactgctcctgtacattcccacctggccgccattgtggcagccaagaccgagggcctggtggggaacccaaaaaattatccttgttgcatctgggcactggaccgtgttaaaatcaaggatggacgccgcggcaagaagcccaaccccaggcctcatgaaccgcctgggcgcggccggcaggtggcgctgtgccgcctgcactcacctgggacgcgcgaggccctccgtgacccgcagatccccctaggcctcccccacccagtccccgctccagcgcctagcacgcagcgggaactcagtcaacctcgcgtgccaaggaggtgcacaggcaaggccctgcgcagttacctgcgatgcgaatgaccgcccgctcagctgggtccaggacactcccgttgctcccagcgccacccccgctgcgccggctccgctgcgttttcccaaggttccagggcagtgtgtccccagggctgggcgagccactgcttccattggagacatcttcagagactgcccggacctcagcgtcctcacccgacatggcctcctggaaggggagcaggaggggtcacatctctgcctgttcaggagtggactctgcacgccgacccacccaccaccttcttaacctagacactgaactctccccacccagcctctcgcctggacactggcacccacacccctcctgcactctgctgt

SEQ ID NO: 587744 - DNA, 4001 bp, Homo sapiens
ccgcacccaacactcccactgtcccacgctgtgctccatggacccccacccgtatcgctgctcgccccaagccgacacaccccttcccaccaagcccggcaaacccgggaactgattataaatagggcggtgggggggagtgggagagaggggggatcccgaggtgggaggcgctggccagcagccggcaggcggccaacaagcagcttgtgggggcgggtttatggggccgtcgccatggcgccacggtgcaggctccaaacacacacacacacacacacacacacacgcgcgcacacacgcacgcgcacgcgcacgcctgcgtacacagaggtgtggtggcggggaaactccgaaggcatagccacggttcccacagccctctggcagggccagctcgctgcggcatggctctccctccctctgaagccagccccaggcaggaaaaggccagcctcaggaggtgaggctccaggaagatgtagggaccacagtggccacgcccctcggaccaccagcacctgcggaccctccacccaccagggttgtggctttgggaacaacaccagctgggtccaagcctgcccagccctgtgcccaaagaaggccctaccctcttggccagtccctcagcgcacccccccacactgacctcctgcactcccggcaggccgaccgcatcttcctggcctgattccctaacctaatcccccccagatctccaagggccccaccaaactaacccacgatacccacactgtcccaaaatgatcccaaggcctcttaaaagcacgtggacctaggttctctcctacacaggcctgcaggggtgccaggactgacccccgctgggccgccacccaaccagccccgcctcccccaagccggctccgggcaggaaagggcggtagcttcctccagcagagatggggcggggctcggcgggagtcccctccctcccaccagccaggggcctgcaggcgggaagggaagccgcagggaggagcccggagcagaatgttcctggcccaccctgccagctccgcacacgcccccctgcggcatgcgccacccccccccgcctcgcagcacacacctcctgcagcacacaccccccccgaagcacacacacccctgcgccagggtccaggcgtcccccaagacccccgggcggaagctaccgccccctgcccccaccctgtgggaaccgaagcgggagctgattcagcactgggagggccagggtgtgcgactgggcggccccttctccccccactccagacccctttgggtttccagagcaaccagtcagggctcctgggcagcccccagcccccccaccccaccccaagacaaagagccgcagtgtggacttgctcagggccagccggcccggcgcctctgcacagtggtcccccagccctgccctgccccttggacgccaggttgtgggcggcaaactcgggccgggtggaaggggctgaccctgctgtgaaggctgagctcccactgtgtccctgtccccgccccgccgccgccgccgccgccgccgccgctgcagcagccaccccgcccccgacgctcctgcagggctgcggagccgctgaagccagcccagtaggaccccgaaccaggtggagcccggagggggacgagtctggggtctcctgcggctctggctcagcgacccacagtgtcaccccagggatggcagaccctgcccgccaccctgcgtggactgcacccagccagaggtcactgtgtggtccgcgccccccggctcgggcccggccccaggaccgcacctttgagggagctgatctcgttctggatggctcgcgaggggtccatgtctgcgccggggctgagggcggctgtgccaccaccaggcagagtccagccccgcaccgcactgcccaggccagcgccgcagccgggggaggagcccggaggtccggggcagggcttgccggccaggggcggggcttcagctgatcaatgcgccggacagggccgccccgggcgcatgctcccggccgcaccgcgcacccctcccccccagcctgtggttctggggcacgcgaccccgctaaccccagccagactgccaggtcaccaggccggatccaggagcgctcggacggcccactccccagctccgcagcccccggcccaccccacagccccccgagtccactgcaacgagccatgcttagaacagcctgtgggacacacgtgcgagggccttgaagccgttacccgcgccctgcaggagatacccacccatccagatctcccagtaacttcctcagccggcccaactccagggcctgggctggcaggctgctgagatcaagcccccagaccctggtcggccacctcccacctccccggccccagcagtgtgccccttccccgggcgtctcgcctctgcgcagccctgggtcaggcaccttgtacactggctccaaagatgacaggtccgacctgcaccctggtctctgcctctcccacccagcctcaggatgccccacaggcagccccacaggtcctcctggctgcgccccccagtctgcccactcgccagcatctccactgccgccagatgacactgcagctccatccctcacccaccccccacgaccaccagggacccttcgcagctgctctgatccaaccacccctatggctaatggggtcagcctcctcagcccgcaggagtagctgtgtgtcactgcgcacgcctgggggagcaggtagcactggcagggtgaggtcagctctgcctcactcactgcgctgcagggggcacggaggaatgctgggccctgcccacaccagggcaccccttcaacactggccccgggactgtgctccaccccagtccgtgctggtagtgtggggcaggacagcctccacaagatagaagtgactagcctgcctcagtctccagcaaggcctttcctctgccttcacccgcaagtccttcccctcctgtaaacagacccactgtgcgccaggctggggctggcatggaggacgtgaccatgatccaggagcgaggccggcagctcccacgggtacgagctaacaggcaaagggccagaagccagccccacctccaccgtagacccagcagttctggagtctctcgtccccctgcccgtccctgccctccctgggactcagccagttggggtgtggggagtctcaagaaacaccagttgccaaacttaaggaaaatggtgaagtgaggaattaaaacagaatttcaggccgggcacggggactcatacctggaatcccagcactttgggaggccgaggcaggtggaccacttgaggtcaggagtttgagaccagcctggccaacatggcaaaaccccatctccactaaaaatacacaaaaaaatcagccaggcatggtgtcacacgcctgtagccccagctactcaggaggctgaggcacgagaatcactggaatccaggaggctgaggttgcagtgagccgagatcgcgccactgctgaattcccagctaggttttactgagctgtatctggataaacctaaatttggcctgcaagtgaatcatacttccttagtaaacctcaagtgaaagtgacagatatttataaagagatctaaaaagttcatacatttttaaaaaatgctgttttttttttgttttgtttttttgagacaaggtctcactctgtcacccaggctagagtgcagtggctcaatcacggctcacagcagcctcgacctcctgggctcaagcgatgcccccacctcagctttctgagtagttgggactacaggcgtgcaccaccactcccagttcatcttttaattttttatacagacagtctgtctctgtgttgcccaggctggtctcaaactcctgggctcaagcaatcctcccacctcccagtgctggaattacaagtgtgagccacactgcctggtccagatcaatttttttaatttaatgcataaa

SEQ ID NO: 587745 - DNA, 4001 bp, Homo sapiens
agaggacagcaggaaggccacatgggccggggcctggactacatgcctggccaagcagtctttgtctcatgcctcctgtcgggagacatgtcgtccatttagagaggagctggagaggccactaaacctgtccaaagccgcagagagagccaggaggggaggccagcctccaccccacagcctcactgatcctcccagatgggcccaaggcaagcccctaacaagtccaactcaccccaggccagccagcaccagggctccgcccagcatcccacacgggcagctgcgccctaaacttgggcctcccctgggccccctcccccacaccctggcaaatcctgcccaccctgagagccccaccccaggcccccttcttcagcctgagagagcaagctgctcccaggtgccagccccaaagagggaggtggggccaggtgctgggggaccgggccatccggagccagcacggagggcagagtgctccacagtgtgtgtgtgagcctcgggctgcaggggacacatctgcccacctgggtcctgctggtacaggtgcttgtggacagagggaggccacagagaaggggcagagcaaagggtctctggaagcctctgggatgacaggacccgtcctgtcctgtgcgacctggttcgtaccgggaaaggcctatctaggccccaggctgggccagcagacaccacaccacagcctggcctctgccctgccggaggagcctcctgcctggaccctgcgcttctccccatcccgcccagggccgtccccagccaccaccaagtccaagctggccaagcactcagttaccggtcacaccgggcactctgtgcggcaccaagcctcacccatcaacccccgcggcaagggaggcggccaggccatgtgctggaggagggccacacccaaccggcgccagcacctcctcgcacacccccacctcagtgccgaggagcctcggggaagacaggtcactgggacaggagaggaggcggagggggcgaaggcaagggcagtgttggagagaggggagggggcgccccggggtgtgcctgggccacaggctcctccttggcctacacacccgaaggtccccagccgaggaggaggggccacatgggcccatcagcaagcgcaccccctgaccctcggctagggggggccacctgctggtgtgagcgacgctccgcaagccggctgaccactccaaccactccagcccaggcccaggcccaagacccgacaaccagacccctacttgccacccatcatgacttggggtcagggtgcagctgacctgtggctggggcaggctccgggcctggcctggccagggtccgctgggtggtagcaggcaccacaggggtctcaggtgacacctcctcaagctccttccgacggtagacccgctgctcctccgtcggcagcggcccccgcttgggtggggagcccaggggaccctgcacagcctgcacgtggggggtgcggcgtgcgggcatcaccatggcgacggggcggcgcacgcgctgcagagaggcgggcacgatctctggcggcaggtgcaggtactggcggaggtgggcgatgccttcattggtgaggtaccagtaaaagtggcaccaggcaaaggtctcgcggaccaggccccgtgcccgcagggacgccatggcacgcatgacctgcaggttggtgacgccgggcacatgggggtgcaagctgcggggccgccggtccttcttggccaccatcacgccctcgcggaagagcacctcatagatggcccgcagctggtcccgtggcatgagcatgccggccaccatggctgctggagccgggcagtcagtgcgggggcaaaggcagcaggcagggtaccacgagaaggcccggggcgctgcgagaagctcccgcgctacagggtgtgacagcgggcagcggcagggcaggcgggcgggcaggcaggctggggtgctgagcgtgagggcgcgggctcccggctgtgtggctcgtggcgcctggctccgtgcaatccctgccggcactgccggctgcccgccttcctccaggacgccgggccggccccctctgactcagcagcatgggcggcccctcccacccacagccgacggggcccttgtagagtggggggcacctcaagaggcagcggccacccccacagctgcccctttccccccaccaggccccacggctccaacgtcagaaatgacatcagtttctaaacacatccttcaaggtccctaagactgtgctggggcaagtgggggcggatatagaccaagagtctaaagaagagggtggcagggcaggcaggggggctgagggcaggaggggtactcggcagggatgtgggctctggtgtcccggcttcacaaggatctgaaggggggtgctgggctgccaggcctggagggatgagggatgcgaggcttgagcggagaggactagggcctggggaagaagctggggtcttgcgggaggaagtccgaggggagcggctgggggcagctgccacagcacatgaggagggctgcaggcaccgctgctgctgtccatcaggcgggcaaacggacagagcccccacctccacacaccaggcttagaggcagtggccactcaagttaacacttcccattccaggccagattaggagtggcctctccaagcccacagccctctgagcagagcaccggctagggggctcagaggggcctcaattcacccccacctccaacccagctgttggaggccagagattcccagccgctgccacagagaaagtcaccgagtccctaccgcccacagatgcccaccctgggcagcccaagtgcccgtctgcaggccagatggatggctgcagggtggaagaatgccaggccagaagacggccagggcccaagggaagggaagaggaaactgccctgtgaggccctgcaggcctggcccagccacacccatcatccacccccccctccccgccccgctgctgccgcccccactgagggtccaggcatgagaaccgcacccaacactcccactgtcccacgctgtgctccatggacccccacccgtatcgctgctcgccccaagccgacacaccccttcccaccaagcccggcaaacccgggaactgattataaatagggcggtgggggggagtgggagagaggggggatcccgaggtgggaggcgctggccagcagccggcaggcggccaacaagcagcttgtgggggcgggtttatggggccgtcgccatggcgccacggtgcaggctccaaacacacacacacacacacacacacacacgcgcgcacacacgcacgcgcacgcgcacgcctgcgtacacagaggtgtggtggcggggaaactccgaaggcatagccacggttcccacagccctctggcagggccagctcgctgcggcatggctctccctccctctgaagccagccccaggcaggaaaaggccagcctcaggaggtgaggctccaggaagatgtagggaccacagtggccacgcccctcggaccaccagcacctgcggaccctccacccaccagggttgtggctttgggaacaacaccagctgggtccaagcctgcccagccctgtgcccaaagaaggccctaccctcttggccagtccctcagcgcacccccccacactgacctcctgcactcccggcaggccgaccgcatcttcctggcctgattccctaacctaatcccccccagatctccaagggccccaccaaactaacccacgatacccacactgtcccaaaatgatcccaaggcctcttaaaagcacgtggacctaggttctctcctacacaggcctgcaggggtgccaggactgacccccgctgggccgccacccaaccagccccgcctcccccaagccggctccgggcaggaaagggcggtagcttcctccagcagagatggggcggggctcggcgggagtcccctccc

SEQ ID NO: 587746 - DNA, 4001 bp, Homo sapiens
cccacgggccgggctgggaggctgccctgggactgaagcggcatgggagggggcctcccagcaggatgtgcggtggggactgcagggcccagggaggaaggcagggcatggggccaggtggtgggcagacaacgctggaggcagaaccgaggagctgagccgcgtctggcaccaccagggagtagaggcatcctgtgagccaggaccgtggccgaagggggcaattgtgggctgaggtggggaggcagggacagtgtctggtccccagccaaaaacatggatggggaagaagccctcagcccaagtcccatcctggcagctgagtccccggcagctccgggcgtccccagcgccacgcctagaagccccatcttgactcatctcaagtccggggatccagcagaggagctgagccaggcagcgccctcactgcaggagaggtctggccagccaggtccccgataggcagtccctctggccagaagcccataattgaggctgcccaatccccagggccccgccccatcctgtgctgggcacggttgccacctgggaccacagcccaggagctggtgactttgagcagggagggcagggcacagcctggctgcccccgccccctgtgcggcccgagggcatgagggcacctgcctcacctgcgtgtggctccaccccctgctgtgtgtgcagggagccacctccacctcagtgctggccggacaggcacctgcccacttgtccctgccacggcggctgccacaggcctcccttcgtgtgggggacgctcctgccctgccggcctccgcttccacccacctgtcccgcacaggctgcaggctgagggccactgcagagcccgccccgccctgggactgcagcagggtcagggtctacactgcagggtggggtggaggggcaacactgctttcactgacattcagcttggaaacaggaaggggagggcgcagggaatgaaggggcgggaggcaggcggcccctctgccccgcctcgagtccctggcagccaccagcggggcttaccttgctcgtcctgcgcccaccgacgtcccctgcgccagtgccacacagcggccagggtgacaacgtgacccacaaccaccagggagggaaacaggctgcccgagggctccatagccgccacgcggagccgccagggctgcccttcctgcgctgggaaccggctgctccaggctagacagccccctccctgcgtgcagggcgagcgagggggagcgccgggaccggagcctgccctgcccgcaggaccgccccatacgcggcggcagccccacaacagctcccgcccgcctcctctcctcctccctccgcgggtccggccctcggcgcctccccaccctcgctccccacccggccggctcagctgtccctgcgcagggctactgacgctcaaggttagttggccttaacccctgcgtccccgcggccacacccgccgggaggaggggccagccgcacgcctggccaagccgcagccccccagcactgcccgcggcctcggcacacaccctccctccctcccagcctccccctgctgtccccaccagaagaggggcccgagcagcccactctgcctccaaggctgccctctggggacagctggcaggcatggagggatgccagagcccccacctcaagcctgcagctgaacccactgcactccttcaacttcgccctcctcaccagccccaacaccccaaaagtgagactgcagaccagggctgagggggtctgggtgagggcacatgaggcaggctgtgtgcagggcgagggacagcgcccctggcctccagcctcagccccagccctctggcccctgtccccagcaaggggccaggatttcacaaggctttcaagggctgcccacctaccgggcacgatcttcatcggggacggtggcaggagcccacggggcagacggagcgggccaggggtgtgggaggtcacaggcccctcggaggaggcacaagccactggcggcagcgtcgggtgggaggagggcacggccgtgctgctgtcagcagcagcttgtgggggaggggagcagtgggcaggggcccaggggatataaatatccgaggagggcgcgcaaggaccgtcaccacccagacttggaacatgacgcacggcgccagggcacccaggccccgctgcagtcaggtctggctggacggtgccacccgacacctcggtcccccagctcccacagggggttctaatataatagagcagggcgcgggaggtgcgggctcacgtccctgcaggaggcggtgcagtccccacccacctgccctgccaagccagggggtgctcttggaaaggccacaggggccaagagaagaggccgcccattctcccagagggccctgcgcaggtcactcaacacagcacctggccccaccggtggccgggacagccaccccaaagtcacgcgcaggccagagacccaggcagcccgaaaccagggctcaggcctgcgcctgccccacagcacagcctctcctggggtcccagggatctgggatggagacgcctctcctgggccacggcaggagactggcctggctccacccaggagtcccgaagccctgctctgtggaaggcctgggtcagagagccgggccacaggcaggcccacagcatatcctatgcagatcagatcccaatgcagccggggaaacaggacgtgggacacgcacagtcctgctcctcttcctgggacccctgtctgctgggcgcacccctcaggcccaggagaatgcacgttgacggtataccccattccacagcgtcgctcctggcaccacatggaaccctcagcaaaccccatgaagtcctataccatgaaggcctcatacagaccaggagcctgaggcgccgcctgctgtcccgcacgctgccatctgagcccaggtggcctccagtgtagttacctcagcccacagcaaggcacagtgaaccagcctggccccgggccactgggcaggccacccaggtccatgctgggaagcccgcggacaacaagagggccgggcccaccccagcctcctgctctccagccccacacctcaaaaacgtgcggccgagggaaatgcctgcagtggcccactctgggcggccaggggtcgggcgggcccaggcagccctgagggtcagggatacccaggcatgccagaaagggcccaactcccagctgagcccaggacagcatctggccagcagtgggcaggggccgacaggccggacgtttcagcccactccctgccacgtgctggggaagcctcagaggagcctgactcaatggcctgggtgagaaccagctcctggcgggaggagtgccccaggctggcagcgggcagttcttctaccactccacggaggtccggacaggcctgtgcttccgggacacacatcacacacacccctggggcagctccgagagggggctgtgcctatccctgcatcccaggtctgacggcacagaacggtggacaacgggaagagacaggtctgccagaggcggccccggccctctcctctgcctcccacagcccccagctctgcctgccctaccttggcccagctgaatcagctcctccatgctgtacctgtccatggctgccacacaggccaggctgctccgagagccggcagggaggaaggcgaggcaggaaggagggaaggggtgggaggcagagggagggcccactcatgccctggtagcagcggctcctcctcgcagccaccccttagtcagtaagcagagatgaagcccagccgactgacgggtcagaccagcccagcagacctgcctgggggtgcaggggactggcctgcctgcaatcccagagagccctccggccccagcccacgggtcttccctactgttcctgccccgcccagcagaccccccgcccagcagaccccaccctgtagcctccccttcccgctgcaggccccac

SEQ ID NO: 587747 - DNA, 4001 bp, Homo sapiens
gctgaggtcccgcagctagtggagacggtcctaggatggaaaccccaagactgggaagggaatcccactggcccaggactgcagcaagtccacagaaggcctggagccccgccttcagcacctcctccctcccccgtgtcctggaaacccaggccaaagcccaggctgacgtggaacagccgggggtgggccagccccgccccctccagccccgccccctccagccccttctctagagacaaacaaatgggggtaggggaacatcaccccgccttcctccccaggtgtttccggagctcgggggcaaggctgcaccgggccaaggcgccacccccatcccagcccaggcggcggttcccagcagagacccagccccactaggtgagagcgatggtggccccttctgtgccaccggccacgccactgcacccacctacgcagcacagctgctggtagaggtagcccctgcgggccggctcgcagcccccgtccagccagcacggccgctccagcaagacctccctcggcgaggcaaaggcgccccccgcccccgacatgccggccacggccggagccctggttcggcccacggacagtgcggggagctggaccgcggcggcgcctctgcttccagcccacgctgcgaggctgccggcttcgctctccacctcttccacctcccccccacaatccgcccactgcgggagcgaggcccagacccaaagaacctgcccctggcgcgcagccccgcccagcgcagccaggaagccgcgccccaacccacgggccgggctgggaggctgccctgggactgaagcggcatgggagggggcctcccagcaggatgtgcggtggggactgcagggcccagggaggaaggcagggcatggggccaggtggtgggcagacaacgctggaggcagaaccgaggagctgagccgcgtctggcaccaccagggagtagaggcatcctgtgagccaggaccgtggccgaagggggcaattgtgggctgaggtggggaggcagggacagtgtctggtccccagccaaaaacatggatggggaagaagccctcagcccaagtcccatcctggcagctgagtccccggcagctccgggcgtccccagcgccacgcctagaagccccatcttgactcatctcaagtccggggatccagcagaggagctgagccaggcagcgccctcactgcaggagaggtctggccagccaggtccccgataggcagtccctctggccagaagcccataattgaggctgcccaatccccagggccccgccccatcctgtgctgggcacggttgccacctgggaccacagcccaggagctggtgactttgagcagggagggcagggcacagcctggctgcccccgccccctgtgcggcccgagggcatgagggcacctgcctcacctgcgtgtggctccaccccctgctgtgtgtgcagggagccacctccacctcagtgctggccggacaggcacctgcccacttgtccctgccacggcggctgccacaggcctcccttcgtgtgggggacgctcctgccctgccggcctccgcttccacccacctgtcccgcacaggctgcaggctgagggccactgcagagcccgccccgccctgggactgcagcagggtcagggtctacactgcagggtggggtggaggggcaacactgctttcactgacattcagcttggaaacaggaaggggagggcgcagggaatgaaggggcgggaggcaggcggcccctctgccccgcctcgagtccctggcagccaccagcggggcttaccttgctcgtcctgcgcccaccgacgtcccctgcgccagtgccacacagcggccagggtgacaacgtgacccacaaccaccagggagggaaacaggctgcccgagggctccatagccgccacgcggagccgccagggctgcccttcctgcgctgggaaccggctgctccaggctagacagccccctccctgcgtgcagggcgagcgagggggagcgccgggaccggagcctgccctgcccgcaggaccgccccatacgcggcggcagccccacaacagctcccgcccgcctcctctcctcctccctccgcgggtccggccctcggcgcctccccaccctcgctccccacccggccggctcagctgtccctgcgcagggctactgacgctcaaggttagttggccttaacccctgcgtccccgcggccacacccgccgggaggaggggccagccgcacgcctggccaagccgcagccccccagcactgcccgcggcctcggcacacaccctccctccctcccagcctccccctgctgtccccaccagaagaggggcccgagcagcccactctgcctccaaggctgccctctggggacagctggcaggcatggagggatgccagagcccccacctcaagcctgcagctgaacccactgcactccttcaacttcgccctcctcaccagccccaacaccccaaaagtgagactgcagaccagggctgagggggtctgggtgagggcacatgaggcaggctgtgtgcagggcgagggacagcgcccctggcctccagcctcagccccagccctctggcccctgtccccagcaaggggccaggatttcacaaggctttcaagggctgcccacctaccgggcacgatcttcatcggggacggtggcaggagcccacggggcagacggagcgggccaggggtgtgggaggtcacaggcccctcggaggaggcacaagccactggcggcagcgtcgggtgggaggagggcacggccgtgctgctgtcagcagcagcttgtgggggaggggagcagtgggcaggggcccaggggatataaatatccgaggagggcgcgcaaggaccgtcaccacccagacttggaacatgacgcacggcgccagggcacccaggccccgctgcagtcaggtctggctggacggtgccacccgacacctcggtcccccagctcccacagggggttctaatataatagagcagggcgcgggaggtgcgggctcacgtccctgcaggaggcggtgcagtccccacccacctgccctgccaagccagggggtgctcttggaaaggccacaggggccaagagaagaggccgcccattctcccagagggccctgcgcaggtcactcaacacagcacctggccccaccggtggccgggacagccaccccaaagtcacgcgcaggccagagacccaggcagcccgaaaccagggctcaggcctgcgcctgccccacagcacagcctctcctggggtcccagggatctgggatggagacgcctctcctgggccacggcaggagactggcctggctccacccaggagtcccgaagccctgctctgtggaaggcctgggtcagagagccgggccacaggcaggcccacagcatatcctatgcagatcagatcccaatgcagccggggaaacaggacgtgggacacgcacagtcctgctcctcttcctgggacccctgtctgctgggcgcacccctcaggcccaggagaatgcacgttgacggtataccccattccacagcgtcgctcctggcaccacatggaaccctcagcaaaccccatgaagtcctataccatgaaggcctcatacagaccaggagcctgaggcgccgcctgctgtcccgcacgctgccatctgagcccaggtggcctccagtgtagttacctcagcccacagcaaggcacagtgaaccagcctggccccgggccactgggcaggccacccaggtccatgctgggaagcccgcggacaacaagagggccgggcccaccccagcctcctgctctccagccccacacctcaaaaacgtgcggccgagggaaatgcctgcagtggcccactctgggcggccaggggtcgggcgggcccaggcagccctgagggtcagggatacccaggcatgccagaaagggcc

SEQ ID NO: 587748 - DNA, 4001 bp, Homo sapiens
ctgcgctggctggggcctccggctccctggggtccggggcggagctgcctctggccagcttctgggcctgcccagcccacccgaccaccataggaaagaatgcgctgccccaaccacaagaatgttccagccgcacatcaggcagattcggtccagctgggagctgcactcggcctcagttctgggaagagctcaccccacctcattcctactgcccctgaggccgtgagggggcaccagaaccctcacaatggggggtgcccaaacccctcagaggtggggaagcccccactccacgccaaggggcacagccagcccctagggctctgccacatcgtacacgccgcccaacgaagacaccccttggtctccatgcatggtctctgagcctggcatgagattcagggtgaccctcttgctctgcctgtccggcccagcagcctccagaacctcaggagtcaccagaagcccccaaatcaaaatctgaccccgcactggtcagcacctccagtcttgtgcccaagggcaccccggaccccacacctctgccgcccctccctgggtccaaagcctctggaaacactgtcgcctcttcagaagccctgggccagcagctaccctgaggccaagccccgcgcctgctgggtatgggctctgggggcccggccgtgaccaggtggctcctgcctgcaggaacggggctgccactctgctgaggcacagtgtgagatcccggaacagccagggaggtgggcacagggagtccacgacagctggaaactgggagccggggccaaggtccaggacccacgtggagcccaccccagccaggcccctgttccagccttctccctgccactaacaggcctccaaagatgccgccctgggccgggccagggtcaggaatggggcaggggctcagggaagggaaggggcacggtggggactccagacacggactcgggcaaggctgggaccgggtgaggagaagggctggggcggggcagggctgggaccaggtgggctgggggctcggtcaggggcctccacctcccaagcctggctcaagctccccttccctacttcctgcctctgggtgcctctttgctctgagctcttccctcctcatcacctcccctccctcccagcccagcctgccccgccccatccaatcctattctgaccctaaaaccaacagacacacccgccccacccagccaggctacacccaccctctacagctgcagctcagctggctctcccacctgggacgcacccagaacacccccagctcaggtgcctctgcacacctgcctgacacctgtgctgtccagggctgctgaccctcggccgccagcccagggtccctcacgacaggcactgccgtggccctctgaggagtatcgcccccgttttacaggtgtggaccctatggctgaggtcccgcagctagtggagacggtcctaggatggaaaccccaagactgggaagggaatcccactggcccaggactgcagcaagtccacagaaggcctggagccccgccttcagcacctcctccctcccccgtgtcctggaaacccaggccaaagcccaggctgacgtggaacagccgggggtgggccagccccgccccctccagccccgccccctccagccccttctctagagacaaacaaatgggggtaggggaacatcaccccgccttcctccccaggtgtttccggagctcgggggcaaggctgcaccgggccaaggcgccacccccatcccagcccaggcggcggttcccagcagagacccagccccactaggtgagagcgatggtggccccttctgtgccaccggccacgccactgcacccacctacgcagcacagctgctggtagaggtagcccctgcgggccggctcgcagcccccgtccagccagcacggccgctccagcaagacctccctcggcgaggcaaaggcgccccccgcccccgacatgccggccacggccggagccctggttcggcccacggacagtgcggggagctggaccgcggcggcgcctctgcttccagcccacgctgcgaggctgccggcttcgctctccacctcttccacctcccccccacaatccgcccactgcgggagcgaggcccagacccaaagaacctgcccctggcgcgcagccccgcccagcgcagccaggaagccgcgccccaacccacgggccgggctgggaggctgccctgggactgaagcggcatgggagggggcctcccagcaggatgtgcggtggggactgcagggcccagggaggaaggcagggcatggggccaggtggtgggcagacaacgctggaggcagaaccgaggagctgagccgcgtctggcaccaccagggagtagaggcatcctgtgagccaggaccgtggccgaagggggcaattgtgggctgaggtggggaggcagggacagtgtctggtccccagccaaaaacatggatggggaagaagccctcagcccaagtcccatcctggcagctgagtccccggcagctccgggcgtccccagcgccacgcctagaagccccatcttgactcatctcaagtccggggatccagcagaggagctgagccaggcagcgccctcactgcaggagaggtctggccagccaggtccccgataggcagtccctctggccagaagcccataattgaggctgcccaatccccagggccccgccccatcctgtgctgggcacggttgccacctgggaccacagcccaggagctggtgactttgagcagggagggcagggcacagcctggctgcccccgccccctgtgcggcccgagggcatgagggcacctgcctcacctgcgtgtggctccaccccctgctgtgtgtgcagggagccacctccacctcagtgctggccggacaggcacctgcccacttgtccctgccacggcggctgccacaggcctcccttcgtgtgggggacgctcctgccctgccggcctccgcttccacccacctgtcccgcacaggctgcaggctgagggccactgcagagcccgccccgccctgggactgcagcagggtcagggtctacactgcagggtggggtggaggggcaacactgctttcactgacattcagcttggaaacaggaaggggagggcgcagggaatgaaggggcgggaggcaggcggcccctctgccccgcctcgagtccctggcagccaccagcggggcttaccttgctcgtcctgcgcccaccgacgtcccctgcgccagtgccacacagcggccagggtgacaacgtgacccacaaccaccagggagggaaacaggctgcccgagggctccatagccgccacgcggagccgccagggctgcccttcctgcgctgggaaccggctgctccaggctagacagccccctccctgcgtgcagggcgagcgagggggagcgccgggaccggagcctgccctgcccgcaggaccgccccatacgcggcggcagccccacaacagctcccgcccgcctcctctcctcctccctccgcgggtccggccctcggcgcctccccaccctcgctccccacccggccggctcagctgtccctgcgcagggctactgacgctcaaggttagttggccttaacccctgcgtccccgcggccacacccgccgggaggaggggccagccgcacgcctggccaagccgcagccccccagcactgcccgcggcctcggcacacaccctccctccctcccagcctccccctgctgtccccaccagaagaggggcccgagcagcccactctgcctccaaggctgccctctggggacagctggcaggcatggagggatgccagagcccccacctcaagcctgcagctgaacccactgcactccttcaacttcgccctcctcaccagccccaacaccccaaaagtgagactgcagaccagggctgagggggtctgggtgagggcacatga

SEQ ID NO: 587749 - DNA, 4001 bp, Homo sapiens
tctgggcagcacggtggacgggcagcttgacacccaaccacctacccgcccaagagccaggcaggggttggccgacgggccaccagcccccagaaagccgggctccacggtcttggggagctcccgtgccgctgcagccggcaggcacagccactcaccaggcgtgagctcctgcttacgtcccgctccctcggctgcccggccagagcagggcaaagggtaaagggcagaggtcaaggttcagagtccaagcagcagagaaaccaaagcaaagcggagcatgaggttactgtgtcccgacgcggagggcggcaaggcccagagcagccgaggtccgagggttgcggccactcccaggccaggccctcggctgtgatgcccagcagcctgggcgggaggtgctgccagggacgaggccagcctgcccccagggagaaggcaggaggggttgagctggattccaagtagagtgggcggccggagaggccccaaggagggaaggcaggcagaggtctccaggtggggcaggcggggcccggagggggcaggggcacacgtaccaggctgtcccccgagaggacctccagcagggagatgaggttgtggccatcgcggaggtcttcatacaggtcactgatgtgcctctgggcctgtggggacagcagcggctgaggtggccagtcccccagagccaccaataggccctgagtggctgatctacagagtgggtgctggtcccagagggaaggaggcgggggctgagtctcccgggagcccacggaacacaccctgccccacggaggcacctacctctgcccgccagtgctgcaaggagagaccaggaaagaccagaaggaagaggaggaagagagaggcaggagcaggcgtagggaagaaagaggacagaaaataacaggtttcagagatgaaaggtgagcacacaggcagcatggggacagccttgggcggcaggggccaccctccctcagcgcctcccacagcctcagcccctgtgacacgcaccagcatgcgccaccaaccttgatgaggtgcttgttgacccacttggtgaaggttttcttctgcacacgatcccgctcatctgggggagacaagaccagcttacctggggcctgggagaagccccgggggccctcaggtgaccaccgtgcagacacagcagcctggctggccaggtcctgcctggggagccccaaagcctccctcagatcacacactgagacccaggcgccctcacccgcagcccagccacacagcagagacccaggtgccaggggcccaggcgccaccaggtgcagccaccccaccccggactcttcccccgaggaaatgggagggtcctgggcgcaccctgagcccagggcacacaagtcccgtcctgcagtcccccccggcctctacagactgagacccaagcaggggtgtggcagagccagggcccgggcccgctggggtgttggaagggaagccgcgtgtgctgctgacagggcagcgaaccttccccagagcgcagagttcctcgcccttccaggcccgacatctgacgctcggaggcccccgtcagcctcgcgggcgcctgtcggcccactccgtgttgggtggggatggctggcccccgacccccatctccaagaccagccccccagcggtgccaaggctttcctgccacaggaagtgggccttcctcccgcaggggcccgccctgcctggcgggggtgcccgaggggagccctgctacctttcttgccctcagaggccctgagcacagccaggtacaggttgtcctccgagctggttctctttcggcccaggccctcgggctgcggcacgcggagctggtgctgagacatgctgcccccacaccttcgtcgcccggaccctcggcctcaggcacggtgctctgggcagccccgtgtggcacacaggcagctgaaggctggcggccccacgagacgctcactcggcacaggctcagctcagagccccagtcggtgcggccactccctgcctgctgtactccccggcgaggccggcccgcccccgaggccccaccctgcccaggccgccgccagggaggggagtgtcccggcgggaaggagcaagcagccccctcccccacagacacgccctcggcccgccagaaacaggaaaccggggtttcctcacccaccccgaccactgcagccccctagggggacctggggacacggggagctggcacttcactgcacaccaaatggtgccaggaccgcagaggaacacaggccgtccccacagccacccagaaggaccccccaacagactgaagggctcccccgacgggaggggctctgaggccacgcctctctttggagctccctccaggcctgggccaggccctgcttcagcctctgcccacccaccctgccagggcggactcaagaagccgctgatacctggcgaggggaggggacctgctgcctgtcagctcttgcagccccccaatcacacctcttcacagacctgcatgaagcggggagcacaccctgccccatggtgcctgccctggccctggggccagtggggtcccaccccaggcctggcccctcccaagctgcccacctggcacatcctggagcagtgcccacctgcggagcccaccctgccccaggcagacacctcacgtcggaggcgcgtagctgagggctgactcacggaggccgggcctcatgggggaatggagcatcgggaagccccaggaggggcctcgccagtgagtcagggatggggagggggcccaagcctgtgactcacagaggggaagccacacctgaggcaggacctgggcgaccccaggggtggggggtgctgtttgcagctgggtggggctcaagggaagcagtctcatgctgtaaagggcaaagggcaaagggcctgcgctggctggggcctccggctccctggggtccggggcggagctgcctctggccagcttctgggcctgcccagcccacccgaccaccataggaaagaatgcgctgccccaaccacaagaatgttccagccgcacatcaggcagattcggtccagctgggagctgcactcggcctcagttctgggaagagctcaccccacctcattcctactgcccctgaggccgtgagggggcaccagaaccctcacaatggggggtgcccaaacccctcagaggtggggaagcccccactccacgccaaggggcacagccagcccctagggctctgccacatcgtacacgccgcccaacgaagacaccccttggtctccatgcatggtctctgagcctggcatgagattcagggtgaccctcttgctctgcctgtccggcccagcagcctccagaacctcaggagtcaccagaagcccccaaatcaaaatctgaccccgcactggtcagcacctccagtcttgtgcccaagggcaccccggaccccacacctctgccgcccctccctgggtccaaagcctctggaaacactgtcgcctcttcagaagccctgggccagcagctaccctgaggccaagccccgcgcctgctgggtatgggctctgggggcccggccgtgaccaggtggctcctgcctgcaggaacggggctgccactctgctgaggcacagtgtgagatcccggaacagccagggaggtgggcacagggagtccacgacagctggaaactgggagccggggccaaggtccaggacccacgtggagcccaccccagccaggcccctgttccagccttctccctgccactaacaggcctccaaagatgccgccctgggccgggccagggtcaggaatggggcaggggctcagggaagggaaggggcacggtggggactccagacacggactcgggcaaggctgggaccgggtgaggagaagggctggggcggggcagggctgggaccaggtgggctgggggctcggtcaggggcctccacctcccaagcctggctca

SEQ ID NO: 587750 - DNA, 4001 bp, Homo sapiens
ctgtaatgtacaaacagggtcaaaggatacttaggtgtaaaggcaacatccggactaataactcccatgtaccagcttggagaaccaaatccctacaggtttgaggaacaaccacactgctcttttctctgccatttggacaagtgcaaacaattcatgtgtttgcattcattcattaatgcaataaacatttacttagcacctggtacatgtcatacgttgggctggccataatctagactacaagctagacctctgatagtgcaaaagtcatctgccttcaggcggcacatggtgaagagggctaatgtctgagatgatgatgatgctttctaaaagcttactctggcttctcaaaacaagtggggggcttacaagtcctgtaagctcgccaaagacagggtccagccctccagaggtaaaggaaaaagaaaaaataaagacaggggttgtgttttgttcatcactgccttgcatgtataatacatgtcaactgaatgcaactgaaatagaaagcaaaaacttctattctttcaagatcttttgctttgctgtttcggaaggcttcgcaaccaaagaaaaaaaatgacaaaagaagggaaaatgggacttggtcagatagattaagaacaccattagtgcaatcttgggacttcagccccaagtgcatctacagctcagccttcagagcccccagagccacagctggctttctggtggggtgctctcccctccctcttctctgccgtttactgtcctctgaaaaccccacttggagccctaaagaaagaaagggggcgggcaggaagaaggaatgagaaggggaagatacatcctgaacctgcgttcaccaagaaggaaggaagccaaaccctaaggctagggcctgggggcagggctggccccggggaggagatgtgagggtgctccggccgcagcgggccctgcgcccctctctgggcgtgcagggacacttttcccttctaaacggcctagcttcccaccacccccccccacacccttcttttctctttctttttaaaaaaattttggtgaaatcgtctttaggactggaggagaaaagggaagcgtgtaaggtgaggaagaagttggtgagagagagaacgacagctcccctcgagggctcacccaacctggcaccgaacctgcattttagggcagtccttttcactgtctggagttccagaagcccgaagtccaggctgcacccagaggaaaggacaggagtccctaggggagccttctaggcctgtcatttaataaggtagtcgggggagtgaaagaggagtctccatggcccaatccgtacccaagggacttgcctggggacgttctctgctctcctcccctcccgcagcccgggcagtcgttgcggggtcggtgccccagcgccagaacccgcagagaagtttcgctgctgcaaacgtgagaaaatgcagctcagcagaactcccgcccccaccctctccgcggccccaccccccgcagcccgacccctggcggcggcgaccttggccacccggggcacttggaggaggggctgccctcggggctctcccagagggttggaggaggcctccagggtctgcggccacctcccctcgcctgtcagccactaggaccggcgtattcagccctgcgcgcgcgcccctcgcgcccctaggccgccaggcctccgccggggcgccccctgcacccccagccccgccagcccccgcgcgcccctctgcgcctctccactcccgagcccgcgagggcgcccaacttacccccccgtgcaggggccggggctcgggcggggcgcgttacatcgggcggggtcgcccctccggccgccgggtccgccgcgctccagggatttctgggtctgcctgccaaactctccgcgcctctcgctcccctcgctctggtctcccccagtgccccctccttctctcccgtccctcggctcttttttccgggttaattacgtttcgcattaaagcaaaacccagccccggatgtgagtacaatgctccgcggagcccgccggggagggagaggggtgccggggcgccgcgggctgggagggggtgcggccgggcgccggggccgcgcgggggaggcgggggcggggcgcccggaggctgcgcccgaggccgcccgcgttccgcgcctggcaggtgggacctgcgcgccgagactgccccgcggggaggcccggccccgacgctcgctcgggcagcaggtgtccgggcagggggcgtcctcgcaggaggaggcgagctggagcgcgagctccctcaagaaccccatttcctcctcccagagccccacccagcgacctcagctgggcctccttcggatcccgagcccttagcctttggggaccgaggagttggggtaagggttagggtcccaagaagagtggcttcttcaggttgtcctaaatgtgccctaagagaccagtgggcgggaacgctctaaccagggttataaggactttaatttctttattttattttattttttaatcaagacagggtctggctctgtcgcccaggctggagtgcggtggcgcagtcatagctcactgcagcctcgacctcctgggtccagcgatccttctgccccagcctcccgagtagctgggaccacaggcgcctacaccgtgcccgttgggactttttcggtgtgatgcgaagactcccttcctgcccccagagcatgagggtgctctgggaaaaaatgggaaacagacaagcatgtgttactacgtaaacctcgccaagaggaactaagagagctgctgtgcgcgggtcccgcccctgcgctatctcatttgatccacgccgcaacctatgggtaccagtccggttcacggtgaggaaaccgagactcagacttgtgaagtaatttgccctgggtacccagttagtaaacggcaggtctgtcaggttctgactccggcctcccacgtcgggagagagacatttgaatatgcatcaagtcaggtggacaacatccgaaacatgaaaatgtagaagattcgcgcgggcctgcggggccgtgcgccggtgtctggcgatcctaatgcaaacgttgttaatcaggtgtaaatcctacgaggctttgaaagaggcaggcataagaagacgctgaggttctccaggacaaggactggatttgcaggaaggagggagaggctggggcacattcccggtgttaacagaggaaaggcggcctcttatgtctccacgaccgaccggaggccacaaggcctggggaggggggctcgggccgatgagccaggaccgagggagaaggacagcccgccccacacaccccgaaagcaccagtgatgaaaccacacaagtttcctcttccattttgattgccaaagcaaaaatgaacaccgccggtgtctcaggtgtgaaaaaagactgtttgctttagagcattttgctttcaatgaggaagaaaagggggacgatgggcaaaacacacacacacacacacacacacacacacacacacacacacacacacatttcccttgaaataaatacatcaatgtcttttttttccccgttcatggagggttttgccactcatctgtaagtttcaggcaccagaacaaactgaagagcatctcctctggaagcaaggaacctggatttgaagcccagctctgccgtttactggctttgacccctgggcaagttacttaacttctcaatgcctctgttaggaaaagtcagtgagttaacatttgtgaagtgttgagattcctgtcgaacgtgaagtaggtgctacgtaaatgttttttaaatttaaaaattagatgatcattttcagtatgaaaagcaacacaattccatccagctccaagcaaatccgactggaactgagggtttccagcatgagcaatgaggtaaatttctcagatttcagggtatggttcatattaaactcataaaactctactccccgtggggctg

SEQ ID NO: 587751 - DNA, 4001 bp, Homo sapiens
gaaattagttaatttcatttctaaataaaaaatgttataatgccatttacttgacaatgaagcaaaactaaaagaatttttaagaacaacagaaattggcaatacagcctgagcaacatggcaaaaccttctctccacaaaattcaaacaaaaattagccaggtgtggtgatgcgctcctgtagtcctaactactcaggaggccgaggtggatcacctgggccccgggagtttgaggctgcagtgagcggagatgacaccactgcactccagcctgggcgacagacagagaccctgtctaggaaaaggaaaaggaaggaaggaaaaagagaaaaaaggaaaaagaaattgacaatcaaatatgagcagaagctgtatttttagatctaaaaagtaaaattctccaagaatttggggttttagggcttactgtatttgtgtttaagagccttttcagttcatttaacagaattttaaagcaagatgtctttatttaaaaatcatttagattcatttactgaggctgaatattttcttctgaagcttagtcactatactagttttatttagaggccgattacgtgtgctttccaaataaatagcttaataccattcattccccgtgtggtcgggacccaaagagattataatgaagccttcgttaatactgaattaacgtgaagaccccacgagctgccagagtatttaaaaaaagtaaatgctcaaaacgcggtaggcattcacccttaagaaactaaagggaggggaaaaaaacttcaaactgtcaagatcacttcttattcttaagagaacacatgcctttaagactctcaaagtttctgtctaaatctttctttaatgagtctcttcagcaacgtactacacaacacgacaaagaaggcatttatcaacaacgcgttttgtgagtctatgaattaccgaggagggcttaggtgtctgtaaccttcatacccacttccaccgcacactcaagttattgctggaatgtacggagagcacacaaggctattcaagcaacaccggcagcgcgctctcggccttcaatcacatttttaaaaagaaaaataaattcgtcaaaggatcataaaacttgaaaaggctccaaataaataaaccatcgcttctatcagagcaagttctgcggggccattttcgtctcccaagtgacatacaaatatgtagttcaggtcataaggtccccgacacgcagaccctgcaaacttttcggccagaaatttgtcgcgaccctgagacgcccccggccgtgtccaggacccccgtcctcaggccccacaacttctcgcccggcctcggggctccttcccgcgtccgccggcccccgccccgcagacccgtggaccggaccctacccggcggcccccgtccccccgcggcggcggcggcgtcctacgggcgggcgcggctcgctcccgggctggcgggacggcggcggcaactggcccgcgggccggccccggcgcgaggggagcggccgggagcgccccgtttctcacagaccccaacatggcgtcggccgccaccgcccgcgacgacgacacctcccggcgctgcgacggctccgggaccgcgggaggaagcgcccggaaagtttcgcgtctcccctcccggcccgtcaggagccggcggaccacccacccgggcttcacctaccccgacggccgcgggcggcggcggcggcgacagcgaaggcgaaggtccgatcctcctggtcgcggacgcagggcgcggactctgcccgttccccgccggggccttccagggtgtgtgctgtccgcagccccgcgcagccggcgcgatccagacgcggtgggcgggctggccgccagcgcagccgctcgcaggtgactcccccgcccctccagtcgaacccgacaacggctgcctgggctggcctctcccctgcgcgcgcacgggcgcgcccccgtccacactccgggcgcgagcgcgcgggcacgagcacacccacacccctcgctccccgccctttcttgccagttccctcgccccgcccctcgcgcccctcgcgacgcgctctaggggcggggcctttggcggaggccacacccactcaggccggccgcgggcggagcttgtccatgtgtgaggtcgggacgcgctcccgcgacgcgttgaggtgcacgtgaggcgccttacctgactttcctgactccgaccagcccttagaaagtattgctcaactgtctacgaagttcttagggagactggaataatagaaggaagacacctccccacccacaacaggcctccccggggaactgaagaacgagaaaggcaggctttggatctaaatgcccaaaggcatcggtactggcatttgctgctcccatttagcacagcaatcctttccgtcacactttccctttgctttacctaaaatccctcctcttgaaaccaagggaactgcggcgacacacacataccctacgtgctccacccagccctttcttttaaatgcatactttagaattctggtcttcccaaaactttgacgacacaaaaccccatcagcctacttcacatacctagaaactgtaattattgcatagtatataaggttaaatgtgccctaattgatctgatagctaagcgctctgatgggttcgtagagaggtaacgaagttgcttagggtagactagggatgggggcgaagtagggagaacagcatacttattttaaacaaagtgtgtgtggtgtgtaggaggaaattgggttttggtaaattttatatttcttattcatctattacttcagtaagttgttttaacctgtgtttgattgctgttgaattagagtcactaccagccaagctgcacgtggatgagcacctagggatgagagcagacttgggttccgccctgctcttccacctgggatcttcctcctccaggcttgttgcctcctatcctcccctatttcaatagagtttgtctctgaaacaaacaagtctttttttaaattaataattagaacaaaattggcaaagatgaactttttttaaatggggaaaattgtatgatcacacacacacaatctttcgtgtgttagagttgtctctagatgagtacagatgtcaccaggacgcttgtccgtaccatcactctacctcattcacctctacgtgcacagcaatatctatcagtggggaaaaggcaggactaaataatgcctaaaatccttttaaattttgaaagtaggaattgctatgtctgactggttgtctaaggtcaagcctagagcattagttatcaaatatttttggtcactcacattagtaaaaatgtttgccctcctcacttcccatgtacttatttagcttaagtaaagtgcatagatagaagccagaatgactgtaatcaaacattggctttgtctctaacaaccttggcacatccaaagataactttggttttttcacttgtaaaatggagataataaaagtatatcacagagtcattatgcagatgaaatgaattaatatatgtaaagcatatacctggcacacagtgctttacaagtgtgaaataaaattattacatacataatatacacatttatatagtgctacgtaagtgtgaaataaaagttgttacatatgtaatatacccagctactcaggaggctgaggctggaggatcacttgaggccaggagtttgaatccagcctgggcagcatagcaagacccagtcacacatacacacagaattatatgtatgatatatatagtgtgtatttatatacacacatacacctattataatatacctagtatgttaggtacattaaaaaacaacatacacacacaaaaaaatcagaaataatgattttaaatatatatatgtatgttttctttctgtactcttcatagtctatgccctccctgggctgcgtgcaccccagtttggagaccgttgatttagatctgtgctaacaaatacag

SEQ ID NO: 587752 - DNA, 4001 bp, Homo sapiens
agtgctgggattacaggcgtgagccaccgcgcccggccaatgtctgcagattttcaagagtaaaagtttccagctgaaatagctactgcaagtcatccatttttatcacatccaatcctattccccattgaaaattactaattatagatttgcataaatcattctagagattttagtttgtatgtacaaatactatagatatattttaaagatgagactatagcatatacgtattgttctatgatattttccctcaataccatattatggatatagagaagtattcccctcatatttttgatagaatttcacttctgaaattttgtggcttctatatctagctggtaggaaaaaaactatccatctaactttgagatctatactattataaatgatcatagagaaataaaatattttttaaaaaactcttctacatttcaaaaatgaaacaaaattagactcttaagtttattaccattattaccaagactataaaatatatggaaaagggaaaatgtaaaataaaaaatatatgaaagaaaaactaattttccaggaagtctcaatggttgaataactttttccagttaaaaagatctcaaacttttacatactgaataagaagttaagagttacagccaataaactataaactatattctttcttcaaattctgattaatcttttgttattttatacagtttaggacaatgtttctcaagttaaatcataatctctgggtcagagcctgagaatttatatttaccaaatcccaaggtgttattttgcatgctaaactggaaaacagtggaattagaaaatccttcactgagactttcttttatttggcttcttcctcagctgtaaagtgaagtctttaaatctaaccgatctcacagtatgaattgatccccataagttctcttactgttccaggcaacaatgacatgactttgctcattttatctaaaatagaacattttatacaggctttctgaacagttaagtaaagctgtaggcactttgacaagcacagcaaactcgggtcactggcatcactctttattgtatttatatagttctgaaaattcccaaagactcttcatatctattgtgtttatatcgatgggacatactctagaaatagtataaaataaagttgttgtaactaatgactcggttttccatcttcactcactgctccaactccagaaacgtctgatgttagcgaaattgagtttgaattcactgccataactccagttctttttctctcagtaacttccctagactatgaacacagtattttaggaagtatttttgtttttcaaactctctgtatctacatgattgtgtaataaaggacaacctagaggtagagagaaaaaactgttagtttagctaaaacttaaatttttaaattgagattttctaggatttgcaatatattcaattccttattttatgaacacttcagttgctatgaacgtagctctcagaaaagccagaaaatgggttgaccatgcttttaagctttctctcctctggacctgcaaccaaaattctcttggtatgaaattgcccttgaaatcagtgggcattccatgcatttaagcagctctctcatttaagttaattctattaaaaattaccacaaataaaattcaaataaattatctgaatgacacaacaaaagattaatcctaaaagaggattgtactgcagccttgcaaaactccccagtatcctgttaaaagtagtagatgaaaatgtcatgtagctttcttaaaaaggagcttttcagcagaacaacaaaaagcatttcttacccagagctttcatgtaatcgtcaaagttctcactagagacaagtttccaggtgcccaggaatttgttgctcatcgtgatgggtgagagctcaacacagttctaagtgggattcagaagactcagataaaatgctgaggcctcagaagattcttttcaaggatgcccaaagcgtgtgactcttacagagacccaatggggaaaggcagtgtcgggactaagcaatgaatggctcttcaatggccagctgcccgcccaataggataaaagaaaaccccacataatacttccctttgtctccaaaaaaatttataaaatgaatgagattactatttgaatcttcaaaaattttttgatcaatcttacatttataagaaggcttaggcccttcatgctttggaaaagactgcatgaattctgtgatcatgaatgaatgtgtgtgtgtttaggcatgtcggtcactctcaatcctgagtctgcacaattaagaattcttattgaaagggaagaaaaagaggaaaatgtctgtaagtattatgataacagtctcaaatatgttgtgggagagaaacgtaggggagcagtgtgaggaagtattcataggtaagaaggcttggcatagttcacatatcccaggcaggcagagtaggcagacaaagaagtcagtctattgcagcagagcacagaaattgtattcatgtgatgaaacaagaagtagcactataacatgttctttgagcacaacaaagattttcagctagaaatacttaaagtctgaactaagcaggttcctggatactataactatttgtgtttaagtcatttaaaatgaatctacaattttataaagaggattttctatagaaagagtactaatttatattgacaactcactatgggccagacactgtgctaagtgcttaatacgggtgatctcatttaattatatcactaattccaagagttaggaactattattatatccattttaccaatgataaaaatgagcttggggacattaggtaaattgctcccaaaagttgaataaggagaggacaggtttgaacccagcattgctgccagtgcccgggttctgaaccatgatcttaccctgcttctattatactataccatacatgctacgtgcacggaggccctggccagagatcacctgatgctgatagcaccacgattagctagaaacactctctctcttctcaaaaatcaagagaggtaaaaaatcaaaagatccagcctactatattacatcaaagccccagtctttggccaaggggaacaaacgtaaatccacttagaacataagtgttgctcttgagaatctctgattactgctatatctttcctagcaggttttttgtttgtttgtttttgttgttgtttgtttgttgtttgtttttaccttagcattaattctggctggagacaactgatattaccaagttttatacatttagtaaacaggttggcactgtttacaacaacaaaaatatgatgaatttgctcataacaggtagaattactagcaagaagggctcaagaaacccagtcgcatagctgtgacataactattgcagttacatagttagagttcaagctgagtaaaacacgtgaaatcatatacagtgggctgaagtttcatttacaatcccagtgcctgaatagctcaaggtgggaaagaaatggtgaataggaaaattcctcagctaaccaactaacccaatcctaaacccaagagaatgtaactggagggagtacattgtactgggatagaaaaaacaactgtgaaagaaaaagcttttgattagtggatatgttattttattttccaaaacactttacagaaatgatgatatcacttgtaccttcaaaacttttttttttttgttagctgtacactattaaggagtacagcattcaacatttaggttttctgcctaaataaatgaaggactcccaaaccctcacactagagctgagaccttgtattcagtgggactgctacaagaaagctgtgtgaattttaagctgactctgtgttgcacataggaacagcagtggagtttaaaacataaacattgagccatatatttccaagagagaaaacttataactttgaagcaatattagaccaagagaaaaattttctacttaag

SEQ ID NO: 587753 - DNA, 4001 bp, Homo sapiens
aaataaaaacatggcaagaaacacccttgatatacaatagggccatggatggaaatatctggatacggtagaaatagaagaaccttgtattttctcacataaagggggtcacaggacaagctggaaaagaagccagactttgaggtggaagactcccactggaattgctggatcatttaactaaatacccaaccttggctatgcgccccaagctctctaaatctgtttcctaacctggaaagcagtgctgataaggcacgcatctcacagtggggctgtgagtaggaaatgatgtaattcagttggaagcgcttttttcaaatgctttattcaaatgcaaagcacatctgccgctaagtccaaaatgccccctccggttctctcagcccctccactcctatattcttcttccccagtctgtttctcatccggagacgcctttccacctatcaagatgggctgatcttcaaattgcgactgattgtccagcagatgtaactatattcaccaaactatctctcacaattggactgtgggggtggttggtaaccgcatttaatcctgggctgacaatgggactggatccctggttacacggccctacgcggtggccctgcggtaaacggcctctcagcccaaacccaccctggttactgagcatgcccagaactccctcccgggccaccaaaggaggggcaccatttctgcaggattttgccactgtggaaagagaggcggagctgtcatcgcgcagaggcagggactgatacgcggaaaggacgtggagatgggaataagcaatgaaggaccagcattgaccgtgttaggcacacaaatctaattgccccctggttacttaccaacccggtggccgtggctcagctactgcacacacacaccaagttcctacacacctttcccctgcttggccccacacaattcatggcactcacagcccacatcctacctcctactccgcaccagatgcgcacccgcacttactccccaaacacgtggcatctggtaacccgggaaacgctgcgactgtggcgcagtgcgcaacaggggcgggggaaccaggcggggctctggggcgcaggggaaagctggagatttgggaagggggtttcagtttgttttttctctctttttttttttttttttttttttttggtggaggaagcagaataaaccaaatcgcgacacgttcctgcgcccttcttggcgcagtggcgcagacacggtccatggcgccttgcgcaatagagtcggtctgcaccccgtctttaagtcgtggccctgggctggaattcccgactgcactctttgctacacccccatagaccgcagacctgcgtctctctctatattcctctcccatctgctacgcccctctgaatttcttcccgccatgttgtgtgccccccccccactcccccgtcaccccaaccacaccaaagtggatgcacgaagcgggaaccttctcgtttcagtctctgctccctgcagcctgccaaggcgagtggacaaactgaagctggggtgtccagcgtcttggctgcccccctcctgtccaccctgcctgtgctatccttgctcatcttcagtgccatcccgcttcccacaccctgagtagcctggcgcccggcttgtccccttttcccatccatcagctcacacccagggtaacggggcgggacccctatccacagtgcgccctcgcccccggcccacctccgccatgcggcggggcagaggcgcctgggccaggcaggtggaggagaggggcactggggctgggggctgcgtcctccggtcctcactccgcgtgccctgcccgatacttacccaggcgcggagagcggtcagcgggccctccgctccgcatccattagctggtggtctggccgcttcacttccggagcgcggggctaggggcggtgccgccctcccctctctctctccttccctcccctccagccctcccctgagcaccgctcccctccccggcgccgcgccccgcccgcgcctccctcctcccagcgctgccgggaactggcagcctttcggctcccgcagccgcagcggacgccctcccagatccaactttgccgcttccccgagctcgcgctgtagccgcggggggcgtgggcagggaggggagaagcggggtcagggggagggaccgggagggtgggtcgccggctcgccagccctccttcctttctgtgcaccttgcggtgggcggcgaacggcagccgcggcagcagctagggggcttgtgcacacagcgagggagacttagggactggcagacggacggacggacggcgaggaccctacccgagcccccgagccatggccgagagaaagcaatccgggaaggcggcagaggacgaagaggtccctgctttttttaaaaacctgggctccggcagccccaagccccggcagaaattctgtggcatgttctgcccggtggaagggtcctcggagaacaagaccatcgacttcgactcgctgtcggtgggccggggctcggggcaggtggtggctcagcagcgggacgtcgcccacttgggcccggacccgcagccgccgtactcgcggcagggccggcgcgccggcggagagccatctgttgaatcgggccggaaggtggagatccggagggcctcgggcaaagaagccctgcagaacatcaacgaccaggtcggtgtgggggttgggggtggagacggaggacggggcgcggggatcgcccctccctcgcccctgagcccggcgcgcccgccttcatgccccgccctggacctcgcctcccgcatctgcacgcgcaccccgccctacccgccccttctccgcgcagggtgcggcgaggctcgggctgggcggtgggcggccgtgcgcccacaaaggctgcccgcgtctccttgagcttgagaggtggggcgtgggcatagggaatgggctgatcccctgctggggcgggcggtggtcgtctgggagggggttggccgcggttccattcttctgaaaccctcccgggcggcttccgattgcagctgcggctgggtgccccaccctttttttgagcggctcagagcgtgcggtggaggctttgcgtgaaggcccgcggctccccggtggtcgggaggggcgggggttcggacggccgctccctacagcctccgcccgcgccttctgcgctcacgtcccgagctccgaggccaggaccatggtcagcgccccccggaccccctccgagcaccgcaccgcccttgactcctgctcgcagcgtgagaagagccaggaaggctgtggagtcacccgaggaaaccgagacgctcctaaatagcctatgtggggaacaaagttccaataagtgtctcagccggggcttcacagagcgctccccaaaccgctatgtgggaggcgctttaggaagcggggaactaagtggattatgttcaaagggtcaaaaagacaagaaaagggggaaaacccctcgcactcgaaatagactgtcgaagaagactaaacccccttttattgtgttaatgggggaaacaaaggccaatttggtcacgcttgattttagaaaatgtttgtcactttctgacaaatatgaacagtgagcattttcagcgcagtaataatctcacaccacaattctttctttatctgagtgatccttacactagtgtaattcttttccacagccttaatttcttaactgataatttacaatgcaaaatgttttaacacgttttccgtttctctcccatgcctgctggtaaaaataataagtcaatcaatgaatgattgttgattgaatacctattgtgcgccttgccttgtagggcagagggaaggttagttatagaaagtgcaagaggtttcttcttctcagagggcttccagagtagttgggagtggtctatacatattcagcgagggattccacaagcatttacatttgtgtacttacagtgacagcc

SEQ ID NO: 587754 - DNA, 4001 bp, Homo sapiens
gtttatgaagtacccagcctcaggtattccttcgtagcaatgcaaaatggatgaatatggcaagtttcttagctatttaaggagacgtatgggactctgcagatgatcatattcccatatacaaattaaggcacatagccttgatggttgggagtttcctaaattttcagaaaattctactgtgctaggttgccaatgccactcaaagtgatgtattggttgatatcctaaggaaagttgggttttgaatgaacaggcaatcagttagggtatttgatgtatattatgagacatgtggacttgtataaggtgcctgtgggtataggaacagagcagaagaaagagagaacaaggaagaaagagaggaataaaagcaagcaaacaaaaccaaaacaaaaatggcacgctggaaagaagccaaatggaggaaagaagatgaacccctttagtccatattctagtagctactaggtccattggaccaaattctccacgtcttgctcagtaatgataccgttgaccacaaggaatcagtccctctctggcaaggtggcaggatggacaaatggcttgtggaaggaggaagagcagaaaccacaactcctaatcttaacaggaactctttgtccaggtaaaatgggaaactttaatgtttccatggagccaggcaccctgagagctggggaaaggagaggggataggtaagccgtctttgaagatgaaatagcaccatcatagctgtggtaattggactctgctaatggctaagagtaggtcccactcttggtgtttagagagacaatctcgaggaaaggtgagctgactggttgctgtggcaactggatgggcgtattggtccacttaactgtccccatagtaactaagctcctggggagtgatagaggaattagttatcttaacatactactattatccccatggtaaccagtctctagccggaagtggtcagcttcaaggtgcaatcataggaaaatctgctgcctagagaaagggtgggctggactccttgcggggtgtgtgtgtgtggagtggggagggggcggggagatgaatgtgcttctaggcctgggagcaaggctaagacagttggtgtgtgaggtctctccttgcccccagcttattggtgcccaactcactcatgggttgcagtggccggtacagctgggaggagcgccccttccggctacacattaccattctggtgcagggtgcgccggcgctggctggactgcatgctcaggaccaagtattgcctcataaactcactgaaccgcttctgattggccaacttcctggccgacttccgggccccggtgaagcccccaaatctcttctgcagctgcttctgctccatctcaccagcctcctccatgccaggctcgggctcttcctgctcctggaacaagctccggactcggggcattcgccgcagatgctgcatctccgaagctctcggctggtagagagcagccgccacatgctctggggcggcagggctgagctgccaagagctcctggccatgaccttggtgcatggagtccagagggggctggggaagaccttctcttcacactcgaggatgcacacctgcaaagatacgggtgagaggaggggagaaggaacaaggacctctgttaatccagggcgagggaggagatctggcccactgcaccagtgcaagtgcttctgaagcatctaagttatcaagtaacgtggagcagttttacacaggttttaggttcgtagaatttcagaattggaaacaaacagagaatcatctgacccagctccatcattttacaaagaaaccagggctcagagaggtgagcgtaacttacctctggtgtcacagcacgttaacataggaagttaacacaggataaatgcgcccaacaccgcaccttgttacatctttagtcgggtttttggagccaagcacagctcatgactgtcacccataaagaattttattttgttctctcttcaggcttgtgggaggtcacatgggttaaagaaattggggatgtgaaagtatgtagtcaaatctgcaggtttattttaaggtcaccatgtaaagatctacctaggtgttgttaatttttcatcccgcgtacagcagtcgtcactatctgtgtatcatttatagcaaatggggtcaagaccctgtggggtggtaggccggctggacgtgcggggctgaacctgtgatccagttccaggtgtggggagagatgccatcatcagaccagagcccagcagacccgctcggctcctaggaacactctgctctgcctctcctgccaaccctgacttctagccaccagctggaccacgatgtttctccagcccctcttggctggttctgaccttggccccccacctcccacgttcttggttctgattgggtctcctggaagcctctgcccccagcttttcttcctatttgctgttttggcttcacccctaatttcagtccaggtttctggccttagccggctggaaaccccacttcaacctgaccttactgctgtgagtcagtaggcagagctcctcatcatagcgtggagctcctgcctggcttccaggtcaccttctggggcagaggctgcaactggcccgtattcatctccccttctccttatgcacagaacactgttttattcctaaaggcaacgtatatgtttcccaagcttccttggagccataagtagctgacgacataaaaatggaagtgtaggccgggtgcggtggcgcacgcctgtaatcccagcactttgggaggccgaggcgggtggatcacgaggtcaggagatcgagaccatcctggctaacatggtgaaaccccatctctactaaaaatacaaaaaaaaaaaaaaattagctgggcgtggtggcgggcgcctgtagtcccagctactcaggaggctgaagcaggagaatggcgtgaacccgggaggcggagcttgcagtgaaccgagatcgtgccactgcacttgacgctgggcgacagaacgagactccgtctcaaaaaaaaaaaaaaaaaaaggaaacgtaatcccagaactttgggaggccaaagcaggcggatcacttgaggccaggagtttgagaccagcctggccaacatggcaaaaacccatctctgctaaaaatacaaaaattagacgggtgtggtgatggctgcctgtaatcccagctactggggaggctgaagcaaaagagttgcttgaacctgggaggcggaggttgcggtgagctatcatgtcactgcactccagcctgggtgacagagtgagactttgcctaaaaagaaaaaaaaggtgatcgggcatcagatggggtttccaagaaagtaggagactgacttaagtgggaagaacattccgttttcctcttcctccaactttctgtttggaatgtggacatttgggctgacattgtgtttgccatctagaaaccatgcagcgactcaaaggatgggagtcatgggctagaagctgccgactggcagagaagagagaggagactggagctgccactgcagccctgggctgttcccttctcactccttgtgaggaactgaatctattgatttcagccgctgtcactttagatgtttgttactagcaggtgaatttcattcttatctgatatatttgtccttctgcttggcctctcggtccctgtctctgagtggcacctcactccccagttgactcagatttcaaaccctgggcatatcttttcctcctctctcactgcccccatcctgccagtctacagttctgcccctcctcccactccctctaccaccgcctaagtgcctcttaggtgaagtgggtccctaactgatctccgcatctctggtctttgccactgtcatcagtgtggtacccctggcaggatactcttcctgaagagtaactaatcatgtcattaccttgctcacagctgtctaattgtttatcatatccataaa

SEQ ID NO: 587755 - DNA, 4001 bp, Homo sapiens
ccacctcacagggctgttgctgggataataggtgtgaaagcgcctaaatcgttgtacaaatgtaaagtgctgttattatcacctctgctgaatctactagagcccctgcaagcctccctgcctggtggagtgtagacggtaactacctgattgattgaatacaggatagcttagtgacagctcttgtcataggctccagggagcacaggtttgagcctaatcctgcaatcactcccttcactgacaatgcaaactcgcctgcattttacaaatccgtaagtactctcagccttcagctgataaagcaggggctgctgccctgtgcgcaacaaaactgcgccctcaaaatgacccgaggctgtaccacagcgccctcgccaggcagcaccaggcggcacatgcttttacagaggtggtgatggttggggatgggttttccagggaccctcctctgcagaagactcagcaagcccaaaggagcacgaatcctttttgttaaaggtaacatagcctcagtgtaagcttgtagaatatttccctgccacactttacaaatgagaaaaaaagaggctgcatgcagtagccacccacaagcagcgaaaaagagcagtatttgctttgggaggttttgataagaagccaggcagttacttttcccatctatgttgaaaactctggtttgggcttgctggcgaatgccgtgcaaagctcatcttttgttagtctgccgaacaatgttattggttataattggggcaattatgggctgcttgaggaagctaaacacagatgtttaagcgcaggatgggggtattcaagtccaaagcagcttgctttaaatagtccatttcccgaatcatcctgccttacttgaaattcccccagaacttgcccatgttcagagcgagattcggggaggaggggctgggtagtgaagccggggaagcaagactcgagggagagagatgcacaaagagaggaggaagaaagaaggtggctgagagagcctcgagagttgggatgcggtgactatgaacggagtattctgcatgacctgggcaaagacctttaggtgggggagatgggcagggggagagggatgccaagcaagagaagagccctctaaatgaatcgggttctgggagaccaaggtcacgcccgtagaaatgctctctggaattcacacgccgtggcgctcagcagtgtgtgtatacaggtgaagcacactccccagatctggcgcttccccattatttgtagcaatttctgctgggggcagaagggagaagggctccctccggattaaaaactcccatctggatggcatcaagttcagtgataggcggagaagcagcctgcgcaccgcatctgagaggaaaggaagccactgagaggaaaccctcatgagggggccagggtcttcctgggggccgccccgtggaaggcaaaccccctcccaagtgcctgcccctcctctggcctcactcctccagcagcctcctctcgacacagagcaacaaccacgtaggggccacagctggggaagcaaaacttttcctcatttccaagttcccctctttctgcttctgcgtctgtctgaggttaaaaaagagactcagccctcccccgttccccaccatccaagcgctacaaaggagatgaatgaagaaaccatctcgcaagaggccagcagcatccacactggacaaaggagagaggccgaggagccagcccctggtggccctgccctcccggagctccacgcagttagtccagttagtcgcggtcgggctgggggccccgtgcagttgcctacctgagagctgtcagtccccggctccctccgatggatgcgaggctcggttccgctttctcagccacaccagcatatatatcctctcccccacgcacagccctccccttccctgcccacctccatgacacatacacacactgacccccttcagcaaccaaacagcagaacctgcaagccttcctggctgttcccttcccccggctctgccatcagacctgtgacatccccacctccccatcaatccattctcaagcctgcttcacctggactctgttcagccaggatcccacagctgccttccctgtgcttccagaggctctgtgaggactgatggggagctctggcaagtcagaaaaaaagcctcctggtgacagtgacgaggcagaccccaaatcctggagtctccttgagcaacctttttgcctgaggagtgaagaataggaggcaggcagaagggaggggagctcatgccaagctcctaccgactcggaggagcccagggctgagctaagccaagccctgacctaatgtcattgcccctaactaggccactcaagaggtggctgcacctgccctgggccaggtcaggaggcatttccacaggtgcccacagcatggtgcaatggagaatgctgagactcgaggctcagatggaagtgtctgaaattcggctgtacagtcagagcaaggcacatctctttgtgaacctcaagtcctccttccggaaaatgagtctaatactgcccaggatggttgtgagtagaaaaaggagattctgtttgaatctacaacacacgaggcccttaatgaatgtgctgcatcctccctctcctctcagcccgcttttcacactgattagtaccacctggatgtagaaatcccatatcagtgtctggtgtcacaacagagagcttttaaagcttctgcaacttagggcatcactaccgagggccctggaggctcagaagctctggaagcttccctgtcccttactgcagagcctctttgtcttctacagccgccgggggttgtgggctgcaggaaaggagctcacaggctgaaggcacaggcttgagggtttagcatccttgtggaccccacgtttccttaccttaggtgaatttcaccatgaccctgtccttggttttcctaagagggtctaaaatattccagaatcccagggtttgaacctatgtcatccaaggagctcaagcactcattcatgtggttaagtccagctctctggtctacccaggactgggtggagaaggattgagggaagcatctgccctgactgcaaatggtatagggtttctttttggggtaatggaaatgttctggatttagactgaggtgatggttgcacaacatagcaagaatactaaaacccaccaaattgtatgctttaaaatggtgcattttatgttatgggaattacatctccataaaaagaaaataggaaaaagacagcaaacatctgctcaggttaagagcaacaggttctgagaataaaatttcccttccgtctgtgttcacagcaaaagggctcaggagaccagcatactcatgattcttcacttagatctctgttgcccaaaccttacactgcaggtcgcagctaccattttggactctttgggaaaccagcatgttcactgactgacacggggtcacttttgcatcctgatgtacttcagtgtctcaggcctggaacctgatttcatacatgatgtggcagatattgcaggctgcctacccaatccccatttccctgttcttccttactaaacggtacccttgattttattccaggcatcaatgcacttagctaaaagactacatttcccattgaccaagggttgccaatgagcattaagctgcaggtccttgggtggggtttccaggaaagcttttttttttttttttttagacggagtcttgctctgtcgcccaggctggagtgcagtggcgccaactcagctcactgcaagctctgcctcccaggttcatgccattctcctgcctcagcctcctgagtagctgggactacaggcacctgccaccatgcctggctaattttttttttgtatttttttttagtagagacggggtttcaccatgttagccaggatggtcttgatctcctgaccttgtgatctgcccacttcggcctcccaaagtgctg

SEQ ID NO: 587756 - DNA, 4001 bp, Homo sapiens
gagatacaagtctaaatacaaaattcagtcatatttctcacacaccttacgcacataccctgaaggtaatcttatatagtcgttttaataattttgtgcatgaaacaaagttttgaccattttgactgccacctactacatgagatcggatgtggaattttccacttgtgtcatcatgtcggcaatcatccagattttagagcatttcaaattttcagattagggatgctcaacctataccaacattaaaaggtaagacagaagaagagatgaaagaccagaaagagtgccattacagaagtcaagagatattcacagcatgagccaggggtgaatgccacagagagtccaataagatgagacgtaggtgagcggattttcagagcactggtaggtccaggcaaggactgggacttcttgagtaaatgattaggtattaagaagtccaggcaaggaatgaagatttttcaagaagattcaccataaagtgagaaaagagggaaggtgctagctagagggaagttaagattgttttggttttgcttttaagagctgagggacttgcacatatttataggctaaggagagctgacaccgaggctgatgcctggaatcccagcactctgggagaccaaggtgtgtggaccatttgagtttaggagttggagatcagcctgggcaacatagcaaaacccggtctctacaaaaaaaaaaagaaaaaaaaagaaagaaaaaaaaattagctgggtgtggtggcgtgcgcctgtagtagtcccagccactcaggaggctgagatgggaagatcacttgaggctggaaggttgaagctgcaatgagccatgatcataccacagcgagaccccgtctcaaataaaaataaataaataaataaatataggctaaggagtagaagcaggtggatgtggaaagaatgaataggataaggcccctggtgagatgaacaaggacaggatcccatgaacaaggaacaaggatcaggatcaggatcccacaggatcaactttagaccaaccaaaagaaaaaatgtgattccttgaaccacatatatttcacagtatggacttcatccgctgtctttcattacggttaaaattacaccgcatttctagtaattcatgtttgatgatgacaaaatacgtatcaggctacagctatctgcaatcagaattgggaacttatctgaactgatcctataacgcactgcccacattcttcaagaaatagtaaggtaccagcctcgattcttgctttttcccgctcttgcagatggaccaaatatccactgggccctcagtcctgttaattgccacactaaacagggtatcccagaacgtatgctacccgagaatgctgcactgtcccacctgtaagcattgtacttgtggatagcttggctcacgttcttctcaaagtttgcgagttctgaaaggcaacagaaggctcgggtgaacaagaaccacgagtaaacaaacgagaactgttttctggaaggggatatggcagcctctaagagacagtgaccacccgtttcctccaagggccagaccaaaagcagcccaagcgatggcccaggtgtagccggcaggactgacaaccagccaggggcgccggagggagatccccacggaagacgacccgctgcaaggaacctaccctacccactggactgtcggtgtgggagagaaggaaggcaggggaagaggctggaaggaaagaagaaagccagcggggcccggcccggtgctaacctgtgagcatgtcggtgattcccccgttgagagtctcctgcggcgccttccgtttgctcatggcggcctgcacccgagaaccccagagtgttcagaaccagggactagagccctctcccagcttgaaggaggtaccaggacttggagacgggagcaggagcaacccagctccggcgcgaccggcggaacaatggttgcccccgatggggggcggggcgcacggcgcttgttgtgacgtcacgcgtcctgggcggggcggggcggggctagaggggcgagccctcggcaggtgaggagagagaactcggagggttcgtggactcgtggacgtggacacggcgcgggggaaataggcacctcagaatgacagcccaggggccttcctatgggaagacctggagttttgacctaagatattaaatctgttttctcagtgtttatctggaatcctttccctagaaggggaaacgggagtgcgatcttgattctgaaatacttgcgctggtggggtagcttcctgcacaaaaatgtgcactgtaatagctacccaatgcatggcgcgttttgtacgtggttagaggcgacactggcgtcacactgtcaaaactttctctaaggataccgggcagtccacactccagtgcagccccttacgtactagggcgctgccggagcccggcgtgaaccatgccgagaacaggaatcctcccgcacacgtgttagtacacctgccaaccagtgtcaaaagatattttatttttaatccccctgcctttgcggtagggaccaaattaatgaagagaccacaagaaagggagaagtgtttcatctagatcatgagcaatggaaccctaattataacatgatgacctacatctgagaaatttacagtctgcttgagaaatggaaatgtcacatcagcaatagtttattttacaagcgtaactcctgggttcatatcgaactgcaattccaggcaattgctttgtgcatcgaaaaattaaaatttattacaaaatgatacgtagttgctgtagagaaatctggaaaaatgtataaaaggagaaaattaaaatcagtgatctcaccctacagctgaactattaatattttgggacgtacacttctagtcttctaacccagtctattaaaaattcccattattttccaataaatatcattagtttctttgattagcaaggttgtggtgattgtgtttccttacaatatcagtgtatatcttaagttatgcttattggaaatctgtaattcttctttttttgaatttcctattcatatcatttaccattttcctaatgggggtagtttgttactaatctggtagatcttttctatatattactacttgcccttttatggatagcttttgtaaaaattttgtacatatttgtattttcctcaatttattacttgaggaataaaagttaaaaaaactttatgcctgcaacttaactatctgattagttaagctgcagtgagcagtgaccactctcatttactctttatactctcatttacatatatgacttgtcctagttttccctgttcacacttttttctgtccaatctctattccaggtgatattcagattattttgctctgaagaattattcctccttaaataaaaatgtatttacctctgaattttaaaagttacaaatgtagggaattgtgggatcagttttacaaatttttttgttttgagacagagtttcactcttgtcccgcaggccagagtgcaatggcacgatctcggctcactgcaacctctgcctcccgggttcaagtgattctcctgcctcagcctcccgagtagctgggattacaggatcctgccaccatgcccagctaatttttgtatttttagtagagatggggtttcaccatgttggccaggctggtctcaaacccctgacctcaagtgatccacccgccttggcctattaaagtgctagattacaggcgtgagccactgcacctagcccatttttacaaatactatatttttaaaattagtgccagagaaaccaaggaaaataatccattatctgtccttatcgtcttagaacaaccgacatttgatctgcttcacaaagttcttcttgaaataacttgcttcaattggcttctaagattccacatgctctgggcttcctttttcctcactggccagtcctcagcagggtgtgtgtgtgcgcacatgtgcgcc

SEQ ID NO: 587757 - DNA, 4001 bp, Homo sapiens
aaagtgctgggattataggtgtgagcaaccatgctgggcctactctcagtatttgaacaatttgtatgcccaactttttccattaggtagtatacacaatatttgtatttctcctcgtgaactttagcttgtccataaactgaagctcaagaatgaatacttatataaatgtagtcatgcacccataatgacgttttggtcaaagatggagcacatataaacagtggtcgcataagattatactctatttttgctgtaccttttctatgttcagatatacaaaaacattgtgttacaattgtctattcagtacaatagcatgctgtacaggtgtgtagcctagcagcaataagctataccatatagcctagatgtgtatgtatagtaggatatacggtctaggtttctgtaggaatgatgaaattgcttaaggacacaattctcagaatgtatccctatcctcaagcttgactgcacagaatccctaaaaaataaatttatgagaaccaaaatcaactagcattatttagattatttagagcctatgcattggtccatgaaaatgctaatcatgtttgttttttaagtactgtaatccagaaagttatcattttaaccagaaattaatctttatcaaccccagcattattcatttcctcctaactcatatttagaaagcatcgttaaaaggatacatcttttagtccttttcttgtacattattctgtatccacattctctgcatctgattggatccctagattttatttcattttctgtgtgacactctagaattaaaaaaaaaaatttactcaatgcctaagaggaaaatattacagacaaattatcttaaatgtattatttacctaaggcaatccaaaacactaaaatatactcaatctcaagggtctgctgcttttattaaatatattaaataggaaagaaaaaggttgtaggccatgcatatttccaggagagagaatgaaatctcaacgagctttgtttttttctgttagtaaacagaagaccaaggacgaacccaggtctactgacctcaacgattttttttatggttgctaaagtgttctactttataactctgaagaccagtaactcatttaagcaaagaataaatgtaacaatttcaaaaaaacttaaataaaatattcttactttaggtaagtgctactcttacctccacagatatatatcattggttgctgctttggaggttgaacgtccttctgggtgtccattgttagcccctgaaatcacagactcaaatactgaatatctcaaaagggcttctcacaagtccatccgggcccatttttctcaggaaaagctacaaagatccaattcctaatctgttcctttccccaaatcctatgggttaggtctcaaggacgaaacgcatacacacaagtattgagcgtttaccccaaactggacataataactacttcatacgtgttaggccattataatcttcataacaatcctaggagacatcactcttgttttacagaggacgcaaccgatacttagacatgttaatttccgcaggatcactcagctactaaaagtcaaagggatacagatctgactgtaaagctcgcgttctcgtttaacacaagttctattttcccaaactctagcagaagttagccaaaaaaaattatatccctcaacaggggaacaggctcaccgagggaagaacaatgaaataactcctactggctaaacatctaaactaaaagaaaatagggaaaagagcgatagcatggaccgtatccccagccactctcaactctacccccataccggacctttttaccccaagtgtctttccagttttggcccaaatatccaccacaaaccccaacccgccaattcgcttacctacacagcacggaaaaactcactccgcgtttccaaatacaacccggctagtccaggtgtcgagaccaacttccggcgctggtacatgacgcacagtgctgtctctctttctctctctcttactccccgccccttccgccccaggcgtggccagacaacccggatggcgcaaaggcggtaaagcaggggctttctgtctattagattctacgggtttaagtgcctggtccccagctattttaattttgcaggaaagcagagcattttaacagttatgcaagtacaaggcggtgtgtgtttctgactaatgtagtggtacaaagtaacacttttccagaagggtagagggttagaagaaaaaccgagatgacagtgtccgagaagtactaggatagccgttactcggacgaacatagaagaatcgactacaccaatgattttcacgtagaaaaacacttttccagattgtttttaaaaattgtttgatatctgtactggggcagtggggcagctgcctcctacctttctcttgattttgtttttgctttctggccccttctctgataggctactgtcacatccctcgcccaatccgtttacttgttttaaagcaaaggttagtgtgacggtagctacatgaacaactccctcttaaatctaagagattttggtagctttcgctgtctactcacccgccctccgttctatgtattccaccatagaagaacaaaacgccctgctcagtggaggtgcgttctttcaagtatcagaatttcagtatgatggatcagttgggttcagaacgtttacatttgtttcctttttttccagaagatattttacttagtagggtgaagaaaatgaagctattttaaaaaatttaaaaataacttaattgttaataactattttaaagttagtgaaagaagtaggcgttctttctcccaacacgcactatgtctgatattttattaagcaggttatactcctttcgggccctccatccagaaatctgagaactttgagcttcacctttcacttccagaagttcaaactccttctgttgcatctccccagaccagcttgagagatttaagttgatctttccaggaagatgccatttaaaaacccttcaggaaaacgcagcagttcctggcttctttcttcacagacaggctaacagagcataaatattttaaccattagccctgttacaaagtacctctcctcttaaccaaagaggtgatctaatacaagaggcacaataggcttccctgtaagaactattagatggaaccattgttatcctaagcgaaagatgacagagtgatcccaaaagtcaaactttcatatttacaagctctcttgtatattaactctccagttgaaatatcaagataattctcgtgcagaacaatttatggagatcagaatggatcaacatatgtagaatacaaatgggtcctggggccctacaaaagggcaaagtaatgacaagtcatagcaagaagatccagaatttcaacaagaattcatgttggtgctagttcccaatccaacacgctctttcctatcaacagagactggtagttctaggatcacttgggagtttggtcagtgtaagctacactattatcaatgatagcattaactttttctgagcatgtactacatgccagacatcattgcattgctctgttttaatgggggtagttgtcttgccatcctggaaaacaatgcttttaactctttattaagaaggttatggagatgcaagttgctattttttccctgaatctctgtctttcctttttccttgattatattcacttaaatatatccagatagcttgaatatcatggtaatttgggaaatctcccattacgttttattggatggtcccaaaaagaagcatcagattttgtggcaagcaggtgggttttagagttctgaaattagtgatgggatgacacccaatgcaagaaaggaaagcaaagggctgggcaccgtggctcacgcctgtaatcccagcattttgggaggctgaggcgggcagattgcttgaggtcaggagttcaagaccatcctggctaacatga

SEQ ID NO: 587758 - DNA, 4001 bp, Homo sapiens
tggcacattccacagtgctgtcagttttatagatacacatgtgcctgaaaaggaggaatgtcatagtgtggtagcagtggagttacacatagaagggggcaccaaaacccacttttaaccagcagccttaggttctgcctctgaaagaagatcctctgggacttctaaaagcaaaggaatttctctggtctcacctcttctcttcaaactgctatagagaccagtcagtatcatgggggaacagctctagcagcaaggcctaagtagggaaggccatagatctgccaacactttcaatcaggtgactatggactgtcaccacaattttccaaggcaaagttaggtttttaaaaactgctttatggctgggcgttgtggctcatgcctgtaatcccagcactttgggaggccaaggtgggtggatcacgaggtcaggagttcaagatcagcctggccaagatggtgaaacccgtctctactaaaaactacaaaaagtagctgggcgcggtggcgggcccctgtaatcccagctactcgggaggctgaggcaggagaatcgcttgaacccgggaggcggaggttgcagtgagctgagatggtgcctctgcactccagcctgggcgacagaaagagattcccttaaaaacaaaacaaaaaaccaaaaaaccgctttattcggccaggagcggtggctcacacctgtaatcccagcaccttgggaggtcgaggcaggcgggcggatcacgaggtcaggggttcaagaacagcctggccaacatggcaaaaccctgtgtctactaaaaatacaaaaatcagctgggcatggtggcgggcgcctgtaatcccagctactcaggaggatgaggcaggagaatcgctcaaacctgggaggcagaggttgcagtgagctgagatcgtgccattgcactccagcctgggggacaacggcgagacttcctctcaaaaaaaaccaaaaccaaaaccaaaacctgctttgttcttctgtcatcctgaccccacccctttctgggctactcttgacatccacagtcatatacacatgggagaggccacagagcctcgaatgccatacctaggattcatcatactctagataaaaagtttgcacacagagatggtgaattctgaaccctctaagactgcgaagtttatgcctgtctggctttcatgggtttcttaaagatgtccaaacacacaataaaagtaaataaacactgttcaaattgcttttgaacgactttaacttattaggattctctgcccttcaaccacctctgggagtcatttcaacatcttgtactcagtacctagatttgaaggtaggacagactccctagaatttaaagaggggtaggcttgagaggcccaacgacagtcctgacacacagtaggtcctacacaaacattagttgaatcctggggcttggaattcaaggtagttgagtttctttagaaacgcgccgttgggtaccttcttgactcccccgagggtgaggtccctggaacggatggagggaaggcggccgggggtgaggggaggcgccggccgccgcccgatgagcccccgggccccagtcaggagaggtcggggccctcccggcgtgctgggctcgccggcggcgtttccttccgacatgttgcctgggagagaaggggcgacgagatcaccagaggggactgacacgcggaccctggcggaaccccacccccttgctttccggtcccccagtcggtgcgtccctccagtggcctctcagctcctcccctcccacgtggcgagactcccgggaccacccaggtgagagcctttggctcgcgacacgccctctccaggaaccccgcccaggaaccagacagggacgcacccgggccgcggctccacaccgcgcgtcacaacctcacctgcaacgcgaccagccgccagccttcggtctccgcgccgggcggaagtctgcgtggcagggcctgggcgccgccatcttggcgcggggcggaagtgacgttaggggggcgggactgggccacagtatttatcaggcggcgcttcgctcccctccgccttctcttcccggttcttcccggagtcgggaaaagctgggttgagagggcgaaaaaggatgaggtgactggtctgggctacgctatgctgcggcgctcgggggtcttggcctccgggcggtggcgtggaggcgccaagatcagggtcccgggttttgtcggccaccacgccgcaatgtgaggattcgcctcggcggagcccctgggagcttcggggtagctgctcgggatggggcgaggggcgcggcgcggcgcagagagtgagacctggacttaagagtcggggagtcctgggccacaccgagccctgtctgcgggttctccatggtgaccttggagtggtcattacctccgggcagcgacctcgcccactttcggggaccccttccctgtgctcctggtggagtcctggggtgaggctgtgggggcagcttggaacagccgcagtggaccaaccggtgcccagtcatacccgcttctgatcacgaaggcggtggccctcgtgtgcgctcttggtcaaagcctggagggaattggaataccaagtttgctctactgctggaggaatttaaagaacttttgttgactccagcgtttgtgatttaacataaaaggtgtcatttaatgttatcccccatcccccagaccgtataaaaaccatgtaacaatattatggggagtttgaggaaaggaaatcatttctaccagaatgccacgtagagtactactattaaaaattttgtaatgtatctagtagtcttcacagagttgtcgtatcacaatttcgtgtcctttttcttttcttttctttcttttttttttttttgagacgaggtttctctctgttgcccagacgggagtgcagtggtgcgatcaacacaccgcaacctctgcctcccaggctcaagccatgcttccacctcagcctcctgagtagctgggactacaagtgcatgccaccacgcccggctaattttttctttttctttttttttttttttttttttttgtatttttcgtagagacggggtttcactatgttgcccaggctggtcttgaactcctgaggtcaagtgatcccacccgcttcggcctcccaatgtgctgggattacaggcatcagccaccacgcctggcctgtatcctcctttttcaaataacatttctctgttgcgacatcaaagactgcgtagttctccagtggctgtatcatgatttaagtatttccctgattgtttcttttttccctgttttaaataatgctgcagtgaatgtctggtacatttgacttgctttttttcgattttgtttttgtttttgttttcttttggattatattcccgggatagatttcccgtcctgggataactggccaaaagaagatttttttttaagtaaatatttgcgataggcacggtggcttaggcttgtaatcccagtgctttgggaggcggaggtgggaggatcgcttgaaaggctcggcagttggagatttcagtaagctatgatccagcccttgcattccagcctgggtgacacagcaagaccctatctctaaaaacattttttaaattaaactttttattttgagaacattgtaggttcatgtagagtggtaagaaataatgtagagagatcccaagtactgtttactcgttttcccccagtagtaacctcttgccaccagaatattgacattggtacagttaagatacaagaagtttccatcaccacaaggatccctctagttgcccttttatagccacacctccctccccccacctcctcccaccactaatctgttctccatttctgccattttgttatttcaaaagtgttacataaatggaatcatacagtatgtgacttcttgggattgcttttttcactcggcattgttccccgcagatcatccaagttgt

SEQ ID NO: 587759 - DNA, 4001 bp, Homo sapiens
ctcagcattactcagaaaacctttaatgcatttcttgctgaatccaaatttcatatgccccaaaaaccttttatatatccctaagtcctcacattcacttctgaatcctctctcggcaaaaacaaaccaaaccaaaccaaaacaaaacaaataaaaaaaataccccaaaattcatttgacttttatacactgtcaacttcacaccaattctgtgaagtggatgtaattgttgttattcccatttcacagataagacaactgagtcagaggtgaagtaatatatctaaggtcactgaactatacacagaagagccaagttttctggcctcaagcccattcttcccctaaataccgcaatgctcgggagttgaactaaatcaaacccagcgtggtcagctaggggctgggctggggtaccctgggactgccggtttcttaaagaagacttcagcccacctcaaccccgatttgcttttttgtttcacaggcatattctggagtaggccgcccagagcatagcatgaggctgtgtggctaaaggaactttcgtgtccagaagtaagcaaaaaccactgaaatttactggtcctgaaaacagcctgcacattaaggaataaagatggtggggcaggttgggcagaagaaattcaggcacgactgaaatgcaaagcatttctgacactgataggaaggcttattgatagagaaaggcttgggacccactgctccacatttacagcttaaaaagaaaagaaaagcaaagggacaaaactagtttttaccgacttacaagatattttctacaactagggaagacacagagtaatgtcatccaatacagtttagagtagaattccattgcgccaataaagcacaaggtacattaagaggattattttaaatattctgaacgcttatttagccttaaggttctatagcaaaggcaaagggtggcaaagacaagattatgcaacaaaacagcgaaattttgctttctaaaaaaaagagaatatgattacacttaacacctcctggcaacaatgatctcgtgcagaataaacacccaaaggcaaagagctgagacagagtcctcggtcctttctggtttttttgttttttgttttgttttggtttggtttggtttttgtttttttaaacagagacagcctctgccggacccagtagctcacgcctgtaatcccagcactttgggaggcagaggcgggcggatcacctgaggtcaggcgttcgagaccagcctgaccaacatggggaaaccccgtttctactaaaaatacaaaaattagccgggcgtggtggcggacgcctgtaatcccaggagccaagaccgcgccactacactccagcctgggcgacagagcgagactccgtctcaaataataataataatgataaagtaataataatagaaacagcctctcactctggcccccaggctgaagtgcagtggcgcgatttcggctcactgaaacctccgcccccgccgggttcaagcattctcccgcctcagcctccggagtagataagactataggcggcgccaccgcgcccggctaagtgcttttttacggagacagaagttccgccatgttgcccaggctgctctcgcctgagctcacgcgatcctcccgcctcggcctcccaaagcgctgggattacaggctggagccacctcgccgggcccttctctggttctttaacgtcccgctaccgcgcaggggtggacgcggagataggggctgggcgcggtggacacggccgctcaggcccagcgcagcctcctagggagcctccggacaggccgcgggcaggcggccggggctgcggggggtgcggcccaggccacgtacagggtcccccgggaaacccagctgcacgccccctcgccccttcgccctctcacccctcgccgcagcacctacctgcagcccaagcctctgcggctcctgccaccccgggccagcacgcactgggcctactgcgcttgcgcgttcggaagcgcgtcctgggcgggtgagcgtggcgctgctgccccctggcgtcctcctccggccgtgcactgaagccggagcgaacgccgcggcggtaccagcgcgcacctacccagtctccctgtctggcttctgcttccctaacttgggagaacgattttgtgttgaccgactattgcttcagcctggagccaggctcatgcagagcagctgtcagatctagacgcactgcgaggccttccaaagcgtagtcctcagacccgcggcatctgcagggaccttgctggaaaggctgattcccagctccggcccagacccgccactcggggacccagatgcctgaagttggacaatcgctctgtaaaagaaactgtggggcttagcctagacgcagtaaagctgagctgcacacatcaagcgcagcagacaagaccttggcaagcctccgcggaggggcaggactgggcaaaggcggggaagtccgtcgagggccggccaggagccctgccgggagcccaacacgcactcgggcgcttgctccgggaaaccgaaagggaggcttgcagcatcgaagtcagctgggtcatggaacgtctaggttgtgtacatcggaagcgttagctgcttctacactgacacactgcgaaagtccagaatcaagacagtaacatggtgtgggttaaaaaaactgagccggtactagctatccaaacagtattaaaattaacagaaacgtttgcctatcacatggacaaacagcggtaatacctcctgtcgttacagtagagtctgaaagtttcctcacacatacaagtgagtgtaaattggaattcctcctacgtgccctagcaaatccatttctaggaatttatccttcagaaataacgtctgtggccgggcgccgtggctcatgcctgtaatcccaggactttgggaggccgaggtgggcggatcacgaggtcaggagaccgagaccatcctggataacacggtgaaaccccgtctctactaaaaatacaaaaaattagccgggcatggtggcgggcgtgagaatggcgtgaacccgggaggcggagcttgcagtgagccgagatcgcgccactgtactccagcctgggtgacagagcgagactccgtctcaaaaaaaaaaaaaaaaaaaaagaaaaagaaataatatgtctgcaagatgtatgcacaagagatcttgctgaagcattgctgataaaagatatttataatagagaaaaaaagaaacctgaatgtataacaataggggtttctgaaagaaattatattacatccacatagccatgaaaaatactaacgggtgcacagtttcagtgtgagaagatggtaaagtcctggagatggatgggggtgatggttgcacaacagtgtgaatatacaccaataaattgggtggaggccgagagctcggggccgtgagcaagcctccaacgctccggtcccccggacccgccttttaaactcttattctaattcctttgtcttcgctggactcggggtacccgccgggtggtgtggggctggtttccccaacaacttcactctagcctgggcaaaagagcaaagctccgtctcaaacaaacaaagatagaaaccaaccagcagctctccttgctgagttctttgccacgtggccaccattttgtgcccacaggctttttgggggtgctgggaaaaggtgaaattttaacactgatgaaaaattagaggaattaaattcaaacaaaaaattaaaaataaaaagaacagcagaatttgacgcaccatcaaactggttgtgtcacccatcttcaagctgaaggtagtccaaagcctggaactgagtgtcgggggcacacacagagactcgggagaaaccctctgattctggctcgtggagcagaaaaggaaactcctaaccctcagagggagtgaagaaaattccctgttctttctattttcttcttttctttgcactccagc

SEQ ID NO: 587760 - DNA, 4001 bp, Homo sapiens
aggtaccttgtttcacaagaaatattttacacaagttgaatcatttgtaatgctccaaaatagcttcttatttaaaaacttaaatggtgaattattttgtaaataaaaatatgtcttaattatctagtttaatcagatttaataaacttttgggcacctactatgtgcccaatagtttcaggctgtgtataattccaaagtagaataagaattttgtcatcttaggcagcattgagaacttgatgtggcaggcactattctacatgacttattcatttaattctcacaactctgtggtcactagtattattctcatcttataaatgaagaaatcgaagcacagagattttatataccagtccaaggctactaagcttgtgattgtgctgagattcaaaccaggcagtctgactctatccactattcttttttttttttccaccccttccctctccaatccactattcttgaaacacataacaattagaaaataggatctcatataataaaatactaaattatgcggtacagcacaataggaaacaggacaagggaaagaaaaaaaatgaggccgggcataatggttacacctgtaatccctgcactttgggaggctgaggtgggagaattgcttgagcccaagagttggagaccagcctggccaatatgaagaagccccgtctccacagaaaatacaaaaattagccgggcgtgctggtgtgcacttgtaatcccaactacttgagatgctcaggctggaggattgcttcagcccaggaggtcaaggtttcagtgagccaagatcatgccactgtactccagccagggtgacagagtgagatcctgtcttgaaagaaagaaaacaaagaaaaagaaaaggaaaggaaggaaagaagaaaaagaaaaaaatgtgaattggtaggaaaagtcaaagagaaaatagaatttcagttagctggaatttgcacagataaggaagaaagagtattcaggaatccacagtgtgaatacaggaggactctagtgggaaaagggagtagatgacaatgaaacttgaataggcaaggggaggccagactgaaaggtcttttattccaggccccaaaccaatgaaaaagatcagaaggttcctgagccggaagtaggaaggccaaaaccttagcagtatgtaggacaaaatgagagggaataaagcagattttcttgtattatctttaggaagcagggaaggcagagattttattattattttttttaactgttgcattcctcctagcatctagcagagtgccttacacaaagtagggactcatatatctatgagtgcccgcataaatgaagaaacgaagcgtacttacaatgcaaatattaacaggataagaaatatttagccaagtaccaccccttctgacacagcagaatacttacaagggatctgggccattccagatcaccatctttctttctgaaatgatatcccaatcactagggctctgttcagacagtgaccttgtaaagcccgaggagcaccctagagaagggaacacaggaggagcaggaaagggaacacgggaggaccaacgcccagatctcagcgtggtcgccagaatgacccatattagtcatttggggttgcagaagaggggatgcaagcccattcccaggacggcctccacccggcggggcaatgaagggaaatgactgacgtagggggctccagcgcaggggccgaaggagatgcgacaccagggagaggggccccgggcacaggcagcaaggaaagaggtcagcggagtctgagagagaaacgatgaagaggggagacgggcgccgggaggggggccgccgcatacagttcccccgacactcgcatcctggaaggcaccagcccctcacgaccaacctgccagacgctgtgaggaatccccgggtcagaatgacaagcctccgcgacagtacccaccgagccaaagctcctggagagcgcgctggagagcgcatgcgccagaccgggcgcttcctccacgtggcctggagcgtcgccgaaactacagttcccagaatgccgcacgagcccgcccccagcgggagctgtggggcagaggcgctgctgtggttggtcagtccagtaagaagccagcagggctggtgctggggcttcttctcctgaaggggctgcaagagggaaggcttagccatgtcgtccttgatcagaagggtgatcagcaccgcgaaagccccaggggccattggaccctacaggtaacgtggctggtggaagctgtgtcggacccagggcgtgcgggttcggggattcggggttggggccactccgggccggagccccagctaacacgcaaggaaattgagcctggaaagtaagcaacgcgcccgaagacccacagagagttgggagccacgatgggaccaggaacctgcactccatgggactttgctcgttctggggctgcctcgctgcggagcacagcctgccagaaagctctccccagttagaagccttcagaccctgtgttttgttttgggggagggggtcgtttttgttttcttggtaacagctttattgagatataattcacgtaccgtaagattcaccccctttaacatgtacaattcagtggttttgaccatactcacagagttgtgcagccatcaccactttcttcagaacattttcatcaccccaaaaataaatcccatccccattagcattcactccccattctcctctcccccggcccctgacaatctacttgcatcttcatggatttgcttgttgtggacatttcctataaattgaatcataaaacatgcagtcctttatgaccaacttctttcattagcttcatacttggtctgcctctctcccaactgaaaagagccccatcaacagctccctcctttaaacctactgctgtgagaaaaggcactgagatgtggcagaacaggaattattatagaaaacttggaaataaataaaatgcagtagaagtgagagggcaagtggggtagggagtaaaggagaaaaaagacaaattgattttaacttggggtggaagaggaaaaagaagatttaggaaggttccttgtgagaggtagtcctttggttttgaaggttggttttgtcatttatagtagtgttgtaaagtttgatttttaaattaatttattaaggatttcaacaggaagtcattgagtgaagggcatggaggtagaagtcaggtagagggaatggcttgagtgagggcatggaggtagaagaatgcatggtataaagattttggggagaaagttttcataattcaagtgctacttctgtcttttttgtttgtttgtttgccaaatctgtatatcacttataatttacttaacctatttctttgagatggctcacttcattttatttaacaagttaattgaaaaaggaaactttacaacagtacactaaatagaaaacaattcaatagaaagtaatagtaaaaaataaactcaattaaaaaaaggtattattaaattttagctagatattgcagttggctcaaaacctgaggcctgctctctctttgttaagagtgatgtttctttagccgggtactgtggttcacgcctgtaatcccagcactgtgggaggccgaggtaagaggattgcttgaggtcaggagttcaagaccagcctgggcaacatagtgagacccccatctctatttaaaaaaaaaaaaaagtttaattaaaaactttcaagtgatgttttaatttgttttctaaagatgattttttttctccttaatgtaatcaaacggggtagagtcatcattgctaacatttactgatgcttactcagcagcattgggcactatccctttttttttttttttttttttttttttggaggcagagtctcactctgttgcccaggctagagtgcagtggtgcaatctcagctcactgcaacctccaccccacagattcaagtgattctcatg

SEQ ID NO: 587761 - DNA, 4001 bp, Homo sapiens
gcactttgggaggccaaggcgggaggattgcttgagctcaggagaaaccaacctgagcaacatagtgagaactcatccctacaaagaaatcaaaaaataagctaggcatagttatgagcttgtggtcccacctactcgggaggctgaagtgggaagatcgcttgagacagggaggtcaaggctgcagtgagtgagccttgatcacattactgcactccagcctgggtgacagagcaagaccctgtctcaaaaaaaaaagtttccagaaggaatcttaactcttaccttcaccttcaagtcagttttgtcaaactttaataagcactaaatatgtgctgcctttataaaaatattttcgccaaatcttcaaataaaatggatacgttatgttttctgatacagcttagtatcctctggccagacacaacctttggtgttagttagttcccagtttgagaacctgggaactaactagatgatgtctattttcttccagatctaaaaagttggtgattcagacttgatataaaatctgtcttaagaataaaggtaccttgtttcacaagaaatattttacacaagttgaatcatttgtaatgctccaaaatagcttcttatttaaaaacttaaatggtgaattattttgtaaataaaaatatgtcttaattatctagtttaatcagatttaataaacttttgggcacctactatgtgcccaatagtttcaggctgtgtataattccaaagtagaataagaattttgtcatcttaggcagcattgagaacttgatgtggcaggcactattctacatgacttattcatttaattctcacaactctgtggtcactagtattattctcatcttataaatgaagaaatcgaagcacagagattttatataccagtccaaggctactaagcttgtgattgtgctgagattcaaaccaggcagtctgactctatccactattcttttttttttttccaccccttccctctccaatccactattcttgaaacacataacaattagaaaataggatctcatataataaaatactaaattatgcggtacagcacaataggaaacaggacaagggaaagaaaaaaaatgaggccgggcataatggttacacctgtaatccctgcactttgggaggctgaggtgggagaattgcttgagcccaagagttggagaccagcctggccaatatgaagaagccccgtctccacagaaaatacaaaaattagccgggcgtgctggtgtgcacttgtaatcccaactacttgagatgctcaggctggaggattgcttcagcccaggaggtcaaggtttcagtgagccaagatcatgccactgtactccagccagggtgacagagtgagatcctgtcttgaaagaaagaaaacaaagaaaaagaaaaggaaaggaaggaaagaagaaaaagaaaaaaatgtgaattggtaggaaaagtcaaagagaaaatagaatttcagttagctggaatttgcacagataaggaagaaagagtattcaggaatccacagtgtgaatacaggaggactctagtgggaaaagggagtagatgacaatgaaacttgaataggcaaggggaggccagactgaaaggtcttttattccaggccccaaaccaatgaaaaagatcagaaggttcctgagccggaagtaggaaggccaaaaccttagcagtatgtaggacaaaatgagagggaataaagcagattttcttgtattatctttaggaagcagggaaggcagagattttattattattttttttaactgttgcattcctcctagcatctagcagagtgccttacacaaagtagggactcatatatctatgagtgcccgcataaatgaagaaacgaagcgtacttacaatgcaaatattaacaggataagaaatatttagccaagtaccaccccttctgacacagcagaatacttacaagggatctgggccattccagatcaccatctttctttctgaaatgatatcccaatcactagggctctgttcagacagtgaccttgtaaagcccgaggagcaccctagagaagggaacacaggaggagcaggaaagggaacacgggaggaccaacgcccagatctcagcgtggtcgccagaatgacccatattagtcatttggggttgcagaagaggggatgcaagcccattcccaggacggcctccacccggcggggcaatgaagggaaatgactgacgtagggggctccagcgcaggggccgaaggagatgcgacaccagggagaggggccccgggcacaggcagcaaggaaagaggtcagcggagtctgagagagaaacgatgaagaggggagacgggcgccgggaggggggccgccgcatacagttcccccgacactcgcatcctggaaggcaccagcccctcacgaccaacctgccagacgctgtgaggaatccccgggtcagaatgacaagcctccgcgacagtacccaccgagccaaagctcctggagagcgcgctggagagcgcatgcgccagaccgggcgcttcctccacgtggcctggagcgtcgccgaaactacagttcccagaatgccgcacgagcccgcccccagcgggagctgtggggcagaggcgctgctgtggttggtcagtccagtaagaagccagcagggctggtgctggggcttcttctcctgaaggggctgcaagagggaaggcttagccatgtcgtccttgatcagaagggtgatcagcaccgcgaaagccccaggggccattggaccctacaggtaacgtggctggtggaagctgtgtcggacccagggcgtgcgggttcggggattcggggttggggccactccgggccggagccccagctaacacgcaaggaaattgagcctggaaagtaagcaacgcgcccgaagacccacagagagttgggagccacgatgggaccaggaacctgcactccatgggactttgctcgttctggggctgcctcgctgcggagcacagcctgccagaaagctctccccagttagaagccttcagaccctgtgttttgttttgggggagggggtcgtttttgttttcttggtaacagctttattgagatataattcacgtaccgtaagattcaccccctttaacatgtacaattcagtggttttgaccatactcacagagttgtgcagccatcaccactttcttcagaacattttcatcaccccaaaaataaatcccatccccattagcattcactccccattctcctctcccccggcccctgacaatctacttgcatcttcatggatttgcttgttgtggacatttcctataaattgaatcataaaacatgcagtcctttatgaccaacttctttcattagcttcatacttggtctgcctctctcccaactgaaaagagccccatcaacagctccctcctttaaacctactgctgtgagaaaaggcactgagatgtggcagaacaggaattattatagaaaacttggaaataaataaaatgcagtagaagtgagagggcaagtggggtagggagtaaaggagaaaaaagacaaattgattttaacttggggtggaagaggaaaaagaagatttaggaaggttccttgtgagaggtagtcctttggttttgaaggttggttttgtcatttatagtagtgttgtaaagtttgatttttaaattaatttattaaggatttcaacaggaagtcattgagtgaagggcatggaggtagaagtcaggtagagggaatggcttgagtgagggcatggaggtagaagaatgcatggtataaagattttggggagaaagttttcataattcaagtgctacttctgtcttttttgtttgtttgtttgccaaatctgtatatcacttataatttacttaacctatttctttgagatggctcacttcattttatttaacaagttaattgaaaaaggaaactttaca
